United States Patent Application Publication US 2007/0214517 A1 - sequence listing, part 17

SEQ ID NO: 21951 - DNA, 1051 bp, Arabidopsis thaliana
  misc_feature (1)..(1051): Ceres Seq. ID no. 12393907
  misc_feature: MA Experiment ID: 108434 Result: Down-regulated in Transcription
  misc_feature: MA Experiment 108434 PARAMETER Experiment Name: At_Root_Tips_cDNA_P Parameter: Tissue Value: Root Tips
  misc_feature: MA Experiment ID: 108469 Result: Up-regulated in Transcription
  misc_feature: MA Experiment ID: 108473 Result: Down-regulated in Transcription
  misc_feature: MA Experiment 108473 PARAMETER Experiment Name: At_Drought_Flowers_cDNA_P Parameter: Timepoint (hr) Value: 7 d
  misc_feature: MA Experiment 108473 PARAMETER Experiment Name: At_Drought_Flowers_cDNA_P Parameter: Tissue Value: Flower
  misc_feature: MA Experiment 108473 PARAMETER Experiment Name: At_Drought_Flowers_cDNA_P Parameter: Treatment Value: Drought vs. No Drought
  misc_feature: MA Experiment ID: 108488 Result: Up-regulated in Transcription
  misc_feature: MA Experiment ID: 108561 Result: Down-regulated in Transcription
  misc_feature: MA Experiment 108561 PARAMETER Experiment Name: At_100uM_ABA_cDNA_P Parameter: Timepoint (hr) Value: 6
  misc_feature: MA Experiment 108561 PARAMETER Experiment Name: At_100uM_ABA_cDNA_P Parameter: Tissue Value: Aerial
  misc_feature: MA Experiment 108561 PARAMETER Experiment Name: At_100uM_ABA_cDNA_P Parameter: Treatment Value: 100uM ABA vs. No Treatment
  misc_feature: MA Experiment ID: 108572 Result: Down-regulated in Transcription
  misc_feature: MA Experiment 108572 PARAMETER Experiment Name: At_Drought_cDNA_P Parameter: Timepoint (hr) Value: 1
  misc_feature: MA Experiment 108572 PARAMETER Experiment Name: At_Drought_cDNA_P Parameter: Tissue Value: Aerial
  misc_feature: MA Experiment 108572 PARAMETER Experiment Name: At_Drought_cDNA_P Parameter: Treatment Value: Drought vs. No Drought
  misc_feature: MA Experiment ID: 108573 Result: Down-regulated in Transcription
  misc_feature: MA Experiment 108573 PARAMETER Experiment Name: At_Drought_cDNA_P Parameter: Timepoint (hr) Value: 6
  misc_feature: MA Experiment 108573 PARAMETER Experiment Name: At_Drought_cDNA_P Parameter: Tissue Value: Aerial
  misc_feature: MA Experiment 108573 PARAMETER Experiment Name: At_Drought_cDNA_P Parameter: Treatment Value: Drought vs. No Drought
  misc_feature: MA Experiment ID: 108595 Result: Down-regulated in Transcription
  misc_feature: MA Experiment 108595 PARAMETER Experiment Name: At_Ler-pi_Ovule_cDNA_P Parameter: Plant Line Value: null
  misc_feature: MA Experiment ID: 108605 Result: Down-regulated in Transcription
  misc_feature: MA Experiment 108605 PARAMETER Experiment Name: At_100uM_ABA_cDNA_P Parameter: Timepoint (hr) Value: 6
  misc_feature: MA Experiment 108605 PARAMETER Experiment Name: At_100uM_ABA_cDNA_P Parameter: Tissue Value: Aerial
  misc_feature: MA Experiment 108605 PARAMETER Experiment Name: At_100uM_ABA_cDNA_P Parameter: Treatment Value: 100uM ABA vs. No Treatment
  misc_feature: MA Experiment ID: 108607 Result: Down-regulated in Transcription
  misc_feature: MA Experiment 108607 PARAMETER Experiment Name: At_100uM_ABA_cDNA_P Parameter: Timepoint (hr) Value: 4
  misc_feature: MA Experiment 108607 PARAMETER Experiment Name: At_100uM_ABA_cDNA_P Parameter: Tissue Value: Aerial
  misc_feature: MA Experiment 108607 PARAMETER Experiment Name: At_100uM_ABA_cDNA_P Parameter: Treatment Value: 100uM ABA vs. No Treatment
  misc_feature: MA Experiment ID: 108608 Result: Down-regulated in Transcription
  misc_feature: MA Experiment 108608 PARAMETER Experiment Name: At_100uM_ABA_cDNA_P Parameter: Timepoint (hr) Value: 1
  misc_feature: MA Experiment 108608 PARAMETER Experiment Name: At_100uM_ABA_cDNA_P Parameter: Tissue Value: Aerial
  misc_feature: MA Experiment 108608 PARAMETER Experiment Name: At_100uM_ABA_cDNA_P Parameter: Treatment Value: 100uM ABA vs. No Treatment
  misc_feature: MA Experiment ID: 108609 Result: Down-regulated in Transcription
  misc_feature: MA Experiment 108609 PARAMETER Experiment Name: At_100uM_ABA_cDNA_P Parameter: Timepoint (hr) Value: 24
  misc_feature: MA Experiment 108609 PARAMETER Experiment Name: At_100uM_ABA_cDNA_P Parameter: Tissue Value: Aerial
  misc_feature: MA Experiment 108609 PARAMETER Experiment Name: At_100uM_ABA_cDNA_P Parameter: Treatment Value: 100uM ABA vs. No Treatment
  misc_feature: MA Experiment ID: 20000069 Result: Down-regulated in Transcription
  misc_feature: MA Experiment 20000069 PARAMETER Experiment Name: At_100uM_ABA_Mutants_cDNA_P Parameter: Plant Line Value: CS23
  misc_feature: MA Experiment 20000069 PARAMETER Experiment Name: At_100uM_ABA_Mutants_cDNA_P Parameter: Timepoint (hr) Value: 6
  misc_feature: MA Experiment 20000069 PARAMETER Experiment Name: At_100uM_ABA_Mutants_cDNA_P Parameter: Tissue Value: Aerial
  misc_feature: MA Experiment 20000069 PARAMETER Experiment Name: At_100uM_ABA_Mutants_cDNA_P Parameter: Treatment Value: 100uM ABA vs. No Treatment
  misc_feature: MA Experiment ID: 20000071 Result: Down-regulated in Transcription
  misc_feature: MA Experiment 20000071 PARAMETER Experiment Name: At_100uM_ABA_Mutants_cDNA_P Parameter: Plant Line Value: CS8104
  misc_feature: MA Experiment 20000071 PARAMETER Experiment Name: At_100uM_ABA_Mutants_cDNA_P Parameter: Timepoint (hr) Value: 6
  misc_feature: MA Experiment 20000071 PARAMETER Experiment Name: At_100uM_ABA_Mutants_cDNA_P Parameter: Tissue Value: Aerial
  misc_feature: MA Experiment 20000071 PARAMETER Experiment Name: At_100uM_ABA_Mutants_cDNA_P Parameter: Treatment Value: 100uM ABA vs. No Treatment
  misc_feature: MA Experiment ID: 20000072 Result: Down-regulated in Transcription
  misc_feature: MA Experiment 20000072 PARAMETER Experiment Name: At_100uM_ABA_Mutants_cDNA_P Parameter: Plant Line Value: CS8105
  misc_feature: MA Experiment 20000072 PARAMETER Experiment Name: At_100uM_ABA_Mutants_cDNA_P Parameter: Timepoint (hr) Value: 6
  misc_feature: MA Experiment 20000072 PARAMETER Experiment Name: At_100uM_ABA_Mutants_cDNA_P Parameter: Tissue Value: Aerial
  misc_feature: MA Experiment 20000072 PARAMETER Experiment Name: At_100uM_ABA_Mutants_cDNA_P Parameter: Treatment Value: 100uM ABA vs. No Treatment
  misc_feature: MA Experiment ID: 20000086 Result: Down-regulated in Transcription
  misc_feature: MA Experiment 20000086 PARAMETER Experiment Name: At_100uM_ABA_Mutants_cDNA_P Parameter: Plant Line Value: CS22
  misc_feature: MA Experiment 20000086 PARAMETER Experiment Name: At_100uM_ABA_Mutants_cDNA_P Parameter: Timepoint (hr) Value: 6
  misc_feature: MA Experiment 20000086 PARAMETER Experiment Name: At_100uM_ABA_Mutants_cDNA_P Parameter: Tissue Value: Aerial
  misc_feature: MA Experiment 20000086 PARAMETER Experiment Name: At_100uM_ABA_Mutants_cDNA_P Parameter: Treatment Value: 100uM ABA vs. No Treatment
  misc_feature: MA Experiment ID: 20000087 Result: Down-regulated in Transcription
  misc_feature: MA Experiment 20000087 PARAMETER Experiment Name: At_100uM_ABA_Mutants_cDNA_P Parameter: Plant Line Value: WS
  misc_feature: MA Experiment 20000087 PARAMETER Experiment Name: At_100uM_ABA_Mutants_cDNA_P Parameter: Timepoint (hr) Value: 6
  misc_feature: MA Experiment 20000087 PARAMETER Experiment Name: At_100uM_ABA_Mutants_cDNA_P Parameter: Tissue Value: Aerial
  misc_feature: MA Experiment 20000087 PARAMETER Experiment Name: At_100uM_ABA_Mutants_cDNA_P Parameter: Treatment Value: 100uM ABA vs. No Treatment
  misc_feature: MA Experiment ID: 20000088 Result: Down-regulated in Transcription
  misc_feature: MA Experiment 20000088 PARAMETER Experiment Name: At_100uM_ABA_Mutants_cDNA_P Parameter: Plant Line Value: Landsberg
  misc_feature: MA Experiment 20000088 PARAMETER Experiment Name: At_100uM_ABA_Mutants_cDNA_P Parameter: Timepoint (hr) Value: 6
  misc_feature: MA Experiment 20000088 PARAMETER Experiment Name: At_100uM_ABA_Mutants_cDNA_P Parameter: Tissue Value: Aerial
  misc_feature: MA Experiment 20000088 PARAMETER Experiment Name: At_100uM_ABA_Mutants_cDNA_P Parameter: Treatment Value: 100uM ABA vs. No Treatment
  misc_feature: MA Experiment ID: 20000112 Result: Up-regulated in Transcription
  misc_feature: MA Experiment 20000112 PARAMETER Experiment Name: At_42deg_Heat_cDNA_P Parameter: Temperature (deg C) Value: 42 vs. 22
  misc_feature: MA Experiment 20000112 PARAMETER Experiment Name: At_42deg_Heat_cDNA_P Parameter: Timepoint (hr) Value: 2
  misc_feature: MA Experiment 20000112 PARAMETER Experiment Name: At_42deg_Heat_cDNA_P Parameter: Tissue Value: Aerial
  misc_feature: MA Experiment ID: 20000113 Result: Up-regulated in Transcription
  misc_feature: MA Experiment 20000113 PARAMETER Experiment Name: At_42deg_Heat_cDNA_P Parameter: Temperature (deg C) Value: 42 vs. 22
  misc_feature: MA Experiment 20000113 PARAMETER Experiment Name: At_42deg_Heat_cDNA_P Parameter: Timepoint (hr) Value: 8
  misc_feature: MA Experiment 20000113 PARAMETER Experiment Name: At_42deg_Heat_cDNA_P Parameter: Tissue Value: Aerial
  misc_feature: MA Experiment ID: 20000117 Result: Down-regulated in Transcription
  misc_feature: MA Experiment 20000117 PARAMETER Experiment Name: At_100uM_ABA_Mutants_cDNA_P Parameter: Plant Line Value: Columbia
  misc_feature: MA Experiment 20000117 PARAMETER Experiment Name: At_100uM_ABA_Mutants_cDNA_P Parameter: Timepoint (hr) Value: 6
  misc_feature: MA Experiment 20000117 PARAMETER Experiment Name: At_100uM_ABA_Mutants_cDNA_P Parameter: Tissue Value: Aerial
  misc_feature: MA Experiment 20000117 PARAMETER Experiment Name: At_100uM_ABA_Mutants_cDNA_P Parameter: Treatment Value: 100uM ABA vs. No Treatment
  misc_feature: MA Experiment ID: 20000166 Result: Down-regulated in Transcription
  misc_feature: MA Experiment 20000166 PARAMETER Experiment Name: At_100uM_ABA_P Parameter: Age (day) Value: 14
  misc_feature: MA Experiment 20000166 PARAMETER Experiment Name: At_100uM_ABA_P Parameter: Organism Value: A. thaliana
  misc_feature: MA Experiment 20000166 PARAMETER Experiment Name: At_100uM_ABA_P Parameter: Plant Line Value: WS
  misc_feature: MA Experiment 20000166 PARAMETER Experiment Name: At_100uM_ABA_P Parameter: Timepoint (hr) Value: 1
  misc_feature: MA Experiment 20000166 PARAMETER Experiment Name: At_100uM_ABA_P Parameter: Tissue Value: Aerial
  misc_feature: MA Experiment 20000166 PARAMETER Experiment Name: At_100uM_ABA_P Parameter: Treatment Value: 100uM ABA vs. No Treatment
  misc_feature: MA Experiment ID: 20000169 Result: Down-regulated in Transcription
  misc_feature: MA Experiment 20000169 PARAMETER Experiment Name: At_100uM_ABA_P Parameter: Age (day) Value: 14
  misc_feature: MA Experiment 20000169 PARAMETER Experiment Name: At_100uM_ABA_P Parameter: Organism Value: A. thaliana
  misc_feature: MA Experiment 20000169 PARAMETER Experiment Name: At_100uM_ABA_P Parameter: Plant Line Value: WS
  misc_feature: MA Experiment 20000169 PARAMETER Experiment Name: At_100uM_ABA_P Parameter: Timepoint (hr) Value: 6
  misc_feature: MA Experiment 20000169 PARAMETER Experiment Name: At_100uM_ABA_P Parameter: Tissue Value: Aerial
  misc_feature: MA Experiment 20000169 PARAMETER Experiment Name: At_100uM_ABA_P Parameter: Treatment Value: 100uM ABA vs. No Treatment
  misc_feature: MA Experiment ID: 20000173 Result: Up-regulated in Transcription
  misc_feature: MA Experiment 20000173 PARAMETER Experiment Name: At_42deg_Heat_P Parameter: Age (day) Value: 14
  misc_feature: MA Experiment 20000173 PARAMETER Experiment Name: At_42deg_Heat_P Parameter: Organism Value: A. thaliana
  misc_feature: MA Experiment 20000173 PARAMETER Experiment Name: At_42deg_Heat_P Parameter: Plant Line Value: WS
  misc_feature: MA Experiment 20000173 PARAMETER Experiment Name: At_42deg_Heat_P Parameter: Temperature (deg C) Value: 42 vs. 22
  misc_feature: MA Experiment 20000173 PARAMETER Experiment Name: At_42deg_Heat_P Parameter: Timepoint (hr) Value: 6
  misc_feature: MA Experiment 20000173 PARAMETER Experiment Name: At_42deg_Heat_P Parameter: Tissue Value: Aerial
  misc_feature: MA Experiment ID: 20000179 Result: Up-regulated in Transcription
  misc_feature: MA Experiment 20000179 PARAMETER Experiment Name: At_Germinating_Seeds_P Parameter: Age (hr) Value: 6 vs. 0
  misc_feature: MA Experiment 20000179 PARAMETER Experiment Name: At_Germinating_Seeds_P Parameter: Tissue Value: Germinating Seeds
  misc_feature: MA Experiment ID: 20000184 Result: Up-regulated in Transcription
  misc_feature: MA Experiment 20000184 PARAMETER Experiment Name: At_Shoots__P Parameter: Age (day) Value: 7
  misc_feature: MA Experiment 20000184 PARAMETER Experiment Name: At_Shoots__P Parameter: Tissue Value: Shoots vs. Whole Plant
  misc_feature: MA Experiment ID: 20000227 Result: Down-regulated in Transcription
  misc_feature: MA Experiment 20000227 PARAMETER Experiment Name: At_Root-Tips-vs-Tops_P Parameter: Tissue Value: Root Tips vs. Root Tops
  misc_feature: MA Experiment ID: 20000267 Result: Down-regulated in Transcription
  misc_feature: MA Experiment 20000267 PARAMETER Experiment Name: At_Drought_P Parameter: Age (day) Value: 7
  misc_feature: MA Experiment 20000267 PARAMETER Experiment Name: At_Drought_P Parameter: Organism Value: A. thaliana
  misc_feature: MA Experiment 20000267 PARAMETER Experiment Name: At_Drought_P Parameter: Plant Line Value: WS
  misc_feature: MA Experiment 20000267 PARAMETER Experiment Name: At_Drought_P Parameter: Timepoint (hr) Value: 6
  misc_feature: MA Experiment 20000267 PARAMETER Experiment Name: At_Drought_P Parameter: Tissue Value: Whole Plant
  misc_feature: MA Experiment 20000267 PARAMETER Experiment Name: At_Drought_P Parameter: Treatment Value: Drought vs. No Drought
  misc_feature: MA Experiment ID: 20000268 Result: Down-regulated in Transcription
  misc_feature: MA Experiment 20000268 PARAMETER Experiment Name: At_100mM_NaCl__P Parameter: Age (day) Value: 14
  misc_feature: MA Experiment 20000268 PARAMETER Experiment Name: At_100mM_NaCl__P Parameter: Organism Value: A. thaliana
  misc_feature: MA Experiment 20000268 PARAMETER Experiment Name: At_100mM_NaCl__P Parameter: Plant Line Value: WS
  misc_feature: MA Experiment 20000268 PARAMETER Experiment Name: At_100mM_NaCl__P Parameter: Timepoint (hr) Value: 6
  misc_feature: MA Experiment 20000268 PARAMETER Experiment Name: At_100mM_NaCl__P Parameter: Tissue Value: Whole Plant
  misc_feature: MA Experiment 20000268 PARAMETER Experiment Name: At_100mM_NaCl__P Parameter: Treatment Value: 100mM NaCl vs. No Treatment
  misc_feature: MA Experiment ID: 20000436 Result: Down-regulated in Transcription
  misc_feature: MA Experiment 20000436 PARAMETER Experiment Name: At_Drought_P Parameter: Age (day) Value: 7
  misc_feature: MA Experiment 20000436 PARAMETER Experiment Name: At_Drought_P Parameter: Organism Value: A. thaliana
  misc_feature: MA Experiment 20000436 PARAMETER Experiment Name: At_Drought_P Parameter: Plant Line Value: WS
  misc_feature: MA Experiment 20000436 PARAMETER Experiment Name: At_Drought_P Parameter: Timepoint (hr) Value: 12
  misc_feature: MA Experiment 20000436 PARAMETER Experiment Name: At_Drought_P Parameter: Tissue Value: Whole Plant
  misc_feature: MA Experiment 20000436 PARAMETER Experiment Name: At_Drought_P Parameter: Treatment Value: Drought vs. No Drought
  misc_feature: MA Experiment ID: 20000437 Result: Down-regulated in Transcription
  misc_feature: MA Experiment 20000437 PARAMETER Experiment Name: At_Drought_P Parameter: Age (day) Value: 8
  misc_feature: MA Experiment 20000437 PARAMETER Experiment Name: At_Drought_P Parameter: Organism Value: A. thaliana
  misc_feature: MA Experiment 20000437 PARAMETER Experiment Name: At_Drought_P Parameter: Plant Line Value: WS
  misc_feature: MA Experiment 20000437 PARAMETER Experiment Name: At_Drought_P Parameter: Timepoint (hr) Value: 24
  misc_feature: MA Experiment 20000437 PARAMETER Experiment Name: At_Drought_P Parameter: Tissue Value: Whole Plant
  misc_feature: MA Experiment 20000437 PARAMETER Experiment Name: At_Drought_P Parameter: Treatment Value: Drought vs. No Drought
  misc_feature: MA Experiment ID: 20000441 Result: Up-regulated in Transcription
  misc_feature: MA Experiment 20000441 PARAMETER Experiment Name: At_1uM_BR-BRZ__P Parameter: Tissue Value: Shoot Apices
  misc_feature: MA Experiment 20000441 PARAMETER Experiment Name: At_1uM_BR-BRZ__P Parameter: Treatment Value: 1uM BR vs. No Treatment
  misc_feature: MA Experiment ID: 20000443 Result: Up-regulated in Transcription
  misc_feature: MA Experiment 20000443 PARAMETER Experiment Name: At_1uM_BR-BRZ__P Parameter: Tissue Value: Shoot Apices
  misc_feature: MA Experiment 20000443 PARAMETER Experiment Name: At_1uM_BR-BRZ__P Parameter: Treatment Value: 1uM BRZ vs. No Treatment
  misc_feature: MA Experiment ID: 20000453 Result: Down-regulated in Transcription
  misc_feature: MA Experiment 20000453 PARAMETER Experiment Name: At_100uM_ABA_P Parameter: Age (day) Value: 15
  misc_feature: MA Experiment 20000453 PARAMETER Experiment Name: At_100uM_ABA_P Parameter: Organism Value: A. thaliana
  misc_feature: MA Experiment 20000453 PARAMETER Experiment Name: At_100uM_ABA_P Parameter: Plant Line Value: WS
  misc_feature: MA Experiment 20000453 PARAMETER Experiment Name: At_100uM_ABA_P Parameter: Timepoint (hr) Value: 24
  misc_feature: MA Experiment 20000453 PARAMETER Experiment Name: At_100uM_ABA_P Parameter: Tissue Value: Aerial
  misc_feature: MA Experiment 20000453 PARAMETER Experiment Name: At_100uM_ABA_P Parameter: Treatment Value: 100uM ABA vs. No Treatment
  misc_feature: MA Experiment ID: 20000455 Result: Down-regulated in Transcription
  misc_feature: MA Experiment 20000455 PARAMETER Experiment Name: At_100uM_ABA_P Parameter: Age (day) Value: 16
  misc_feature: MA Experiment 20000455 PARAMETER Experiment Name: At_100uM_ABA_P Parameter: Organism Value: A. thaliana
  misc_feature: MA Experiment 20000455 PARAMETER Experiment Name: At_100uM_ABA_P Parameter: Plant Line Value: WS
  misc_feature: MA Experiment 20000455 PARAMETER Experiment Name: At_100uM_ABA_P Parameter: Timepoint (hr) Value: 48
  misc_feature: MA Experiment 20000455 PARAMETER Experiment Name: At_100uM_ABA_P Parameter: Tissue Value: Aerial
  misc_feature: MA Experiment 20000455 PARAMETER Experiment Name: At_100uM_ABA_P Parameter: Treatment Value: 100uM ABA vs. No Treatment
  misc_feature: MA Experiment ID: 20000606 Result: Up-regulated in Transcription
  misc_feature: MA Experiment 20000606 PARAMETER Experiment Name: At_CS8548_Mutant_P Parameter: Age (day) Value: 14
  misc_feature: MA Experiment 20000606 PARAMETER Experiment Name: At_CS8548_Mutant_P Parameter: Plant Line Value: CS8548 vs. wt
  misc_feature: MA Experiment 20000606 PARAMETER Experiment Name: At_CS8548_Mutant_P Parameter: Tissue Value: Whole Plant
  misc_feature: MA Experiment ID: 20001247 Result: Up-regulated in Transcription
  misc_feature: MA Experiment 20001247 PARAMETER Experiment Name: At_Far-red-induction_P Parameter: Age (day) Value: 7
  misc_feature: MA Experiment 20001247 PARAMETER Experiment Name: At_Far-red-induction_P Parameter: Light Value: Far-red vs. White
  misc_feature: MA Experiment 20001247 PARAMETER Experiment Name: At_Far-red-induction_P Parameter: Organism Value: A. thaliana
  misc_feature: MA Experiment 20001247 PARAMETER Experiment Name: At_Far-red-induction_P Parameter: Plant Line Value: Columbia
  misc_feature: MA Experiment 20001247 PARAMETER Experiment Name: At_Far-red-induction_P Parameter: Timepoint (hr) Value: 1
  misc_feature: MA Experiment 20001247 PARAMETER Experiment Name: At_Far-red-induction_P Parameter: Tissue Value: Whole Plant
  misc_feature: MA Experiment ID: 20001248 Result: Down-regulated in Transcription
  misc_feature: MA Experiment 20001248 PARAMETER Experiment Name: At_Far-red-induction_P Parameter: Age (day) Value: 7
  misc_feature: MA Experiment 20001248 PARAMETER Experiment Name: At_Far-red-induction_P Parameter: Light Value: Far-red vs. White
  misc_feature: MA Experiment 20001248 PARAMETER Experiment Name: At_Far-red-induction_P Parameter: Organism Value: A. thaliana
  misc_feature: MA Experiment 20001248 PARAMETER Experiment Name: At_Far-red-induction_P Parameter: Plant Line Value: Columbia
  misc_feature: MA Experiment 20001248 PARAMETER Experiment Name: At_Far-red-induction_P Parameter: Timepoint (hr) Value: 4
  misc_feature: MA Experiment 20001248 PARAMETER Experiment Name: At_Far-red-induction_P Parameter: Tissue Value: Whole Plant
  misc_feature: MA Experiment ID: 20001554 Result: Down-regulated in Transcription
  misc_feature: MA Experiment 20001554 PARAMETER Experiment Name: At_Drought_Soil_Dry_P Parameter: Age (day) Value: 21
  misc_feature: MA Experiment 20001554 PARAMETER Experiment Name: At_Drought_Soil_Dry_P Parameter: Organism Value: A. thaliana
  misc_feature: MA Experiment 20001554 PARAMETER Experiment Name: At_Drought_Soil_Dry_P Parameter: Plant Line Value: WS
  misc_feature: MA Experiment 20001554 PARAMETER Experiment Name: At_Drought_Soil_Dry_P Parameter: Post Timepoint (hr) Value: None
  misc_feature: MA Experiment 20001554 PARAMETER Experiment Name: At_Drought_Soil_Dry_P Parameter: Post-Treatment Value: None
  misc_feature: MA Experiment 20001554 PARAMETER Experiment Name: At_Drought_Soil_Dry_P Parameter: Timepoint (day) Value: 7
  misc_feature: MA Experiment 20001554 PARAMETER Experiment Name: At_Drought_Soil_Dry_P Parameter: Treatment Value: Drought vs. No Drought
  misc_feature: MA Experiment ID: 20001555 Result: Down-regulated in Transcription
  misc_feature: MA Experiment 20001555 PARAMETER Experiment Name: At_Drought_Soil_Dry_P Parameter: Age (day) Value: 24
  misc_feature: MA Experiment 20001555 PARAMETER Experiment Name: At_Drought_Soil_Dry_P Parameter: Organism Value: A. thaliana
  misc_feature: MA Experiment 20001555 PARAMETER Experiment Name: At_Drought_Soil_Dry_P Parameter: Plant Line Value: WS
  misc_feature: MA Experiment 20001555 PARAMETER Experiment Name: At_Drought_Soil_Dry_P Parameter: Post Timepoint (hr) Value: None
  misc_feature: MA Experiment 20001555 PARAMETER Experiment Name: At_Drought_Soil_Dry_P Parameter: Post-Treatment Value: None
  misc_feature: MA Experiment 20001555 PARAMETER Experiment Name: At_Drought_Soil_Dry_P Parameter: Timepoint (day) Value: 10
  misc_feature: MA Experiment 20001555 PARAMETER Experiment Name: At_Drought_Soil_Dry_P Parameter: Treatment Value: Drought vs. No Drought
  misc_feature: MA Experiment ID: 20001556 Result: Down-regulated in Transcription
  misc_feature: MA Experiment 20001556 PARAMETER Experiment Name: At_Drought_Soil_Dry_P Parameter: Age (day) Value: 26
  misc_feature: MA Experiment 20001556 PARAMETER Experiment Name: At_Drought_Soil_Dry_P Parameter: Organism Value: A. thaliana
  misc_feature: MA Experiment 20001556 PARAMETER Experiment Name: At_Drought_Soil_Dry_P Parameter: Plant Line Value: WS
  misc_feature: MA Experiment 20001556 PARAMETER Experiment Name: At_Drought_Soil_Dry_P Parameter: Post Timepoint (hr) Value: None
  misc_feature: MA Experiment 20001556 PARAMETER Experiment Name: At_Drought_Soil_Dry_P Parameter: Post-Treatment Value: None
  misc_feature: MA Experiment 20001556 PARAMETER Experiment Name: At_Drought_Soil_Dry_P Parameter: Timepoint (day) Value: 12
  misc_feature: MA Experiment 20001556 PARAMETER Experiment Name: At_Drought_Soil_Dry_P Parameter: Treatment Value: Drought vs. No Drought
  misc_feature: MA Experiment ID: 20001557 Result: Up-regulated in Transcription
  misc_feature: MA Experiment 20001557 PARAMETER Experiment Name: At_Drought_Soil_Dry_P Parameter: Age (day) Value: 27
  misc_feature: MA Experiment 20001557 PARAMETER Experiment Name: At_Drought_Soil_Dry_P Parameter: Organism Value: A. thaliana
  misc_feature: MA Experiment 20001557 PARAMETER Experiment Name: At_Drought_Soil_Dry_P Parameter: Plant Line Value: WS
  misc_feature: MA Experiment 20001557 PARAMETER Experiment Name: At_Drought_Soil_Dry_P Parameter: Post Timepoint (hr) Value: 3
  misc_feature: MA Experiment 20001557 PARAMETER Experiment Name: At_Drought_Soil_Dry_P Parameter: Post-Treatment Value: Re-Water vs. No Drought
  misc_feature: MA Experiment 20001557 PARAMETER Experiment Name: At_Drought_Soil_Dry_P Parameter: Timepoint (day) Value: 13
  misc_feature: MA Experiment 20001557 PARAMETER Experiment Name: At_Drought_Soil_Dry_P Parameter: Treatment Value: Drought vs. No Drought
  misc_feature: MA Experiment ID: 20001558 Result: Up-regulated in Transcription
  misc_feature: MA Experiment 20001558 PARAMETER Experiment Name: At_Drought_Soil_Dry_P Parameter: Age (day) Value: 27
  misc_feature: MA Experiment 20001558 PARAMETER Experiment Name: At_Drought_Soil_Dry_P Parameter: Organism Value: A. thaliana
  misc_feature: MA Experiment 20001558 PARAMETER Experiment Name: At_Drought_Soil_Dry_P Parameter: Plant Line Value: WS
  misc_feature: MA Experiment 20001558 PARAMETER Experiment Name: At_Drought_Soil_Dry_P Parameter: Post Timepoint (hr) Value: 6
  misc_feature: MA Experiment 20001558 PARAMETER Experiment Name: At_Drought_Soil_Dry_P Parameter: Post-Treatment Value: Re-Water vs. No Drought
  misc_feature: MA Experiment 20001558 PARAMETER Experiment Name: At_Drought_Soil_Dry_P Parameter: Timepoint (day) Value: 13
  misc_feature: MA Experiment 20001558 PARAMETER Experiment Name: At_Drought_Soil_Dry_P Parameter: Treatment Value: Drought vs. No Drought
  misc_feature: MA Experiment ID: 20001757 Result: Up-regulated in Transcription
  misc_feature: MA Experiment 20001757 PARAMETER Experiment Name: At_50mM_NH4NO3_L-to-H_P Parameter: Timepoint (hr) Value: 6
  misc_feature: MA Experiment 20001757 PARAMETER Experiment Name: At_50mM_NH4NO3_L-to-H_P Parameter: Tissue Value: Leaf
  misc_feature: MA Experiment 20001757 PARAMETER Experiment Name: At_50mM_NH4NO3_L-to-H_P Parameter: Treatment Value: 50mM NH4NO3 vs 100mM Mannitol
  misc_feature: MA Experiment ID: 20001904 Result: Down-regulated in Transcription
  misc_feature: MA Experiment 20001904 PARAMETER Experiment Name: At_Drought_Reproduction_P Parameter: Age (day) Value: 37
  misc_feature: MA Experiment 20001904 PARAMETER Experiment Name: At_Drought_Reproduction_P Parameter: Organism Value: A. thaliana
  misc_feature: MA Experiment 20001904 PARAMETER Experiment Name: At_Drought_Reproduction_P Parameter: Plant Line Value: WS
  misc_feature: MA Experiment 20001904 PARAMETER Experiment Name: At_Drought_Reproduction_P Parameter: Timepoint (day) Value: 7
  misc_feature: MA Experiment 20001904 PARAMETER Experiment Name: At_Drought_Reproduction_P Parameter: Tissue Value: Rosettes
  misc_feature: MA Experiment 20001904 PARAMETER Experiment Name: At_Drought_Reproduction_P Parameter: Treatment Value: Drought vs. No Drought
  misc_feature: MA Experiment ID: 20001910 Result: Down-regulated in Transcription
  misc_feature: MA Experiment 20001910 PARAMETER Experiment Name: At_Drought_Reproduction_P Parameter: Age (day) Value: 37
  misc_feature: MA Experiment 20001910 PARAMETER Experiment Name: At_Drought_Reproduction_P Parameter: Organism Value: A. thaliana
  misc_feature: MA Experiment 20001910 PARAMETER Experiment Name: At_Drought_Reproduction_P Parameter: Plant Line Value: WS
  misc_feature: MA Experiment 20001910 PARAMETER Experiment Name: At_Drought_Reproduction_P Parameter: Timepoint (day) Value: 7
  misc_feature: MA Experiment 20001910 PARAMETER Experiment Name: At_Drought_Reproduction_P Parameter: Tissue Value: Flowers
  misc_feature: MA Experiment 20001910 PARAMETER Experiment Name: At_Drought_Reproduction_P Parameter: Treatment Value: Drought vs. No Drought
aaatcgaaaggcacagcccaacttttcgcaagtcgctgtaaagtttgatttgcttctttttatatacacacatacttctcctccatacactttcctcttcaatcctcagttttttttctaagccctaataccatctcaaagaagagatcaagatttgaaatcaagaagacaccattactcagatcaacatgcttgccgttcaccgtccttcttccgccgtatcagacggagattccgttcagattccgatgatgatcgcgtcgtttcaaaaacgttttccttctctctcacgcgactccacggccgctcgttttcacacacacgaggttggtcctaatcagtgttgctccgccgttattcaagagatctccgctccaatctccaccgtttggtccgtcgtacgccgctttgataacccacaagcttacaaacactttctcaaaagctgtagcgtcatcggcggagacggcgataacgttggtagcctccgtcaagtccacgtcgtctctggtctccccgccgctagctccaccgagagactcgatatcctcgacgacgaacgccacgtcatcagcttcagcgttgttggtggtgaccaccggctctctaactaccgatccgtaacgacccttcacccttctccgatctccgggaccgtcgttgtcgagtcttacgtcgttgatgttcctccaggcaacacaaaggaagagacttgtgacttcgttgacgttatcgtacgatgcaatcttcaatctcttgcgaaaatagccgagaatactgcggctgagagcaagaagaagatgtctctgtgatgagtctttgtcgttgtcgggtagtttcgttagatccgacgtcgttttctagatttttagccgtcgtgtgatctatgttttttcggcttatgtgtgaaaaaaaagttacattagtgaattaatctctcatgcatatcataatccttcttttaatttttgtattttacatatcccataaagaaccgatttggatagccctattccggctttcaccacccaaagataataatattcaaact

SEQ ID NO: 21952 - protein, 207 aa, Arabidopsis thaliana
  peptide (1)..(207): Ceres Seq. ID no. 12393908
  misc_feature (50)..(188): Pfam Name: Pathogenesis-related protein Bet v I family Pfam Description: Pathogenesis-related protein Bet v I family
  misc_feature (43)..(200): Homolog of NCBI NO: 18411513 NR Description: Expressed protein
  misc_feature (41)..(200): Homolog of NCBI NO: 15238661 NR Description: putative protein; protein id: At5g53160.1
  misc_feature (43)..(200): Homolog of NCBI NO: 25348264 NR Description: hypothetical protein F6F3.16 - Arabidopsis
  misc_feature (43)..(200): Homolog of NCBI NO: 21593547 NR Description: unknown [Arabidopsis thaliana]
  misc_feature (43)..(200): Homolog of NCBI NO: 18378830 NR Description: expressed protein
  misc_feature (40)..(203): Homolog of NCBI NO: 34907924 NR Description: B1088C09.9 [Oryza sativa (japonica
  misc_feature (43)..(198): Homolog of NCBI NO: 25348262 NR Description: hypothetical protein At2g40330 [imported] -
  misc_feature (43)..(198): Homolog of NCBI NO: 18405351 NR Description: expressed protein
  misc_feature (40)..(192): Homolog of NCBI NO: 15239114 NR Description: putative protein
  misc_feature (1)..(207): Homolog of NCBI NO: 18404709 NR Description: expressed protein
MLAVHRPSSAVSDGDSVQIPMMIASFQKRFPSLSRDSTAARFHTHEVGPNQCCSAVIQEISAPISTVWSVVRRFDNPQAYKHFLKSCSVIGGDGDNVGSLRQVHVVSGLPAASSTERLDILDDERHVISFSVVGGDHRLSNYRSVTTLHPSPISGTVVVESYVVDVPPGNTKEETCDFVDVIVRCNLQSLAKIAENTAAESKKKMSL

SEQ ID NO: 21953 - protein, 187 aa, Arabidopsis thaliana
  peptide (1)..(187): Ceres Seq. ID no. 12393909
  misc_feature (30)..(168): Pfam Name: Pathogenesis-related protein Bet v I family Pfam Description: Pathogenesis-related protein Bet v I family
  misc_feature (23)..(180): Homolog of NCBI NO: 18411513 NR Description: Expressed protein
  misc_feature (21)..(180): Homolog of NCBI NO: 15238661 NR Description: putative protein; protein id: At5g53160.1
  misc_feature (23)..(180): Homolog of NCBI NO: 21593547 NR Description: unknown [Arabidopsis thaliana]
  misc_feature (23)..(180): Homolog of NCBI NO: 25348264 NR Description: hypothetical protein F6F3.16 - Arabidopsis
  misc_feature (23)..(180): Homolog of NCBI NO: 18378830 NR Description: expressed protein
  misc_feature (20)..(183): Homolog of NCBI NO: 34907924 NR Description: B1088C09.9 [Oryza sativa (japonica
  misc_feature (23)..(178): Homolog of NCBI NO: 25348262 NR Description: hypothetical protein At2g40330 [imported] -
  misc_feature (23)..(178): Homolog of NCBI NO: 18405351 NR Description: expressed protein
  misc_feature (20)..(172): Homolog of NCBI NO: 15239114 NR Description: putative protein
  misc_feature (1)..(187): Homolog of NCBI NO: 18404709 NR Description: expressed protein
MMIASFQKRFPSLSRDSTAARFHTHEVGPNQCCSAVIQEISAPISTVWSVVRRFDNPQAYKHFLKSCSVIGGDGDNVGSLRQVHVVSGLPAASSTERLDILDDERHVISFSVVGGDHRLSNYRSVTTLHPSPISGTVVVESYVVDVPPGNTKEETCDFVDVIVRCNLQSLAKIAENTAAESKKKMSL

SEQ ID NO: 21954 - protein, 186 aa, Arabidopsis thaliana
  peptide (1)..(186): Ceres Seq. ID no. 12393910
  misc_feature (29)..(167): Pfam Name: Pathogenesis-related protein Bet v I family Pfam Description: Pathogenesis-related protein Bet v I family
  misc_feature (22)..(179): Homolog of NCBI NO: 18411513 NR Description: Expressed protein
  misc_feature (20)..(179): Homolog of NCBI NO: 15238661 NR Description: putative protein; protein id: At5g53160.1
  misc_feature (22)..(179): Homolog of NCBI NO: 21593547 NR Description: unknown [Arabidopsis thaliana]
  misc_feature (22)..(179): Homolog of NCBI NO: 25348264 NR Description: hypothetical protein F6F3.16 - Arabidopsis
  misc_feature (22)..(179): Homolog of NCBI NO: 18378830 NR Description: expressed protein
  misc_feature (19)..(182): Homolog of NCBI NO: 34907924 NR Description: B1088C09.9 [Oryza sativa (japonica
  misc_feature (22)..(177): Homolog of NCBI NO: 25348262 NR Description: hypothetical protein At2g40330 [imported] -
  misc_feature (22)..(177): Homolog of NCBI NO: 18405351 NR Description: expressed protein
  misc_feature (19)..(171): Homolog of NCBI NO: 15239114 NR Description: putative protein
  misc_feature (1)..(186): Homolog of NCBI NO: 18404709 NR Description: expressed protein
MIASFQKRFPSLSRDSTAARFHTHEVGPNQCCSAVIQEISAPISTVWSVVRRFDNPQAYKHFLKSCSVIGGDGDNVGSLRQVHVVSGLPAASSTERLDILDDERHVISFSVVGGDHRLSNYRSVTTLHPSPISGTVVVESYVVDVPPGNTKEETCDFVDVIVRCNLQSLAKIAENTAAESKKKMSL

SEQ ID NO: 21955 - DNA, 656 bp, Arabidopsis thaliana
  misc_feature (1)..(656): Ceres Seq. ID no. 12355540
  misc_feature: MA Experiment ID: 108461 Result: Up-regulated in Transcription
  misc_feature: MA Experiment 108461 PARAMETER Experiment Name: At_Germinating_Seeds_cDNA_P Parameter: Age (day) Value: 1 vs. 0
  misc_feature: MA Experiment 108461 PARAMETER Experiment Name: At_Germinating_Seeds_cDNA_P Parameter: Tissue Value: Germinating Seeds
  misc_feature: MA Experiment ID: 108462 Result: Up-regulated in Transcription
  misc_feature: MA Experiment 108462 PARAMETER Experiment Name: At_Germinating_Seeds_cDNA_P Parameter: Age (day) Value: 2 vs. 0
  misc_feature: MA Experiment 108462 PARAMETER Experiment Name: At_Germinating_Seeds_cDNA_P Parameter: Tissue Value: Germinating Seeds
  misc_feature: MA Experiment ID: 108463 Result: Up-regulated in Transcription
  misc_feature: MA Experiment 108463 PARAMETER Experiment Name: At_Germinating_Seeds_cDNA_P Parameter: Age (day) Value: 3 vs. 0
  misc_feature: MA Experiment 108463 PARAMETER Experiment Name: At_Germinating_Seeds_cDNA_P Parameter: Tissue Value: Germinating Seeds
  misc_feature: MA Experiment ID: 108464 Result: Up-regulated in Transcription
  misc_feature: MA Experiment 108464 PARAMETER Experiment Name: At_Germinating_Seeds_cDNA_P Parameter: Age (day) Value: 4 vs. 0
  misc_feature: MA Experiment 108464 PARAMETER Experiment Name: At_Germinating_Seeds_cDNA_P Parameter: Tissue Value: Germinating Seeds
  misc_feature: MA Experiment ID: 108572 Result: Up-regulated in Transcription
  misc_feature: MA Experiment 108572 PARAMETER Experiment Name: At_Drought_cDNA_P Parameter: Timepoint (hr) Value: 1
  misc_feature: MA Experiment 108572 PARAMETER Experiment Name: At_Drought_cDNA_P Parameter: Tissue Value: Aerial
  misc_feature: MA Experiment 108572 PARAMETER Experiment Name: At_Drought_cDNA_P Parameter: Treatment Value: Drought vs. No Drought
  misc_feature: MA Experiment ID: 108595 Result: Down-regulated in Transcription
  misc_feature: MA Experiment 108595 PARAMETER Experiment Name: At_Ler-pi_Ovule_cDNA_P Parameter: Plant Line Value: null
  misc_feature: MA Experiment ID: 20000224 Result: Up-regulated in Transcription
atccttgtaagacgaatcttctcaagctactcgttcgactttagcactcgtatagtctcaacgcttcacgcaacaatcgctgtcactttagcaactctctcgattcaagattggtcttgtcctgtttgtcccattgcttctacatcgtctctccggcagatggaaacgttggctttttcattgtcttacatgatctacgatctcatttgtagccactttgatcaagtccttagcattgataatgcggttcatcattctgtttgcattcttggttttgtagctggacttttctaccaaaagtgtggatccgagatggtggcagcaatatggataacagagatctcaagtccgtttcttcacctcagggagattcttaaagagattggttatagagacaccgacctaaatcttgcagccgatgtgtgttttgcaacaattttctcgttggccagaatggtgggtggaccttacctagtttacgtaacaatatcagccgataatcccattctcatcaaggtatatcctaatatatgaatatcagaaattcagaatatgacatacatttcgttttggtctatatttattatcgtttcatcaattgttcaaagtttttataaagatgtgaaactttcaagattgaaaagaatattttattt

SEQ ID NO: 21956 - protein, 177 aa, Arabidopsis thaliana
  peptide (1)..(177): Ceres Seq. ID no. 12355541
  misc_feature (1)..(141): Homolog of NCBI NO: 25518603 NR Description: hypothetical protein T32G9.28 - Arabidopsis
  misc_feature (1)..(172): Homolog of NCBI NO: 30693154 NR Description: expressed protein [Arabidopsis thaliana]
  misc_feature (1)..(177): Homolog of NCBI NO: 15219511 NR Description: hypothetical protein; protein id: At1g35170.1
  misc_feature (11)..(168): Homolog of NCBI NO: 27661880 NR Description: hypothetical protein XP_236191 [Rattus norvegicus]
  misc_feature (11)..(168): Homolog of NCBI NO: 34535216 NR Description: unnamed protein product [Homo sapiens]
  misc_feature (98)..(141): Homolog of NCBI NO: 25405881 NR Description: protein F27F5.9 [imported] - Arabidopsis thaliana
  misc_feature (1)..(53): Homolog of NCBI NO: 25405881 NR Description: protein F27F5.9 [imported] - Arabidopsis thaliana
  misc_feature (1)..(172): Homolog of NCBI NO: 34903030 NR Description: unnamed protein product [Oryza sativa (japonica
  misc_feature (1)..(177): Homolog of NCBI NO: 22330031 NR Description: hypothetical protein
ILVRRIFSSYSFDFSTRIVSTLHATIAVTLATLSIQDWSCPVCPIASTSSLRQMETLAFSLSYMIYDLICSHFDQVLSIDNAVHHSVCILGFVAGLFYQKCGSEMVAAIWITEISSPFLHLREILKEIGYRDTDLNLAADVCFATIFSLARMVGGPYLVYVTISADNPILIKVYPNI

SEQ ID NO: 21957 - protein, 124 aa, Arabidopsis thaliana
  peptide (1)..(124): Ceres Seq. ID no. 12355542
  misc_feature (1)..(115): Homolog of NCBI NO: 27661880 NR Description: hypothetical protein XP_236191 [Rattus norvegicus]
  misc_feature (1)..(115): Homolog of NCBI NO: 34535216 NR Description: unnamed protein product [Homo sapiens]
  misc_feature (45)..(88): Homolog of NCBI NO: 25405881 NR Description: protein F27F5.9 [imported] - Arabidopsis thaliana
  misc_feature (1)..(119): Homolog of NCBI NO: 34903030 NR Description: unnamed protein product [Oryza sativa (japonica
  misc_feature (1)..(124): Homolog of NCBI NO: 22330031 NR Description: hypothetical protein
  misc_feature (1)..(88): Homolog of NCBI NO: 25518603 NR Description: hypothetical protein T32G9.28 - Arabidopsis
  misc_feature (1)..(119): Homolog of NCBI NO: 30693154 NR Description: expressed protein [Arabidopsis thaliana]
  misc_feature (1)..(124): Homolog of NCBI NO: 15219511 NR Description: hypothetical protein; protein id: At1g35170.1
METLAFSLSYMIYDLICSHFDQVLSIDNAVHHSVCILGFVAGLFYQKCGSEMVAAIWITEISSPFLHLREILKEIGYRDTDLNLAADVCFATIFSLARMVGGPYLVYVTISADNPILIKVYPNI

SEQ ID NO: 21958 - protein, 114 aa, Arabidopsis thaliana
  peptide (1)..(114): Ceres Seq. ID no. 12355543
  misc_feature (1)..(105): Homolog of NCBI NO: 27661880 NR Description: hypothetical protein XP_236191 [Rattus norvegicus]
  misc_feature (1)..(105): Homolog of NCBI NO: 34535216 NR Description: unnamed protein product [Homo sapiens]
  misc_feature (35)..(78): Homolog of NCBI NO: 25405881 NR Description: protein F27F5.9 [imported] - Arabidopsis thaliana
  misc_feature (1)..(109): Homolog of NCBI NO: 34903030 NR Description: unnamed protein product [Oryza sativa (japonica
  misc_feature (1)..(114): Homolog of NCBI NO: 22330031 NR Description: hypothetical protein
  misc_feature (1)..(78): Homolog of NCBI NO: 25518603 NR Description: hypothetical protein T32G9.28 - Arabidopsis
  misc_feature (1)..(109): Homolog of NCBI NO: 30693154 NR Description: expressed protein [Arabidopsis thaliana]
  misc_feature (1)..(114): Homolog of NCBI NO: 15219511 NR Description: hypothetical protein; protein id: At1g35170.1
MIYDLICSHFDQVLSIDNAVHHSVCILGFVAGLFYQKCGSEMVAAIWITEISSPFLHLREILKEIGYRDTDLNLAADVCFATIFSLARMVGGPYLVYVTISADNPILIKVYPNI

SEQ ID NO: 21959 - DNA, 1272 bp, Arabidopsis thaliana
  misc_feature (1)..(1272): Ceres Seq. ID no. 12333884
  misc_feature: MA Experiment ID: 108434 Result: Down-regulated in Transcription
  misc_feature: MA Experiment 108434 PARAMETER Experiment Name: At_Root_Tips_cDNA_P Parameter: Tissue Value: Root Tips
  misc_feature: MA Experiment ID: 108574 Result: Up-regulated in Transcription
  misc_feature: MA Experiment 108574 PARAMETER Experiment Name: At_Wounding__cDNA_P Parameter: Timepoint (hr) Value: 1
  misc_feature: MA Experiment 108574 PARAMETER Experiment Name: At_Wounding__cDNA_P Parameter: Tissue Value: Aerial
  misc_feature: MA Experiment 108574 PARAMETER Experiment Name: At_Wounding__cDNA_P Parameter: Treatment Value: Wounding vs. No Wounding
  misc_feature: MA Experiment ID: 108595 Result: Up-regulated in Transcription
  misc_feature: MA Experiment 108595 PARAMETER Experiment Name: At_Ler-pi_Ovule_cDNA_P Parameter: Plant Line Value: null
  misc_feature: MA Experiment ID: 108605 Result: Up-regulated in Transcription
  misc_feature: MA Experiment 108605 PARAMETER Experiment Name: At_100uM_ABA_cDNA_P Parameter: Timepoint (hr) Value: 6
  misc_feature: MA Experiment 108605 PARAMETER Experiment Name: At_100uM_ABA_cDNA_P Parameter: Tissue Value: Aerial
  misc_feature: MA Experiment 108605 PARAMETER Experiment Name: At_100uM_ABA_cDNA_P Parameter: Treatment Value: 100uM ABA vs. No Treatment
  misc_feature: MA Experiment ID: 108607 Result: Up-regulated in Transcription
  misc_feature: MA Experiment 108607 PARAMETER Experiment Name: At_100uM_ABA_cDNA_P Parameter: Timepoint (hr) Value: 4
  misc_feature: MA Experiment 108607 PARAMETER Experiment Name: At_100uM_ABA_cDNA_P Parameter: Tissue Value: Aerial
  misc_feature: MA Experiment 108607 PARAMETER Experiment Name: At_100uM_ABA_cDNA_P Parameter: Treatment Value: 100uM ABA vs. No Treatment
  misc_feature: MA Experiment ID: 108609 Result: Up-regulated in Transcription
  misc_feature: MA Experiment 108609 PARAMETER Experiment Name: At_100uM_ABA_cDNA_P Parameter: Timepoint (hr) Value: 24
  misc_feature: MA Experiment 108609 PARAMETER Experiment Name: At_100uM_ABA_cDNA_P Parameter: Tissue Value: Aerial
  misc_feature: MA Experiment 108609 PARAMETER Experiment Name: At_100uM_ABA_cDNA_P Parameter: Treatment Value: 100uM ABA vs. No Treatment
  misc_feature: MA Experiment ID: 108668 Result: Up-regulated in Transcription
  misc_feature: MA Experiment 108668 PARAMETER Experiment Name: At_2mM_SA_cDNA_P Parameter: Plant Line Value: WS
  misc_feature: MA Experiment 108668 PARAMETER Experiment Name: At_2mM_SA_cDNA_P Parameter: Timepoint (hr) Value: 6
  misc_feature: MA Experiment 108668 PARAMETER Experiment Name: At_2mM_SA_cDNA_P Parameter: Treatment Value: 2mM SA vs. No Treatment
  misc_feature: MA Experiment ID: 20000070 Result: Up-regulated in Transcription
  misc_feature: MA Experiment 20000070 PARAMETER Experiment Name: At_100uM_ABA_Mutants_cDNA_P Parameter: Plant Line Value: CS24
  misc_feature: MA Experiment 20000070 PARAMETER Experiment Name: At_100uM_ABA_Mutants_cDNA_P Parameter: Timepoint (hr) Value: 6
  misc_feature: MA Experiment 20000070 PARAMETER Experiment Name: At_100uM_ABA_Mutants_cDNA_P Parameter: Tissue Value: Aerial
  misc_feature: MA Experiment 20000070 PARAMETER Experiment Name: At_100uM_ABA_Mutants_cDNA_P Parameter: Treatment Value: 100uM ABA vs. No Treatment
  misc_feature: MA Experiment ID: 20000307 Result: Down-regulated in Transcription
  misc_feature: MA Experiment 20000307 PARAMETER Experiment Name: At_Germinating_Seeds_Sub_P Parameter: Age (hr) Value: 24 vs. 0
  misc_feature: MA Experiment 20000307 PARAMETER Experiment Name: At_Germinating_Seeds_Sub_P Parameter: Organism Value: A. thaliana
  misc_feature: MA Experiment 20000307 PARAMETER Experiment Name: At_Germinating_Seeds_Sub_P Parameter: Plant Line Value: WS
  misc_feature: MA Experiment 20000307 PARAMETER Experiment Name: At_Germinating_Seeds_Sub_P Parameter: Tissue Value: Germinating Seeds
  misc_feature: MA Experiment ID: 20000314 Result: Up-regulated in Transcription
  misc_feature: MA Experiment 20000314 PARAMETER Experiment Name: At_14day_Shoots-Roots_Sub_P Parameter: Age (day) Value: 14
  misc_feature: MA Experiment 20000314 PARAMETER Experiment Name: At_14day_Shoots-Roots_Sub_P Parameter: Organism Value: A. thaliana
  misc_feature: MA Experiment 20000314 PARAMETER Experiment Name: At_14day_Shoots-Roots_Sub_P Parameter: Plant Line Value: WS
  misc_feature: MA Experiment 20000314 PARAMETER Experiment Name: At_14day_Shoots-Roots_Sub_P Parameter: Tissue Value: Roots vs. Whole Plant
  misc_feature: MA Experiment ID: 20000346 Result: Up-regulated in Transcription
  misc_feature: MA Experiment 20000346 PARAMETER Experiment Name: At_2mM_SA_Sub_P Parameter: Age (day) Value: 14
  misc_feature: MA Experiment 20000346 PARAMETER Experiment Name: At_2mM_SA_Sub_P Parameter: Organism Value: A. thaliana
  misc_feature: MA Experiment 20000346 PARAMETER Experiment Name: At_2mM_SA_Sub_P Parameter: Plant Line Value: WS
  misc_feature: MA Experiment 20000346 PARAMETER Experiment Name: At_2mM_SA_Sub_P Parameter: Timepoint (hr) Value: 1
  misc_feature: MA Experiment 20000346 PARAMETER Experiment Name: At_2mM_SA_Sub_P Parameter: Tissue Value: Aerial
  misc_feature: MA Experiment 20000346 PARAMETER Experiment Name: At_2mM_SA_Sub_P Parameter: Treatment Value: 2mM SA vs. No Treatment
  misc_feature: MA Experiment ID: 20000347 Result: Up-regulated in Transcription
  misc_feature: MA Experiment 20000347 PARAMETER Experiment Name: At_2mM_SA_Sub_P Parameter: Age (day) Value: 14
  misc_feature: MA Experiment 20000347 PARAMETER Experiment Name: At_2mM_SA_Sub_P Parameter: Organism Value: A. thaliana
  misc_feature: MA Experiment 20000347 PARAMETER Experiment Name: At_2mM_SA_Sub_P Parameter: Plant Line Value: WS
  misc_feature: MA Experiment 20000347 PARAMETER Experiment Name: At_2mM_SA_Sub_P Parameter: Timepoint (hr) Value: 6
  misc_feature: MA Experiment 20000347 PARAMETER Experiment Name: At_2mM_SA_Sub_P Parameter: Tissue Value: Aerial
  misc_feature: MA Experiment 20000347 PARAMETER Experiment Name: At_2mM_SA_Sub_P Parameter: Treatment Value: 2mM SA vs. No Treatment
  misc_feature: MA Experiment ID: 20000348 Result: Up-regulated in Transcription
  misc_feature: MA Experiment 20000348 PARAMETER Experiment Name: At_100uM_ABA_Sub_P Parameter: Age (day) Value: 14
  misc_feature: MA Experiment 20000348 PARAMETER Experiment Name: At_100uM_ABA_Sub_P Parameter: Organism Value: A. thaliana
  misc_feature: MA Experiment 20000348 PARAMETER Experiment Name: At_100uM_ABA_Sub_P Parameter: Plant Line Value: WS
  misc_feature: MA Experiment 20000348 PARAMETER Experiment Name: At_100uM_ABA_Sub_P Parameter: Timepoint (hr) Value: 1
  misc_feature: MA Experiment 20000348 PARAMETER Experiment Name: At_100uM_ABA_Sub_P Parameter: Tissue Value: Aerial
  misc_feature: MA Experiment 20000348 PARAMETER Experiment Name: At_100uM_ABA_Sub_P Parameter: Treatment Value: 100uM ABA vs. No Treatment
  misc_feature: MA Experiment ID: 20000349 Result: Up-regulated in Transcription
  misc_feature: MA Experiment 20000349 PARAMETER Experiment Name: At_100uM_ABA_Sub_P Parameter: Age (day) Value: 14
  misc_feature: MA Experiment 20000349 PARAMETER Experiment Name: At_100uM_ABA_Sub_P Parameter: Organism Value: A. thaliana
  misc_feature: MA Experiment 20000349 PARAMETER Experiment Name: At_100uM_ABA_Sub_P Parameter: Plant Line Value: WS
  misc_feature: MA Experiment 20000349 PARAMETER Experiment Name: At_100uM_ABA_Sub_P Parameter: Timepoint (hr) Value: 6
  misc_feature: MA Experiment 20000349 PARAMETER Experiment Name: At_100uM_ABA_Sub_P Parameter: Tissue Value: Aerial
  misc_feature: MA Experiment 20000349 PARAMETER Experiment Name: At_100uM_ABA_Sub_P Parameter: Treatment Value: 100uM ABA vs. No Treatment
  misc_feature: MA Experiment ID: 20000352 Result: Up-regulated in Transcription
  misc_feature: MA Experiment 20000352 PARAMETER Experiment Name: At_Drought_Sub_P Parameter: Age (day) Value: 7
  misc_feature: MA Experiment 20000352 PARAMETER Experiment Name: At_Drought_Sub_P Parameter: Organism Value: A. thaliana
  misc_feature: MA Experiment 20000352 PARAMETER Experiment Name: At_Drought_Sub_P Parameter: Plant Line Value: WS
  misc_feature: MA Experiment 20000352 PARAMETER Experiment Name: At_Drought_Sub_P Parameter: Timepoint (hr) Value: 6
  misc_feature: MA Experiment 20000352 PARAMETER Experiment Name: At_Drought_Sub_P Parameter: Tissue Value: Whole Plant
  misc_feature: MA Experiment 20000352 PARAMETER Experiment Name: At_Drought_Sub_P Parameter: Treatment Value: Drought vs. No Drought
  misc_feature: MA Experiment ID: 20000355 Result: Down-regulated in Transcription
  misc_feature: MA Experiment 20000355 PARAMETER Experiment Name: At_Siliques_Sub_P Parameter: Age (day) Value: 21
  misc_feature: MA Experiment 20000355 PARAMETER Experiment Name: At_Siliques_Sub_P Parameter: Organism Value: A. thaliana
  misc_feature: MA Experiment 20000355 PARAMETER Experiment Name: At_Siliques_Sub_P Parameter: Plant Line Value: WS
  misc_feature: MA Experiment 20000355 PARAMETER Experiment Name: At_Siliques_Sub_P Parameter: Tissue Value: Less Than 5mm Siliques vs. Whole Plant
actactctcttaagccctttcataaccttgtaaaccattaagaggctttgctcaattacaagaagaagaaaaaatgcctgtcgacgggaaactcgtctgcgtcaccggagccggcggctacattgcttcttggatcgttaagttactcttagagagaggctacaccgttagaggaaccgtaaggaacccaactgatcccaagaacaaccatctcagagagcttcaaggagccaaggaaagactcactcttcacagtgcagatcttctcgactacgaagctctctgtgccgcaatcgacggttgcgatggcgttttccacactgcctctccgatgaccgacgatcccgagacaatgttggagccggcggtgaacggagccaagttcgtgattgacgcagcggctaaagccaaggtcaagcgcgtggttttcacgtcatcaattggtgcagtttacatgaaccctaaccgtgacactcaagccattgttgacgaaaactgctggagtgatcttgatttctgcaaaaacactaagaattggtattgctacgggaagatgttggcggaacaatcggcgtgggagacggccaaagcaaaaggtgtggacttagtggtgctaaatccggttttggttctcggaccaccgctccagtcagcgatcaacgctagtctagtccatattctcaagtacctcaccggctcagccaagacctacgctaacttgactcaggtctacgtggacgtccgtgacgtggcactaggccatgttctggtctacgaagcaccctccgcctcaggccgttacatcctcgccgagaccgcacttcaccgcggagaggttgttgagattctggccaaattcttcccggagtatccacttcccaccaagtgttcggacgagaagaatccgagggctaagccatacaagtttactacccaaaagataaaagacttaggcttggaatttaaacccatcaagcaatctctttacgaatatgtcaagagcttgcaagagaaaggtcatcttcctctacctcaagattcgaaccaaaacgaagtcatcatcgaaccttaggacacgatccacgaccctagaatctcttcatacctacatgaaaagctttattcttaagtaatacatacgttttggttttgactaaagtattgttaaatcttaaatcattatatatagctgattgttctttctttctttggttgtaattgagaatatgttacgcatatgtattatacgataatggaagcaatggttttatc

SEQ ID NO: 21960 - protein, 332 aa, Arabidopsis thaliana
  peptide (1)..(332): Ceres Seq. ID no. 12333885
  misc_feature (10)..(189): Pfam Name: NAD dependent epimerase/dehydratase family Pfam Description: NAD dependent epimerase/dehydratase family
  misc_feature (1)..(320): Homolog of NCBI NO: 7431407 NR Description: cinnamoyl-CoA reductase (EC 1.2.1.44) CCR - cider
  misc_feature (1)..(325): Homolog of NCBI NO: 25140434 NR Description: cinnamoyl CoA reductase [Solanum tuberosum]
  misc_feature (1)..(331): Homolog of NCBI NO: 7239228 NR Description: cinnamoyl CoA reductase; CCR [Populus tremuloides]
  misc_feature (1)..(331): Homolog of NCBI NO: 2960364 NR Description: cinnamoyl CoA reductase [Populus balsamifera
  misc_feature (1)..(331): Homolog of NCBI NO: 9998901 NR Description: cinnamoyl-CoA reductase [Populus balsamifera
  misc_feature (1)..(328): Homolog of NCBI NO: 12034897 NR Description: cinnamoyl CoA reductase isoform 1 [Arabidopsis
  misc_feature (1)..(328): Homolog of NCBI NO: 15218377 NR Description: cinnamoyl CoA reductase, puitative
  misc_feature (1)..(331): Homolog of NCBI NO: 12407990 NR Description: cinnamoyl CoA reductase CCR2 [Arabidopsis
  misc_feature (1)..(331): Homolog of NCBI NO: 15220833 NR Description: cinnamoyl CoA reductase, putative
  misc_feature (1)..(332): Homolog of NCBI NO: 21592757 NR Description: cinnamoyl CoA reductase, putative [Arabidopsis
MPVDGKLVCVTGAGGYIASWIVKLLLERGYTVRGTVRNPTDPKNNHLRELQGAKERLTLHSADLLDYEALCAAIDGCDGVFHTASPMTDDPETMLEPAVNGAKFVIDAAAKAKVKRVVFTSSIGAVYMNPNRDTQAIVDENCWSDLDFCKNTKNWYCYGKMLAEQSAWETAKAKGVDLVVLNPVLVLGPPLQSAINASLVHILKYLTGSAKTYANLTQVYVDVRDVALGHVLVYEAPSASGRYILAETALHRGEVVEILAKFFPEYPLPTKCSDEKNPRAKPYKFTTQKIKDLGLEFKPIKQSLYEYVKSLQEKGHLPLPQDSNQNEVIIEP

SEQ ID NO: 21961 - protein, 246 aa, Arabidopsis thaliana
  peptide (1)..(246): Ceres Seq. ID no. 12333886
  misc_feature (1)..(103): Pfam Name: NAD dependent epimerase/dehydratase family Pfam Description: NAD dependent epimerase/dehydratase family
  misc_feature (1)..(234): Homolog of NCBI NO: 7431407 NR Description: cinnamoyl-CoA reductase (EC 1.2.1.44) CCR - cider
  misc_feature (1)..(239): Homolog of NCBI NO: 25140434 NR Description: cinnamoyl CoA reductase [Solanum tuberosum]
  misc_feature (1)..(245): Homolog of NCBI NO: 7239228 NR Description: cinnamoyl CoA reductase; CCR [Populus tremuloides]
  misc_feature (1)..(245): Homolog of NCBI NO: 2960364 NR Description: cinnamoyl CoA reductase [Populus balsamifera
  misc_feature (1)..(245): Homolog of NCBI NO: 9998901 NR Description: cinnamoyl-CoA reductase [Populus balsamifera
  misc_feature (1)..(242): Homolog of NCBI NO: 12034897 NR Description: cinnamoyl CoA reductase isoform 1 [Arabidopsis
  misc_feature (1)..(242): Homolog of NCBI NO: 15218377 NR Description: cinnamoyl CoA reductase, puitative
  misc_feature (1)..(245): Homolog of NCBI NO: 12407990 NR Description: cinnamoyl CoA reductase CCR2 [Arabidopsis
  misc_feature (1)..(245): Homolog of NCBI NO: 15220833 NR Description: cinnamoyl CoA reductase, putative
  misc_feature (1)..(246): Homolog of NCBI NO: 21592757 NR Description: cinnamoyl CoA reductase, putative [Arabidopsis
MTDDPETMLEPAVNGAKFVIDAAAKAKVKRVVFTSSIGAVYMNPNRDTQAIVDENCWSDLDFCKNTKNWYCYGKMLAEQSAWETAKAKGVDLVVLNPVLVLGPPLQSAINASLVHILKYLTGSAKTYANLTQVYVDVRDVALGHVLVYEAPSASGRYILAETALHRGEVVEILAKFFPEYPLPTKCSDEKNPRAKPYKFTTQKIKDLGLEFKPIKQSLYEYVKSLQEKGHLPLPQDSNQNEVIIEP

SEQ ID NO: 21962 - protein, 239 aa, Arabidopsis thaliana
  peptide (1)..(239): Ceres Seq. ID no. 12333887
  misc_feature (1)..(96): Pfam Name: NAD dependent epimerase/dehydratase family Pfam Description: NAD dependent epimerase/dehydratase family
  misc_feature (1)..(227): Homolog of NCBI NO: 7431407 NR Description: cinnamoyl-CoA reductase (EC 1.2.1.44) CCR - cider
  misc_feature (1)..(232): Homolog of NCBI NO: 25140434 NR Description: cinnamoyl CoA reductase [Solanum tuberosum]
  misc_feature (1)..(238): Homolog of NCBI NO: 7239228 NR Description: cinnamoyl CoA reductase; CCR [Populus tremuloides]
  misc_feature (1)..(238): Homolog of NCBI NO: 2960364 NR Description: cinnamoyl CoA reductase [Populus balsamifera
  misc_feature (1)..(238): Homolog of NCBI NO: 9998901 NR Description: cinnamoyl-CoA reductase [Populus balsamifera
  misc_feature (1)..(235): Homolog of NCBI NO: 12034897 NR Description: cinnamoyl CoA reductase isoform 1 [Arabidopsis
  misc_feature (1)..(235): Homolog of NCBI NO: 15218377 NR Description: cinnamoyl CoA reductase, puitative
  misc_feature (1)..(238): Homolog of NCBI NO: 12407990 NR Description: cinnamoyl CoA reductase CCR2 [Arabidopsis
  misc_feature (1)..(238): Homolog of NCBI NO: 15220833 NR Description: cinnamoyl CoA reductase, putative
  misc_feature (1)..(239): Homolog of NCBI NO: 21592757 NR Description: cinnamoyl CoA reductase, putative [Arabidopsis
MLEPAVNGAKFVIDAAAKAKVKRVVFTSSIGAVYMNPNRDTQAIVDENCWSDLDFCKNTKNWYCYGKMLAEQSAWETAKAKGVDLVVLNPVLVLGPPLQSAINASLVHILKYLTGSAKTYANLTQVYVDVRDVALGHVLVYEAPSASGRYILAETALHRGEVVEILAKFFPEYPLPTKCSDEKNPRAKPYKFTTQKIKDLGLEFKPIKQSLYEYVKSLQEKGHLPLPQDSNQNEVIIEP

SEQ ID NO: 21963 - DNA, 1127 bp, Arabidopsis thaliana
  misc_feature (1)..(1127): Ceres Seq. ID no. 12385171
  misc_feature: MA Experiment ID: 108434 Result: Down-regulated in Transcription
  misc_feature: MA Experiment 108434 PARAMETER Experiment Name: At_Root_Tips_cDNA_P Parameter: Tissue Value: Root Tips
  misc_feature: MA Experiment ID: 108435 Result: Down-regulated in Transcription
  misc_feature: MA Experiment 108435 PARAMETER Experiment Name: At_stm_Mutants_cDNA_P Parameter: Plant Line Value: wt Landsburg vs stm
  misc_feature: MA Experiment 108435 PARAMETER Experiment Name: At_stm_Mutants_cDNA_P Parameter: Tissue Value: Shoot Apical Meristem Region
  misc_feature: MA Experiment ID: 108461 Result: Up-regulated in Transcription
  misc_feature: MA Experiment 108461 PARAMETER Experiment Name: At_Germinating_Seeds_cDNA_P Parameter: Age (day) Value: 1 vs. 0
  misc_feature: MA Experiment 108461 PARAMETER Experiment Name: At_Germinating_Seeds_cDNA_P Parameter: Tissue Value: Germinating Seeds
  misc_feature: MA Experiment ID: 108462 Result: Up-regulated in Transcription
  misc_feature: MA Experiment 108462 PARAMETER Experiment Name: At_Germinating_Seeds_cDNA_P Parameter: Age (day) Value: 2 vs. 0
  misc_feature: MA Experiment 108462 PARAMETER Experiment Name: At_Germinating_Seeds_cDNA_P Parameter: Tissue Value: Germinating Seeds
  misc_feature: MA Experiment ID: 108463 Result: Up-regulated in Transcription
  misc_feature: MA Experiment 108463 PARAMETER Experiment Name: At_Germinating_Seeds_cDNA_P Parameter: Age (day) Value: 3 vs. 0
  misc_feature: MA Experiment 108463 PARAMETER Experiment Name: At_Germinating_Seeds_cDNA_P Parameter: Tissue Value: Germinating Seeds
  misc_feature: MA Experiment ID: 108464 Result: Up-regulated in Transcription
  misc_feature: MA Experiment 108464 PARAMETER Experiment Name: At_Germinating_Seeds_cDNA_P Parameter: Age (day) Value: 4 vs. 0
  misc_feature: MA Experiment 108464 PARAMETER Experiment Name: At_Germinating_Seeds_cDNA_P Parameter: Tissue Value: Germinating Seeds
  misc_feature: MA Experiment ID: 108488 Result: Up-regulated in Transcription
  misc_feature: MA Experiment ID: 108489 Result: Down-regulated in Transcription
  misc_feature: MA Experiment ID: 108594 Result: Down-regulated in Transcription
  misc_feature: MA Experiment 108594 PARAMETER Experiment Name: At_Ler-rhl_Root_cDNA_P Parameter: Plant Line Value: null
  misc_feature: MA Experiment ID: 20000180 Result: Up-regulated in Transcription
  misc_feature: MA Experiment 20000180 PARAMETER Experiment Name: At_Germinating_Seeds_P Parameter: Age (hr) Value: 24 vs. 0
  misc_feature: MA Experiment 20000180 PARAMETER Experiment Name: At_Germinating_Seeds_P Parameter: Tissue Value: Germinating Seeds
  misc_feature: MA Experiment ID: 20000185 Result: Down-regulated in Transcription
  misc_feature: MA Experiment 20000185 PARAMETER Experiment Name: At_Roots__P Parameter: Age (day) Value: 7 vs. 21
  misc_feature: MA Experiment 20000185 PARAMETER Experiment Name: At_Roots__P Parameter: Organism Value: A. thaliana
  misc_feature: MA Experiment 20000185 PARAMETER Experiment Name: At_Roots__P Parameter: Tissue Value: Roots vs. Whole Plant
  misc_feature: MA Experiment ID: 20000264 Result: Down-regulated in Transcription
  misc_feature: MA Experiment 20000264 PARAMETER Experiment Name: At_Open_Flower_P Parameter: Age (day) Value: 21
  misc_feature: MA Experiment 20000264 PARAMETER Experiment Name: At_Open_Flower_P Parameter: Plant Line Value: WS
  misc_feature: MA Experiment 20000264 PARAMETER Experiment Name: At_Open_Flower_P Parameter: Tissue Value: Open Flower vs. Whole Plant
  misc_feature: MA Experiment ID: 20000265 Result: Down-regulated in Transcription
  misc_feature: MA Experiment 20000265 PARAMETER Experiment Name: At_Open_Flower_P Parameter: Age (day) Value: 21
  misc_feature: MA Experiment 20000265 PARAMETER Experiment Name: At_Open_Flower_P Parameter: Plant Line Value: WS
  misc_feature: MA Experiment 20000265 PARAMETER Experiment Name: At_Open_Flower_P Parameter: Tissue Value: Closed Flower vs. Whole Plant
  misc_feature: MA Experiment ID: 20000269 Result: Down-regulated in Transcription
  misc_feature: MA Experiment 20000269 PARAMETER Experiment Name: At_1mM_KNO3_L-vs-H_Roots_P Parameter: Age (day) Value: 7,10,12
  misc_feature: MA Experiment 20000269 PARAMETER Experiment Name: At_1mM_KNO3_L-vs-H_Roots_P Parameter: Organism Value: A. thaliana
  misc_feature: MA Experiment 20000269 PARAMETER Experiment Name: At_1mM_KNO3_L-vs-H_Roots_P Parameter: Plant Line Value: WS
  misc_feature: MA Experiment 20000269 PARAMETER Experiment Name: At_1mM_KNO3_L-vs-H_Roots_P Parameter: Timepoint (day) Value: 7,10,12
  misc_feature: MA Experiment 20000269 PARAMETER Experiment Name: At_1mM_KNO3_L-vs-H_Roots_P Parameter: Tissue Value: Roots
  misc_feature: MA Experiment 20000269 PARAMETER Experiment Name: At_1mM_KNO3_L-vs-H_Roots_P Parameter: Treatment Value: 1mM KNO3 vs. 50mM KNO3
  misc_feature: MA Experiment ID: 20000286 Result: Down-regulated in Transcription
  misc_feature: MA Experiment 20000286 PARAMETER Experiment Name: At_Open_Flower_P Parameter: Age (day) Value: 21
  misc_feature: MA Experiment 20000286 PARAMETER Experiment Name: At_Open_Flower_P Parameter: Plant Line Value: WS
  misc_feature: MA Experiment 20000286 PARAMETER Experiment Name: At_Open_Flower_P Parameter: Tissue Value: Half Open vs. Whole Plant
  misc_feature: MA Experiment ID: 20000439 Result: Down-regulated in Transcription
  misc_feature: MA Experiment 20000439 PARAMETER Experiment Name: At_Roots__P Parameter: Age (day) Value: 14 vs. 21
  misc_feature: MA Experiment 20000439 PARAMETER Experiment Name: At_Roots__P Parameter: Organism Value: A. thaliana
  misc_feature: MA Experiment 20000439 PARAMETER Experiment Name: At_Roots__P Parameter: Tissue Value: Roots vs. Whole Plant
  misc_feature: MA Experiment ID: 20000441 Result: Up-regulated in Transcription
  misc_feature: MA Experiment 20000441 PARAMETER Experiment Name: At_1uM_BR-BRZ__P Parameter: Tissue Value: Shoot Apices
  misc_feature: MA Experiment 20000441 PARAMETER Experiment Name: At_1uM_BR-BRZ__P Parameter: Treatment Value: 1uM BR vs. No Treatment
  misc_feature: MA Experiment ID: 20000794 Result: Down-regulated in Transcription
  misc_feature: MA Experiment 20000794 PARAMETER Experiment Name: At_Petals_P Parameter: Age (day) Value: 23-25 days
  misc_feature: MA Experiment 20000794 PARAMETER Experiment Name: At_Petals_P Parameter: Plant Line Value: WS
  misc_feature: MA Experiment 20000794 PARAMETER Experiment Name: At_Petals_P Parameter: Tissue Value: Petals vs. Whole plant
  misc_feature: MA Experiment ID: 20001757 Result: Up-regulated in Transcription
  misc_feature: MA Experiment 20001757 PARAMETER Experiment Name: At_50mM_NH4NO3_L-to-H_P Parameter: Timepoint (hr) Value: 6
  misc_feature: MA Experiment 20001757 PARAMETER Experiment Name: At_50mM_NH4NO3_L-to-H_P Parameter: Tissue Value: Leaf
  misc_feature: MA Experiment 20001757 PARAMETER Experiment Name: At_50mM_NH4NO3_L-to-H_P Parameter: Treatment Value: 50mM NH4NO3 vs 100mM Mannitol
aaaaccagttgtgctatttcaaagccacaagtacttggaacctttgtttcttctaccctaacatagcccttgcaaaccataaccaaaccatcatcatcatcatcatctcttggtgacagaagaaaagagttgaggaacagagaaaatggcagcacaagcacttgtgtcttcttcacttacctcctctgttcagacagctagacagatatttggctcaaaaccagttgcgtctgcctcacagaagaagagttcctttgttgttaaagctgctgcaactccacctgtcaagcaaggagccaacagaccattgtggtttgcttcatcgcagagtctctcttacttggatggcagcttacctggtgactatggattcgaccctcttggtctttcagacccagaaggtactggaggattcattgagccaagatggctagcatacggagagatcatcaacggacggttcgccatgttgggtgcagctggagctattgctcctgagattttaggaaaggctggtctgattccagcagagactgctcttccttggttccaaaccggtgtgattccaccagcagggacatacacttactgggcagacaattacacactctttgttctcgagatggctctgatgggattcgctgagcaccggaggttacaggactggtacaacccaggatctatgggaaaacagtacttcttggggttagagaagggtttggccggttcaggtaacccggcttaccccggtggacctttcttcaaccctcttgggtttgggaaagatgagaagtcactgaaggagttgaaactcaaggaggtcaagaacggtagactggctatgctcgccatcctcggttactttatccaaggactagtgaccggtgtgggaccttatcagaacctgcttgatcacttggctgatcccgtcaacaacaacgtcttgaccagcctcaagttccactgaggtgatcatcatctcatgtgtttttatgtctcttgtatcgtacaatatttccatctttcgctaccattggcttcttcgtattgtaacaccctgtgtaaacatattcgtgttttgtaagaaatgacaatgtcaatggccaaacgaaaaaacttttaggact

SEQ ID NO: 21964 - protein, 273 aa, Arabidopsis thaliana
  peptide (1)..(273): Ceres Seq. ID no. 12385172
  misc_feature (61)..(244): Pfam Name: Chlorophyll A-B binding protein Pfam Description: Chlorophyll A-B binding protein
  misc_feature (61)..(244): Pfam Name: Chlorophyll A-B binding protein Pfam Description: Chlorophyll A-B binding protein
  misc_feature (109)..(273): Homolog of NCBI NO: 37780998 NR Description: chlorophyll a/b binding protein [Vitis vinifera]
  misc_feature (11)..(269): Homolog of NCBI NO: 40714511 NR Description: light-harvesting chlorophyll-a/b protein of
  misc_feature (72)..(264): Homolog of NCBI NO: 7271947 NR Description: chlorophyll a/b-binding protein type III [Alonsoa
  misc_feature (1)..(273): Homolog of NCBI NO: 99487 NR Description: chlorophyll a/b-binding protein (clone pINEab 43)
  misc_feature (1)..(273): Homolog of NCBI NO: 7443229 NR Description: probable chlorophyll a/b-binding protein type III
  misc_feature (109)..(273): Homolog of NCBI NO: 37780998 NR Description: chlorophyll a/b binding protein [Vitis vinifera]
  misc_feature (72)..(264): Homolog of NCBI NO: 7271947 NR Description: chlorophyll a/b-binding protein type III [Alonsoa
  misc_feature (1)..(273): Homolog of NCBI NO: 7443229 NR Description: probable chlorophyll a/b-binding protein type III
  misc_feature (1)..(273): Homolog of NCBI NO: 15219941 NR Description: light-harvesting chlorophyll a/b binding protein
  misc_feature (1)..(273): Homolog of NCBI NO: 430947 NR Description: PSI type III chlorophyll a/b-binding protein
  misc_feature (1)..(273): Homolog of NCBI NO: 21554335 NR Description: PSI type III chlorophyll a/b-binding protein,
  misc_feature (1)..(273): Homolog of NCBI NO: 82080 NR Description: chlorophyll a/b-binding protein type III
  misc_feature (1)..(273): Homolog of NCBI NO: 115813 NR Description: Chlorophyll A-B binding protein 8, chloroplast
  misc_feature (1)..(273): Homolog of NCBI NO: 99487 NR Description: chlorophyll a/b-binding protein (clone pINEab 43)
  misc_feature (11)..(269): Homolog of NCBI NO: 40714511 NR Description: light-harvesting chlorophyll-a/b protein of
  misc_feature (1)..(273): Homolog of NCBI NO: 115813 NR Description: Chlorophyll A-B binding protein 8, chloroplast
  misc_feature (1)..(273): Homolog of NCBI NO: 82080 NR Description: chlorophyll a/b-binding protein type III
  misc_feature (1)..(273): Homolog of NCBI NO: 21554335 NR Description: PSI type III chlorophyll a/b-binding protein,
  misc_feature (1)..(273): Homolog of NCBI NO: 430947 NR Description: PSI type III chlorophyll a/b-binding protein
  misc_feature (1)..(273): Homolog of NCBI NO: 15219941 NR Description: light-harvesting chlorophyll a/b binding protein
MAAQALVSSSLTSSVQTARQIFGSKPVASASQKKSSFVVKAAATPPVKQGANRPLWFASSQSLSYLDGSLPGDYGFDPLGLSDPEGTGGFIEPRWLAYGEIINGRFAMLGAAGAIAPEILGKAGLIPAETALPWFQTGVIPPAGTYTYWADNYTLFVLEMALMGFAEHRRLQDWYNPGSMGKQYFLGLEKGLAGSGNPAYPGGPFFNPLGFGKDEKSLKELKLKEVKNGRLAMLAILGYFIQGLVTGVGPYQNLLDHLADPVNNNVLTSLKFH

SEQ ID NO: 21965 - protein, 166 aa, Arabidopsis thaliana
  peptide (1)..(166): Ceres Seq. ID no. 12385173
  misc_feature (1)..(137): Pfam Name: Chlorophyll A-B binding protein Pfam Description: Chlorophyll A-B binding protein
  misc_feature (1)..(137): Pfam Name: Chlorophyll A-B binding protein Pfam Description: Chlorophyll A-B binding protein
  misc_feature (2)..(166): Homolog of NCBI NO: 37780998 NR Description: chlorophyll a/b binding protein [Vitis vinifera]
  misc_feature (1)..(162): Homolog of NCBI NO: 40714511 NR Description: light-harvesting chlorophyll-a/b protein of
  misc_feature (1)..(157): Homolog of NCBI NO: 7271947 NR Description: chlorophyll a/b-binding protein type III [Alonsoa
  misc_feature (1)..(166): Homolog of NCBI NO: 99487 NR Description: chlorophyll a/b-binding protein (clone pINEab 43)
  misc_feature (1)..(166): Homolog of NCBI NO: 7443229 NR Description: probable chlorophyll a/b-binding protein type III
  misc_feature (2)..(166): Homolog of NCBI NO: 37780998 NR Description: chlorophyll a/b binding protein [Vitis vinifera]
  misc_feature (1)..(157): Homolog of NCBI NO: 7271947 NR Description: chlorophyll a/b-binding protein type III [Alonsoa
  misc_feature (1)..(166): Homolog of NCBI NO: 7443229 NR Description: probable chlorophyll a/b-binding protein type III
  misc_feature (1)..(166): Homolog of NCBI NO: 15219941 NR Description: light-harvesting chlorophyll a/b binding protein
  misc_feature (1)..(166): Homolog of NCBI NO: 430947 NR Description: PSI type III chlorophyll a/b-binding protein
  misc_feature (1)..(166): Homolog of NCBI NO: 21554335 NR Description: PSI type III chlorophyll a/b-binding protein,
  misc_feature (1)..(166): Homolog of NCBI NO: 82080 NR Description: chlorophyll a/b-binding protein type III
  misc_feature (1)..(166): Homolog of NCBI NO: 115813 NR Description: Chlorophyll A-B binding protein 8, chloroplast
  misc_feature (1)..(166): Homolog of NCBI NO: 99487 NR Description: chlorophyll a/b-binding protein (clone pINEab 43)
  misc_feature (1)..(162): Homolog of NCBI NO: 40714511 NR Description: light-harvesting chlorophyll-a/b protein of
  misc_feature (1)..(166): Homolog of NCBI NO: 115813 NR Description: Chlorophyll A-B binding protein 8, chloroplast
  misc_feature (1)..(166): Homolog of NCBI NO: 82080 NR Description: chlorophyll a/b-binding protein type III
  misc_feature (1)..(166): Homolog of NCBI NO: 21554335 NR Description: PSI type III chlorophyll a/b-binding protein,
  misc_feature (1)..(166): Homolog of NCBI NO: 430947 NR Description: PSI type III chlorophyll a/b-binding protein
  misc_feature (1)..(166): Homolog of NCBI NO: 15219941 NR Description: light-harvesting chlorophyll a/b binding protein
MLGAAGAIAPEILGKAGLIPAETALPWFQTGVIPPAGTYTYWADNYTLFVLEMALMGFAEHRRLQDWYNPGSMGKQYFLGLEKGLAGSGNPAYPGGPFFNPLGFGKDEKSLKELKLKEVKNGRLAMLAILGYFIQGLVTGVGPYQNLLDHLADPVNNNVLTSLKFH

SEQ ID NO: 21966 - DNA, 776 bp, Arabidopsis thaliana
  misc_feature (1)..(776): Ceres Seq. ID no. 12331908
  misc_feature: MA Experiment ID: 108488 Result: Down-regulated in Transcription
gagatacggaagaatcagatcaacgcatgcgaccaagtaaatcaaaatcgggttgaagaagaaagagataagctttcacatcaatttttgaaggcgcgaaatggggaatacttcatcgatgctgactcagtacgacatcgaagaagttcagagtcattgtcatgatctatttgagcagcaggagattttatctctgtatcaacggttttgccagttagatcgaaacgcaaaaggatttatatctgctgatgagtttctctctgtgcctgagtttgcgatgaatccactctctcagaggctgcttaagatggttgatggtttgaactttaaggattttgttgctttcttgtctgcgtttagtgccaaggctagtctaagacagaaagttcaattgatctttaaagtctatgattcggactgcaacgggaaggtctcttttaaagatatcatggaagtgttgcgtgacttatcgggatcattcatgtctgatgagcaaagagagcaagtactgagccaggttttgaaggaatcgggctacacgagtgactcattcttaactctggaggatttcataaagatctttgggagtagtagaccggagatggacgttgaaattcctgtggattagactttatgatcatatatcatcaaacacaacactcaaatctcatcttgtattttgtccacactgtttctagaataatccttgttaattgatcacatcattgcaggctttttcagcacttgttaagtatttgtcaattgaaacttgttct

SEQ ID NO: 21967 - protein, 175 aa, Arabidopsis thaliana
  peptide (1)..(175): Ceres Seq. ID no. 12331909
  misc_feature (31)..(59): Pfam Name: EF hand Pfam Description: EF hand
  misc_feature (74)..(159): Homolog of NCBI NO: 17566934 NR Description: Calcium binding protein P22 like family member,
  misc_feature (1)..(86): Homolog of NCBI NO: 17566934 NR Description: Calcium binding protein P22 like family member,
  misc_feature (24)..(164): Homolog of NCBI NO: 10179909 NR Description: calcineurin B regulatory subunit [Filobasidiella
  misc_feature (1)..(172): Homolog of NCBI NO: 3929338 NR Description: Calcineurin B subunit (Protein phosphatase 2B
  misc_feature (1)..(160): Homolog of NCBI NO: 2645886 NR Description: calcineurin subunit B [Neurospora crassa]
  misc_feature (1)..(158): Homolog of NCBI NO: 13445166 NR Description: calcineurin B [Dictyostelium discoideum]
  misc_feature (1)..(159): Homolog of NCBI NO: 1168750 NR Description: Calcineurin B subunit (Protein phosphatase 2B
  misc_feature (1)..(175): Homolog of NCBI NO: 16550928 NR Description: calcineurin-like protein [Eucalyptus grandis]
  misc_feature (1)..(175): Homolog of NCBI NO: 21592761 NR Description: calcineurin-like protein [Arabidopsis thaliana]
  misc_feature (1)..(175): Homolog of NCBI NO: 18401887 NR Description: expressed protein
MGNTSSMLTQYDIEEVQSHCHDLFEQQEILSLYQRFCQLDRNAKGFISADEFLSVPEFAMNPLSQRLLKMVDGLNFKDFVAFLSAFSAKASLRQKVQLIFKVYDSDCNGKVSFKDIMEVLRDLSGSFMSDEQREQVLSQVLKESGYTSDSFLTLEDFIKIFGSSRPEMDVEIPVD

SEQ ID NO: 21968 - protein, 169 aa, Arabidopsis thaliana
  peptide (1)..(169): Ceres Seq. ID no. 12331910
  misc_feature (25)..(53): Pfam Name: EF hand Pfam Description: EF hand
  misc_feature (18)..(158): Homolog of NCBI NO: 10179909 NR Description: calcineurin B regulatory subunit [Filobasidiella
  misc_feature (1)..(166): Homolog of NCBI NO: 3929338 NR Description: Calcineurin B subunit (Protein phosphatase 2B
  misc_feature (1)..(154): Homolog of NCBI NO: 2645886 NR Description: calcineurin subunit B [Neurospora crassa]
  misc_feature (1)..(152): Homolog of NCBI NO: 13445166 NR Description: calcineurin B [Dictyostelium discoideum]
  misc_feature (68)..(153): Homolog of NCBI NO: 17566934 NR Description: Calcium binding protein P22 like family member,
  misc_feature (1)..(80): Homolog of NCBI NO: 17566934 NR Description: Calcium binding protein P22 like family member,
  misc_feature (1)..(153): Homolog of NCBI NO: 1168750 NR Description: Calcineurin B subunit (Protein phosphatase 2B
  misc_feature (1)..(169): Homolog of NCBI NO: 16550928 NR Description: calcineurin-like protein [Eucalyptus grandis]
  misc_feature (1)..(169): Homolog of NCBI NO: 21592761 NR Description: calcineurin-like protein [Arabidopsis thaliana]
  misc_feature (1)..(169): Homolog of NCBI NO: 18401887 NR Description: expressed protein
MLTQYDIEEVQSHCHDLFEQQEILSLYQRFCQLDRNAKGFISADEFLSVPEFAMNPLSQRLLKMVDGLNFKDFVAFLSAFSAKASLRQKVQLIFKVYDSDCNGKVSFKDIMEVLRDLSGSFMSDEQREQVLSQVLKESGYTSDSFLTLEDFIKIFGSSRPEMDVEIPVD

SEQ ID NO: 21969 - protein, 116 aa, Arabidopsis thaliana
  peptide (1)..(116): Ceres Seq. ID no. 12331911
  misc_feature (15)..(100): Homolog of NCBI NO: 17566934 NR Description: Calcium binding protein P22 like family member,
  misc_feature (1)..(27): Homolog of NCBI NO: 17566934 NR Description: Calcium binding protein P22 like family member,
  misc_feature (1)..(105): Homolog of NCBI NO: 10179909 NR Description: calcineurin B regulatory subunit [Filobasidiella
  misc_feature (1)..(113): Homolog of NCBI NO: 3929338 NR Description: Calcineurin B subunit (Protein phosphatase 2B
  misc_feature (1)..(101): Homolog of NCBI NO: 2645886 NR Description: calcineurin subunit B [Neurospora crassa]
  misc_feature (1)..(99): Homolog of NCBI NO: 13445166 NR Description: calcineurin B [Dictyostelium discoideum]
  misc_feature (1)..(100): Homolog of NCBI NO: 1168750 NR Description: Calcineurin B subunit (Protein phosphatase 2B
  misc_feature (1)..(116): Homolog of NCBI NO: 16550928 NR Description: calcineurin-like protein [Eucalyptus grandis]
  misc_feature (1)..(116): Homolog of NCBI NO: 21592761 NR Description: calcineurin-like protein [Arabidopsis thaliana]
  misc_feature (1)..(116): Homolog of NCBI NO: 18401887 NR Description: expressed protein
MNPLSQRLLKMVDGLNFKDFVAFLSAFSAKASLRQKVQLIFKVYDSDCNGKVSFKDIMEVLRDLSGSFMSDEQREQVLSQVLKESGYTSDSFLTLEDFIKIFGSSRPEMDVEIPVD

SEQ ID NO: 21970 - DNA, 1005 bp, Arabidopsis thaliana
  misc_feature (1)..(1005): Ceres Seq. ID no. 12331904
  misc_feature: MA Experiment ID: 108461 Result: Up-regulated in Transcription
  misc_feature: MA Experiment 108461 PARAMETER Experiment Name: At_Germinating_Seeds_cDNA_P Parameter: Age (day) Value: 1 vs. 0
  misc_feature: MA Experiment 108461 PARAMETER Experiment Name: At_Germinating_Seeds_cDNA_P Parameter: Tissue Value: Germinating Seeds
  misc_feature: MA Experiment ID: 20000111 Result: Down-regulated in Transcription
  misc_feature: MA Experiment 20000111 PARAMETER Experiment Name: At_42deg_Heat_cDNA_P Parameter: Temperature (deg C) Value: 42 vs. 22
  misc_feature: MA Experiment 20000111 PARAMETER Experiment Name: At_42deg_Heat_cDNA_P Parameter: Timepoint (hr) Value: 6
  misc_feature: MA Experiment 20000111 PARAMETER Experiment Name: At_42deg_Heat_cDNA_P Parameter: Tissue Value: Aerial
  misc_feature: MA Experiment ID: 20000112 Result: Down-regulated in Transcription
  misc_feature: MA Experiment 20000112 PARAMETER Experiment Name: At_42deg_Heat_cDNA_P Parameter: Temperature (deg C) Value: 42 vs. 22
  misc_feature: MA Experiment 20000112 PARAMETER Experiment Name: At_42deg_Heat_cDNA_P Parameter: Timepoint (hr) Value: 2
  misc_feature: MA Experiment 20000112 PARAMETER Experiment Name: At_42deg_Heat_cDNA_P Parameter: Tissue Value: Aerial
  misc_feature: MA Experiment ID: 20000113 Result: Down-regulated in Transcription
  misc_feature: MA Experiment 20000113 PARAMETER Experiment Name: At_42deg_Heat_cDNA_P Parameter: Temperature (deg C) Value: 42 vs. 22
  misc_feature: MA Experiment 20000113 PARAMETER Experiment Name: At_42deg_Heat_cDNA_P Parameter: Timepoint (hr) Value: 8
  misc_feature: MA Experiment 20000113 PARAMETER Experiment Name: At_42deg_Heat_cDNA_P Parameter: Tissue Value: Aerial
  misc_feature: MA Experiment ID: 20000144 Result: Down-regulated in Transcription
  misc_feature: MA Experiment 20000144 PARAMETER Experiment Name: At_42deg_Heat_cDNA_P Parameter: Temperature (deg C) Value: 42 vs. 22
  misc_feature: MA Experiment 20000144 PARAMETER Experiment Name: At_42deg_Heat_cDNA_P Parameter: Timepoint (hr) Value: 1
  misc_feature: MA Experiment 20000144 PARAMETER Experiment Name: At_42deg_Heat_cDNA_P Parameter: Tissue Value: Aerial
  misc_feature: MA Experiment ID: 20000171 Result: Down-regulated in Transcription
  misc_feature: MA Experiment 20000171 PARAMETER Experiment Name: At_42deg_Heat_P Parameter: Age (day) Value: 14
  misc_feature: MA Experiment 20000171 PARAMETER Experiment Name: At_42deg_Heat_P Parameter: Organism Value: A. thaliana
  misc_feature: MA Experiment 20000171 PARAMETER Experiment Name: At_42deg_Heat_P Parameter: Plant Line Value: WS
  misc_feature: MA Experiment 20000171 PARAMETER Experiment Name: At_42deg_Heat_P Parameter: Temperature (deg C) Value: 42 vs. 22
  misc_feature: MA Experiment 20000171 PARAMETER Experiment Name: At_42deg_Heat_P Parameter: Timepoint (hr) Value: 1
  misc_feature: MA Experiment 20000171 PARAMETER Experiment Name: At_42deg_Heat_P Parameter: Tissue Value: Aerial
  misc_feature: MA Experiment ID: 20000173 Result: Down-regulated in Transcription
  misc_feature: MA Experiment 20000173 PARAMETER Experiment Name: At_42deg_Heat_P Parameter: Age (day) Value: 14
  misc_feature: MA Experiment 20000173 PARAMETER Experiment Name: At_42deg_Heat_P Parameter: Organism Value: A. thaliana
  misc_feature: MA Experiment 20000173 PARAMETER Experiment Name: At_42deg_Heat_P Parameter: Plant Line Value: WS
  misc_feature: MA Experiment 20000173 PARAMETER Experiment Name: At_42deg_Heat_P Parameter: Temperature (deg C) Value: 42 vs. 22
  misc_feature: MA Experiment 20000173 PARAMETER Experiment Name: At_42deg_Heat_P Parameter: Timepoint (hr) Value: 6
  misc_feature: MA Experiment 20000173 PARAMETER Experiment Name: At_42deg_Heat_P Parameter: Tissue Value: Aerial
  misc_feature: MA Experiment ID: 20000179 Result: Up-regulated in Transcription
  misc_feature: MA Experiment 20000179 PARAMETER Experiment Name: At_Germinating_Seeds_P Parameter: Age (hr) Value: 6 vs. 0
  misc_feature: MA Experiment 20000179 PARAMETER Experiment Name: At_Germinating_Seeds_P Parameter: Tissue Value: Germinating Seeds
  misc_feature: MA Experiment ID: 20000180 Result: Up-regulated in Transcription
  misc_feature: MA Experiment 20000180 PARAMETER Experiment Name: At_Germinating_Seeds_P Parameter: Age (hr) Value: 24 vs. 0
  misc_feature: MA Experiment 20000180 PARAMETER Experiment Name: At_Germinating_Seeds_P Parameter: Tissue Value: Germinating Seeds
  misc_feature: MA Experiment ID: 20000185 Result: Up-regulated in Transcription
  misc_feature: MA Experiment 20000185 PARAMETER Experiment Name: At_Roots__P Parameter: Age (day) Value: 7 vs. 21
  misc_feature: MA Experiment 20000185 PARAMETER Experiment Name: At_Roots__P Parameter: Organism Value: A. thaliana
  misc_feature: MA Experiment 20000185 PARAMETER Experiment Name: At_Roots__P Parameter: Tissue Value: Roots vs. Whole Plant
  misc_feature: MA Experiment ID: 20000439 Result: Up-regulated in Transcription
  misc_feature: MA Experiment 20000439 PARAMETER Experiment Name: At_Roots__P Parameter: Age (day) Value: 14 vs. 21
  misc_feature: MA Experiment 20000439 PARAMETER Experiment Name: At_Roots__P Parameter: Organism Value: A. thaliana
  misc_feature: MA Experiment 20000439 PARAMETER Experiment Name: At_Roots__P Parameter: Tissue Value: Roots vs. Whole Plant
  misc_feature: MA Experiment ID: 20000495 Result: Up-regulated in Transcription
  misc_feature: MA Experiment 20000495 PARAMETER Experiment Name: At_Guard_Cells_P Parameter: Harvest Date Value: 8/2/2002
  misc_feature: MA Experiment 20000495 PARAMETER Experiment Name: At_Guard_Cells_P Parameter: Organism Value: A. thaliana
  misc_feature: MA Experiment 20000495 PARAMETER Experiment Name: At_Guard_Cells_P Parameter: Tissue Value: Guard Cells vs. Leaves
  misc_feature: MA Experiment ID: 20001905 Result: Down-regulated in Transcription
  misc_feature: MA Experiment 20001905 PARAMETER Experiment Name: At_Drought_Reproduction_P Parameter: Age (day) Value: 40
  misc_feature: MA Experiment 20001905 PARAMETER Experiment Name: At_Drought_Reproduction_P Parameter: Organism Value: A. thaliana
  misc_feature: MA Experiment 20001905 PARAMETER Experiment Name: At_Drought_Reproduction_P Parameter: Plant Line Value: WS
  misc_feature: MA Experiment 20001905 PARAMETER Experiment Name: At_Drought_Reproduction_P Parameter: Timepoint (day) Value: 10
  misc_feature: MA Experiment 20001905 PARAMETER Experiment Name: At_Drought_Reproduction_P Parameter: Tissue Value: Rosettes
  misc_feature: MA Experiment 20001905 PARAMETER Experiment Name: At_Drought_Reproduction_P Parameter: Treatment Value: Drought vs. No Drought
atataatctcgattctcttcaacggtcctcaattatcctaaattcagatcataaaaaagctaacttttaatttctttctttctgagaaattggttctcatcgttggaatcgaaaaatgggacgaatcggtttagtagtgactgatctggtattgtcgttcatgtggatatgggcaggagttctggtcaacattttagtccatggagttcttggatttagccggaccgatccttccggtgagatcgttcgttatctcttctctatcatctccatgttcatcttcgcctaccttcaacaagccaccaaaggcgggctttataatcctttgaccgctttggctgctggagtctccggtggcttcagcagtttcatcttctccgtcttcgttcgaatccccgtcgaggtaataggatcaattcttgcggttaagcatatcattcacgtattccctgagattgggaaaggacctaaactaaatgtagcaattcaccacggtgctttaacagaagggatactaacattcttcattgtactgctctcaatgggactaacaagaaaaatcccgggaagtttcttcatgaagacttggatcggtagtcttgctaagttaactcttcatattcttggctctgatcttaccggtggatgcatgaaccctgcagctgttatgggatgggcttatgcacgcggtgaacatataacgaaagagcatttacttgtgtattggcttggacctgtgaaggctacgttgcttgcagtttggttcttcaaagttgtgtttaagcctctcaccgaagaacaagagaaacctaaggccaaatctgagtgaggaatgaggaatgagctcagctttcatatttaatcctctctggataaatctcctttacacaagacacagagggtaggattgtttccagggatattttcgtagattttgtaatgtgttttttttttatgttgcaaactcaactgtatcaaccagttcaataaaatctgaaatttaag

SEQ ID NO: 21971 - protein, 237 aa, Arabidopsis thaliana
  peptide (1)..(237): Ceres Seq. ID no. 12331905
  misc_feature (10)..(216): Pfam Name: Major intrinsic protein Pfam Description: Major intrinsic protein
  misc_feature (1)..(233): Homolog of NCBI NO: 15229225 NR Description: hypothetical protein; protein id: At3g04090.1
  misc_feature (1)..(231): Homolog of NCBI NO: 15238785 NR Description: putative protein; protein id: At5g18290.1
  misc_feature (1)..(235): Homolog of NCBI NO: 13447815 NR Description: small basic membrane integral protein ZmSIP1-2
  misc_feature (1)..(235): Homolog of NCBI NO: 13447813 NR Description: small basic membrane integral protein ZmSIP1-1
  misc_feature (10)..(235): Homolog of NCBI NO: 34906220 NR Description: P0666G04.16 [Oryza sativa (japonica
  misc_feature (6)..(231): Homolog of NCBI NO: 13447817 NR Description: small basic membrane integral protein ZmSIP2-1
  misc_feature (1)..(237): Homolog of NCBI NO: 15230175 NR Description: putative protein
MGRIGLVVTDLVLSFMWIWAGVLVNILVHGVLGFSRTDPSGEIVRYLFSIISMFIFAYLQQATKGGLYNPLTALAAGVSGGFSSFIFSVFVRIPVEVIGSILAVKHIIHVFPEIGKGPKLNVAIHHGALTEGILTFFIVLLSMGLTRKIPGSFFMKTWIGSLAKLTLHILGSDLTGGCMNPAAVMGWAYARGEHITKEHLLVYWLGPVKATLLAVWFFKVVFKPLTEEQEKPKAKSE

SEQ ID NO: 21972 - protein, 222 aa, Arabidopsis thaliana
  peptide (1)..(222): Ceres Seq. ID no. 12331906
  misc_feature (1)..(201): Pfam Name: Major intrinsic protein Pfam Description: Major intrinsic protein
  misc_feature (1)..(218): Homolog of NCBI NO: 15229225 NR Description: hypothetical protein; protein id: At3g04090.1
  misc_feature (1)..(216): Homolog of NCBI NO: 15238785 NR Description: putative protein; protein id: At5g18290.1
  misc_feature (1)..(220): Homolog of NCBI NO: 13447815 NR Description: small basic membrane integral protein ZmSIP1-2
  misc_feature (1)..(220): Homolog of NCBI NO: 13447813 NR Description: small basic membrane integral protein ZmSIP1-1
  misc_feature (1)..(220): Homolog of NCBI NO: 34906220 NR Description: P0666G04.16 [Oryza sativa (japonica
  misc_feature (1)..(216): Homolog of NCBI NO: 13447817 NR Description: small basic membrane integral protein ZmSIP2-1
  misc_feature (1)..(222): Homolog of NCBI NO: 15230175 NR Description: putative protein
MWIWAGVLVNILVHGVLGFSRTDPSGEIVRYLFSIISMFIFAYLQQATKGGLYNPLTALAAGVSGGFSSFIFSVFVRIPVEVIGSILAVKHIIHVFPEIGKGPKLNVAIHHGALTEGILTFFIVLLSMGLTRKIPGSFFMKTWIGSLAKLTLHILGSDLTGGCMNPAAVMGWAYARGEHITKEHLLVYWLGPVKATLLAVWFFKVVFKPLTEEQEKPKAKSE

SEQ ID NO: 21973 - protein, 185 aa, Arabidopsis thaliana
  peptide (1)..(185): Ceres Seq. ID no. 12331907
  misc_feature (1)..(164): Pfam Name: Major intrinsic protein Pfam Description: Major intrinsic protein
  misc_feature (1)..(181): Homolog of NCBI NO: 15229225 NR Description: hypothetical protein; protein id: At3g04090.1
  misc_feature (1)..(179): Homolog of NCBI NO: 15238785 NR Description: putative protein; protein id: At5g18290.1
  misc_feature (1)..(183): Homolog of NCBI NO: 13447815 NR Description: small basic membrane integral protein ZmSIP1-2
  misc_feature (1)..(183): Homolog of NCBI NO: 13447813 NR Description: small basic membrane integral protein ZmSIP1-1
  misc_feature (1)..(183): Homolog of NCBI NO: 34906220 NR Description: P0666G04.16 [Oryza sativa (japonica
  misc_feature (1)..(179): Homolog of NCBI NO: 13447817 NR Description: small basic membrane integral protein ZmSIP2-1
  misc_feature (1)..(185): Homolog of NCBI NO: 15230175 NR Description: putative protein
MFIFAYLQQATKGGLYNPLTALAAGVSGGFSSFIFSVFVRIPVEVIGSILAVKHIIHVFPEIGKGPKLNVAIHHGALTEGILTFFIVLLSMGLTRKIPGSFFMKTWIGSLAKLTLHILGSDLTGGCMNPAAVMGWAYARGEHITKEHLLVYWLGPVKATLLAVWFFKVVFKPLTEEQEKPKAKSE

SEQ ID NO: 21974 - DNA, 1293 bp, Arabidopsis thaliana
  misc_feature (1)..(1293): Ceres Seq. ID no. 12324105
  misc_feature: MA Experiment ID: 108435 Result: Down-regulated in Transcription
  misc_feature: MA Experiment 108435 PARAMETER Experiment Name: At_stm_Mutants_cDNA_P Parameter: Plant Line Value: wt Landsburg vs stm
  misc_feature: MA Experiment 108435 PARAMETER Experiment Name: At_stm_Mutants_cDNA_P Parameter: Tissue Value: Shoot Apical Meristem Region
  misc_feature: MA Experiment ID: 108462 Result: Up-regulated in Transcription
  misc_feature: MA Experiment 108462 PARAMETER Experiment Name: At_Germinating_Seeds_cDNA_P Parameter: Age (day) Value: 2 vs. 0
  misc_feature: MA Experiment 108462 PARAMETER Experiment Name: At_Germinating_Seeds_cDNA_P Parameter: Tissue Value: Germinating Seeds
  misc_feature: MA Experiment ID: 108595 Result: Down-regulated in Transcription
  misc_feature: MA Experiment 108595 PARAMETER Experiment Name: At_Ler-pi_Ovule_cDNA_P Parameter: Plant Line Value: null
  misc_feature: MA Experiment ID: 20000087 Result: Down-regulated in Transcription
  misc_feature: MA Experiment 20000087 PARAMETER Experiment Name: At_100uM_ABA_Mutants_cDNA_P Parameter: Plant Line Value: WS
  misc_feature: MA Experiment 20000087 PARAMETER Experiment Name: At_100uM_ABA_Mutants_cDNA_P Parameter: Timepoint (hr) Value: 6
  misc_feature: MA Experiment 20000087 PARAMETER Experiment Name: At_100uM_ABA_Mutants_cDNA_P Parameter: Tissue Value: Aerial
  misc_feature: MA Experiment 20000087 PARAMETER Experiment Name: At_100uM_ABA_Mutants_cDNA_P Parameter: Treatment Value: 100uM ABA vs. No Treatment
  misc_feature: MA Experiment ID: 20000185 Result: Down-regulated in Transcription
  misc_feature: MA Experiment 20000185 PARAMETER Experiment Name: At_Roots__P Parameter: Age (day) Value: 7 vs. 21
  misc_feature: MA Experiment 20000185 PARAMETER Experiment Name: At_Roots__P Parameter: Organism Value: A. thaliana
  misc_feature: MA Experiment 20000185 PARAMETER Experiment Name: At_Roots__P Parameter: Tissue Value: Roots vs. Whole Plant
  misc_feature: MA Experiment ID: 20000439 Result: Down-regulated in Transcription
  misc_feature: MA Experiment 20000439 PARAMETER Experiment Name: At_Roots__P Parameter: Age (day) Value: 14 vs. 21
  misc_feature: MA Experiment 20000439 PARAMETER Experiment Name: At_Roots__P Parameter: Organism Value: A. thaliana
  misc_feature: MA Experiment 20000439 PARAMETER Experiment Name: At_Roots__P Parameter: Tissue Value: Roots vs. Whole Plant
  misc_feature: MA Experiment ID: 20001557 Result: Down-regulated in Transcription
  misc_feature: MA Experiment 20001557 PARAMETER Experiment Name: At_Drought_Soil_Dry_P Parameter: Age (day) Value: 27
  misc_feature: MA Experiment 20001557 PARAMETER Experiment Name: At_Drought_Soil_Dry_P Parameter: Organism Value: A. thaliana
  misc_feature: MA Experiment 20001557 PARAMETER Experiment Name: At_Drought_Soil_Dry_P Parameter: Plant Line Value: WS
  misc_feature: MA Experiment 20001557 PARAMETER Experiment Name: At_Drought_Soil_Dry_P Parameter: Post Timepoint (hr) Value: 3
  misc_feature: MA Experiment 20001557 PARAMETER Experiment Name: At_Drought_Soil_Dry_P Parameter: Post-Treatment Value: Re-Water vs. No Drought
  misc_feature: MA Experiment 20001557 PARAMETER Experiment Name: At_Drought_Soil_Dry_P Parameter: Timepoint (day) Value: 13
  misc_feature: MA Experiment 20001557 PARAMETER Experiment Name: At_Drought_Soil_Dry_P Parameter: Treatment Value: Drought vs. No Drought
agaccacaaacatcctccaacaagccaaaagaagacgagagaaggagaagagacgaaatcgccattgaaatggctctcaaagcttcacctgttaccggattattccctcctctccgtcctactgcttcttcttccccttcgacttcttctaatcgcccttgttccctcaggattctccctctcagaacatctttcttcggtaactcaagtggagcgctgagagtgaatgtgttgagattagcttgtgataatagactcaggtgcaatggtcatggtgctactatgaatctttttgaacgattttctagagtggtcaagtcatatgcaaatgcgctcataagctcttttgaagacccggagaaaatcctggagcaaactgtcattgaaatgaatagtgatttgacaaagatgcgtcaagccactgcacaggttttagcatcacaaaagcagttacagaacaaatataaagctgcacagcagtcttctgatgattggtacaaaagagcacaacttgctcttgcaaaaggagatgaggatcttgcacgtgaggcccttaaacgacgaaagtcttttgctgacaacgctactgctttgaaaactcaactagatcagcaaaaaggtgttgtcgacaatcttgtttcaaatacaaggctcttggagagtaagatacaagaggcaaaagcaaagaaagatacgctccttgcacgtgctcgcactgctaagactgcaaccaaagtgcaagagatgatagggacagtaaatacaagcggtgctctttcagcttttgagaaaatggaggagaaagttatggctatggagtctgaagcagatgcactaactcagattggaaccgatgaactcgaggggaagtttcaaatgcttgaaacttcatctgtggatgatgatcttgcagacttgaagaaagaattgtctggaagctcaaagaaaggagagcttcctccagggagaagcactgttgcagcaagcacgagataccctttcaaagactcagagatcgagaatgagttaaacgaactgcgaaggaaagctaacgacttttagatatcggctgtttccgaattgtgactgggttacattacgttcctgctgtaaactatcttgtgtcttgtagaaagacacaaaaagcatgtgtactcttaaagtaaatatccagctatctaatccccatttatagttgggttatgtacattcagacacttttgaaagtgtggtttccattttgactcactttgtgtcaagtggacacgtttttttataagctgttttactcgc

SEQ ID NO: 21975 - protein, 353 aa, Arabidopsis thaliana
  peptide (1)..(353): Ceres Seq. ID no. 12324106
  misc_feature (96)..(312): Pfam Name: PspA/IM30 family Pfam Description: PspA/IM30 family
  misc_feature (95)..(310): Homolog of NCBI NO: 23040389 NR Description: hypothetical protein [Trichodesmium erythraeum
  misc_feature (95)..(310): Homolog of NCBI NO: 23126176 NR Description: hypothetical protein [Nostoc punctiforme]
  misc_feature (95)..(349): Homolog of NCBI NO: 23126177 NR Description: hypothetical protein [Nostoc punctiforme]
  misc_feature (95)..(349): Homolog of NCBI NO: 23040390 NR Description: hypothetical protein [Trichodesmium erythraeum
  misc_feature (95)..(349): Homolog of NCBI NO: 17229834 NR Description: similar to chloroplast membrane-associated 30 kD
  misc_feature (95)..(333): Homolog of NCBI NO: 37520467 NR Description: unknown protein [Gloeobacter violaceus]
  misc_feature (95)..(348): Homolog of NCBI NO: 33866411 NR Description: similar to chloroplast membrane-associated 30 kD
  misc_feature (43)..(352): Homolog of NCBI NO: 729842 NR Description: Membrane-associated 30 kDa protein, chloroplast
  misc_feature (36)..(353): Homolog of NCBI NO: 34907594 NR Description: putative chloroplast membrane-associated 30 kD
  misc_feature (24)..(353): Homolog of NCBI NO: 18408237 NR Description: expressed protein
RPQTSSNKPKEDERRRRDEIAIEMALKASPVTGLFPPLRPTASSSPSTSSNRPCSLRILPLRTSFFGNSSGALRVNVLRLACDNRLRCNGHGATMNLFERFSRVVKSYANALISSFEDPEKILEQTVIEMNSDLTKMRQATAQVLASQKQLQNKYKAAQQSSDDWYKRAQLALAKGDEDLAREALKRRKSFADNATALKTQLDQQKGVVDNLVSNTRLLESKIQEAKAKKDTLLARARTAKTATKVQEMIGTVNTSGALSAFEKMEEKVMAMESEADALTQIGTDELEGKFQMLETSSVDDDLADLKKELSGSSKKGELPPGRSTVAASTRYPFKDSEIENELNELRRKANDF

SEQ ID NO: 21976 - protein, 330 aa, Arabidopsis thaliana
  peptide (1)..(330): Ceres Seq. ID no. 12324107
  misc_feature (73)..(289): Pfam Name: PspA/IM30 family Pfam Description: PspA/IM30 family
  misc_feature (72)..(287): Homolog of NCBI NO: 23040389 NR Description: hypothetical protein [Trichodesmium erythraeum
  misc_feature (72)..(287): Homolog of NCBI NO: 23126176 NR Description: hypothetical protein [Nostoc punctiforme]
  misc_feature (72)..(326): Homolog of NCBI NO: 23126177 NR Description: hypothetical protein [Nostoc punctiforme]
  misc_feature (72)..(326): Homolog of NCBI NO: 23040390 NR Description: hypothetical protein [Trichodesmium erythraeum
  misc_feature (72)..(326): Homolog of NCBI NO: 17229834 NR Description: similar to chloroplast membrane-associated 30 kD
  misc_feature (72)..(310): Homolog of NCBI NO: 37520467 NR Description: unknown protein [Gloeobacter violaceus]
  misc_feature (72)..(325): Homolog of NCBI NO: 33866411 NR Description: similar to chloroplast membrane-associated 30 kD
  misc_feature (20)..(329): Homolog of NCBI NO: 729842 NR Description: Membrane-associated 30 kDa protein, chloroplast
  misc_feature (13)..(330): Homolog of NCBI NO: 34907594 NR Description: putative chloroplast membrane-associated 30 kD
  misc_feature (1)..(330): Homolog of NCBI NO: 18408237 NR Description: expressed protein
MALKASPVTGLFPPLRPTASSSPSTSSNRPCSLRILPLRTSFFGNSSGALRVNVLRLACDNRLRCNGHGATMNLFERFSRVVKSYANALISSFEDPEKILEQTVIEMNSDLTKMRQATAQVLASQKQLQNKYKAAQQSSDDWYKRAQLALAKGDEDLAREALKRRKSFADNATALKTQLDQQKGVVDNLVSNTRLLESKIQEAKAKKDTLLARARTAKTATKVQEMIGTVNTSGALSAFEKMEEKVMAMESEADALTQIGTDELEGKFQMLETSSVDDDLADLKKELSGSSKKGELPPGRSTVAASTRYPFKDSEIENELNELRRKANDF

SEQ ID NO: 21977 - protein, 259 aa, Arabidopsis thaliana
  peptide (1)..(259): Ceres Seq. ID no. 12324108
  misc_feature (2)..(218): Pfam Name: PspA/IM30 family Pfam Description: PspA/IM30 family
  misc_feature (1)..(216): Homolog of NCBI NO: 23040389 NR Description: hypothetical protein [Trichodesmium erythraeum
  misc_feature (1)..(216): Homolog of NCBI NO: 23126176 NR Description: hypothetical protein [Nostoc punctiforme]
  misc_feature (1)..(255): Homolog of NCBI NO: 23126177 NR Description: hypothetical protein [Nostoc punctiforme]
  misc_feature (1)..(255): Homolog of NCBI NO: 23040390 NR Description: hypothetical protein [Trichodesmium erythraeum
  misc_feature (1)..(255): Homolog of NCBI NO: 17229834 NR Description: similar to chloroplast membrane-associated 30 kD
  misc_feature (1)..(239): Homolog of NCBI NO: 37520467 NR Description: unknown protein [Gloeobacter violaceus]
  misc_feature (1)..(254): Homolog of NCBI NO: 33866411 NR Description: similar to chloroplast membrane-associated 30 kD
  misc_feature (1)..(258): Homolog of NCBI NO: 729842 NR Description: Membrane-associated 30 kDa protein, chloroplast
  misc_feature (1)..(259): Homolog of NCBI NO: 34907594 NR Description: putative chloroplast membrane-associated 30 kD
  misc_feature (1)..(259): Homolog of NCBI NO: 18408237 NR Description: expressed protein
MNLFERFSRVVKSYANALISSFEDPEKILEQTVIEMNSDLTKMRQATAQVLASQKQLQNKYKAAQQSSDDWYKRAQLALAKGDEDLAREALKRRKSFADNATALKTQLDQQKGVVDNLVSNTRLLESKIQEAKAKKDTLLARARTAKTATKVQEMIGTVNTSGALSAFEKMEEKVMAMESEADALTQIGTDELEGKFQMLETSSVDDDLADLKKELSGSSKKGELPPGRSTVAASTRYPFKDSEIENELNELRRKANDF

SEQ ID NO: 21978 - DNA, 814 bp, Arabidopsis thaliana
  misc_feature (1)..(814): Ceres Seq. ID no. 13491746
  misc_feature: MA Experiment ID: 108462 Result: Up-regulated in Transcription
  misc_feature: MA Experiment 108462 PARAMETER Experiment Name: At_Germinating_Seeds_cDNA_P Parameter: Age (day) Value: 2 vs. 0
  misc_feature: MA Experiment 108462 PARAMETER Experiment Name: At_Germinating_Seeds_cDNA_P Parameter: Tissue Value: Germinating Seeds
  misc_feature: MA Experiment ID: 20000069 Result: Up-regulated in Transcription
  misc_feature: MA Experiment 20000069 PARAMETER Experiment Name: At_100uM_ABA_Mutants_cDNA_P Parameter: Plant Line Value: CS23
  misc_feature: MA Experiment 20000069 PARAMETER Experiment Name: At_100uM_ABA_Mutants_cDNA_P Parameter: Timepoint (hr) Value: 6
  misc_feature: MA Experiment 20000069 PARAMETER Experiment Name: At_100uM_ABA_Mutants_cDNA_P Parameter: Tissue Value: Aerial
  misc_feature: MA Experiment 20000069 PARAMETER Experiment Name: At_100uM_ABA_Mutants_cDNA_P Parameter: Treatment Value: 100uM ABA vs. No Treatment
  misc_feature: MA Experiment ID: 20000071 Result: Up-regulated in Transcription
  misc_feature: MA Experiment 20000071 PARAMETER Experiment Name: At_100uM_ABA_Mutants_cDNA_P Parameter: Plant Line Value: CS8104
  misc_feature: MA Experiment 20000071 PARAMETER Experiment Name: At_100uM_ABA_Mutants_cDNA_P Parameter: Timepoint (hr) Value: 6
  misc_feature: MA Experiment 20000071 PARAMETER Experiment Name: At_100uM_ABA_Mutants_cDNA_P Parameter: Tissue Value: Aerial
  misc_feature: MA Experiment 20000071 PARAMETER Experiment Name: At_100uM_ABA_Mutants_cDNA_P Parameter: Treatment Value: 100uM ABA vs. No Treatment
  misc_feature: MA Experiment ID: 20000117 Result: Up-regulated in Transcription
  misc_feature: MA Experiment 20000117 PARAMETER Experiment Name: At_100uM_ABA_Mutants_cDNA_P Parameter: Plant Line Value: Columbia
  misc_feature: MA Experiment 20000117 PARAMETER Experiment Name: At_100uM_ABA_Mutants_cDNA_P Parameter: Timepoint (hr) Value: 6
  misc_feature: MA Experiment 20000117 PARAMETER Experiment Name: At_100uM_ABA_Mutants_cDNA_P Parameter: Tissue Value: Aerial
  misc_feature: MA Experiment 20000117 PARAMETER Experiment Name: At_100uM_ABA_Mutants_cDNA_P Parameter: Treatment Value: 100uM ABA vs. No Treatment
  misc_feature: MA Experiment ID: 20000184 Result: Down-regulated in Transcription
  misc_feature: MA Experiment 20000184 PARAMETER Experiment Name: At_Shoots__P Parameter: Age (day) Value: 7
  misc_feature: MA Experiment 20000184 PARAMETER Experiment Name: At_Shoots__P Parameter: Tissue Value: Shoots vs. Whole Plant
aagaaaagggaaaacaaaggatcttccatgggcgatcgctgagaagatccgcaagaacaaacacatcaaattccttgaaatcaggaatcttattcgatagtctatttgagcccttgatctggttttatatttggtggaagttttgaaatggtgctggtattggcattgggggatctccatgtaccccatagagcggctgatctacctcctaagttcaaatcaatgcttgttcctgggaagattcaacacatcatctgcactggaaatctctgcatcaaagaaatccatgactacttgaagactatctgccctgatttgcatatagttcgaggggagtttgacgaagatgcgcgataccctgagaataaaaccttgactattgggcaattcaagctgggattgtgtcatggccaccaggtgatcccatggggtgatctagactcactcgccatgcttcagagacaactgggcgtcgacattctcgtaacaggccatacccaccagttcacagcgtacaaacacgagggaggagtggtgataaacccgggctctgcaaccggagcttacagcagcataaaccaagacgttaacccaagctttgtccttatggacatcgatggtttccgagctgtagtctatgtctatgagctaatcgatggagaagttaaagtcgacaagatcgagttcaagaagccccctactaccagctctggtccgtagttccttaaaaaaaaacttaaaccgttttatgttttcgtcctaaacatttagaactttcttgtgaaaaataatcttgttaacaattttcaaatcc

SEQ ID NO: 21979 - protein, 190 aa, Arabidopsis thaliana
  peptide (1)..(190): Ceres Seq. ID no. 13491747
  misc_feature (2)..(120): Pfam Name: Calcineurin-like phosphoesterase Pfam Description: Calcineurin-like phosphoesterase
  misc_feature (2)..(182): Homolog of NCBI NO: 29841378 NR Description: similar to NM_019780 vacuolar protein sorting 29
  misc_feature (3)..(182): Homolog of NCBI NO: 12835154 NR Description: unnamed protein product [Mus musculus]
  misc_feature (2)..(183): Homolog of NCBI NO: 12052754 NR Description: hypothetical protein [Homo sapiens]
  misc_feature (2)..(182): Homolog of NCBI NO: 9790285 NR Description: vacuolar protein sorting 29
  misc_feature (2)..(182): Homolog of NCBI NO: 28279210 NR Description: Similar to vacuolar protein sorting 29 (S. pombe)
  misc_feature (3)..(183): Homolog of NCBI NO: 9295176 NR Description: DC15 [Homo sapiens]
  misc_feature (3)..(183): Homolog of NCBI NO: 17402912 NR Description: vacuolar protein sorting 29 isoform 2
  misc_feature (2)..(183): Homolog of NCBI NO: 7706441 NR Description: vacuolar protein sorting 29 isoform 1
  misc_feature (44)..(190): Homolog of NCBI NO: 30692933 NR Description: calcineurin-like phosphoesterase family
  misc_feature (1)..(190): Homolog of NCBI NO: 7487365 NR Description: VPS29-like phosphoesterase-related protein
MVLVLALGDLHVPHRAADLPPKFKSMLVPGKIQHIICTGNLCIKEIHDYLKTICPDLHIVRGEFDEDARYPENKTLTIGQFKLGLCHGHQVIPWGDLDSLAMLQRQLGVDILVTGHTHQFTAYKHEGGVVINPGSATGAYSSINQDVNPSFVLMDIDGFRAVVYVYELIDGEVKVDKIEFKKPPTTSSGP

SEQ ID NO: 21980 - protein, 165 aa, Arabidopsis thaliana
  peptide (1)..(165): Ceres Seq. ID no. 13491748
  misc_feature (1)..(95): Pfam Name: Calcineurin-like phosphoesterase Pfam Description: Calcineurin-like phosphoesterase
  misc_feature (1)..(157): Homolog of NCBI NO: 28279210 NR Description: Similar to vacuolar protein sorting 29 (S. pombe)
  misc_feature (1)..(158): Homolog of NCBI NO: 9295176 NR Description: DC15 [Homo sapiens]
  misc_feature (1)..(158): Homolog of NCBI NO: 17402912 NR Description: vacuolar protein sorting 29 isoform 2
  misc_feature (1)..(157): Homolog of NCBI NO: 29841378 NR Description: similar to NM_019780 vacuolar protein sorting 29
  misc_feature (1)..(158): Homolog of NCBI NO: 12052754 NR Description: hypothetical protein [Homo sapiens]
  misc_feature (1)..(157): Homolog of NCBI NO: 9790285 NR Description: vacuolar protein sorting 29
  misc_feature (1)..(157): Homolog of NCBI NO: 12835154 NR Description: unnamed protein product [Mus musculus]
  misc_feature (1)..(158): Homolog of NCBI NO: 7706441 NR Description: vacuolar protein sorting 29 isoform 1
  misc_feature (19)..(165): Homolog of NCBI NO: 30692933 NR Description: calcineurin-like phosphoesterase family
  misc_feature (1)..(165): Homolog of NCBI NO: 7487365 NR Description: VPS29-like phosphoesterase-related protein
MLVPGKIQHIICTGNLCIKEIHDYLKTICPDLHIVRGEFDEDARYPENKTLTIGQFKLGLCHGHQVIPWGDLDSLAMLQRQLGVDILVTGHTHQFTAYKHEGGVVINPGSATGAYSSINQDVNPSFVLMDIDGFRAVVYVYELIDGEVKVDKIEFKKPPTTSSGP

SEQ ID NO: 21981 - DNA, 1246 bp, Arabidopsis thaliana
  misc_feature (1)..(1246): Ceres Seq. ID no. 12371605
  misc_feature: MA Experiment ID: 20000111 Result: Down-regulated in Transcription
  misc_feature: MA Experiment 20000111 PARAMETER Experiment Name: At_42deg_Heat_cDNA_P Parameter: Temperature (deg C) Value: 42 vs. 22
  misc_feature: MA Experiment 20000111 PARAMETER Experiment Name: At_42deg_Heat_cDNA_P Parameter: Timepoint (hr) Value: 6
  misc_feature: MA Experiment 20000111 PARAMETER Experiment Name: At_42deg_Heat_cDNA_P Parameter: Tissue Value: Aerial
acaattatctcagttttgacctctctgaagattaagcaaaataacacttcgttcgttcgtactctatgaactcgctgctgacctcctccacatccttagccctgccgtgtgcgataccgatcgtcttcgtcaatttcttaagttctttttgttctccaattcatggtgtaccaacgatttagctactgaagtttagaaagcccccaatttttgttttcgttttagcgtttcccgatctgtgaattgggtatcagctccaaaggtttaatgcccagtaaagttatcgaggacgagagtttaggggtcttacagtgcgagtgaatttagattaaaaggtacaaactttaccttttggtcggaactgggaagagggggaatcggacatgattcagttactattcctggttctgttcgtagaaggtgcgattgcgttcttactactggtaaagattggtcctttaagggagcttgtaatgaagagcttagaccagcttaaattggggaaacgtcctgctactctgaaaaccatcgctggaaccatgtctgtgatcctcctgtcgaatctcatgaatatcattaagatccagaacaagggtgccaaacttgggacaatgtctccaatggatcaagtcctctggagaacacacttgctcgaggcttctcttatgggtgttgtgctcttttttggcttcattattgaccggacacatcattacctcgaaaagctaatcactttaagaagcaatgtcgggtcatcgaaaggagaactagaagaacttaggaaggagagaatcgaactgaaggagaaagaagagaagacatccaaggaaattaagcagctgaaagaaaaactgtcgtgtgtttcagagaatctcaagaaactagagaaggaatccaaagagaaagaaacgaagctcgaaacagctgaagcccatgtcacagctctccaaaagcagtcttcagagctattgttggagtatgacagattgctagaagacaaccaaaatctccaaagccagattttggttggaaccaagaaaacctgaagtgatttaagattcttaagagctctttgatagagttttagagtgttttgtgaacgaatgcggaaatggtaagtggcaaccaaggaattcttgtactcgttttttttttgcgctcttggttcctacccattgatgctgtcttccaaatattataatgttacgtaaattaacaacatcagtaagaagccatctaaacaatg

SEQ ID NO: 21982 - protein, 220 aa, Arabidopsis thaliana
  peptide (1)..(220): Ceres Seq. ID no. 12371606
  misc_feature (4)..(200): Pfam Name: B-cell receptor-associated protein 31-like Pfam Description: B-cell receptor-associated protein 31-like
  misc_feature (1)..(128): Homolog of NCBI NO: 18402620 NR Description: expressed protein
  misc_feature (1)..(158): Homolog of NCBI NO: 30682503 NR Description: expressed protein [Arabidopsis thaliana]
  misc_feature (1)..(213): Homolog of NCBI NO: 22655198 NR Description: unknown protein [Arabidopsis thaliana]
  misc_feature (1)..(213): Homolog of NCBI NO: 21553655 NR Description: unknown [Arabidopsis thaliana]
  misc_feature (1)..(213): Homolog of NCBI NO: 18422225 NR Description: expressed protein
  misc_feature (1)..(213): Homolog of NCBI NO: 9759015 NR Description: gene_id:K16E1.4~unknown protein [Arabidopsis
  misc_feature (1)..(213): Homolog of NCBI NO: 34897474 NR Description: unknown protein [Oryza sativa (japonica
  misc_feature (1)..(218): Homolog of NCBI NO: 15239667 NR Description: putative protein; protein id: At5g48660.1
  misc_feature (1)..(220): Homolog of NCBI NO: 15231412 NR Description: unknown protein; protein id: At3g07190.1
MIQLLFLVLFVEGAIAFLLLVKIGPLRELVMKSLDQLKLGKRPATLKTIAGTMSVILLSNLMNIIKIQNKGAKLGTMSPMDQVLWRTHLLEASLMGVVLFFGFIIDRTHHYLEKLITLRSNVGSSKGELEELRKERIELKEKEEKTSKEIKQLKEKLSCVSENLKKLEKESKEKETKLETAEAHVTALQKQSSELLLEYDRLLEDNQNLQSQILVGTKKT

SEQ ID NO: 21983 - protein, 190 aa, Arabidopsis thaliana
  peptide (1)..(190): Ceres Seq. ID no. 12371607
  misc_feature (1)..(170): Pfam Name: B-cell receptor-associated protein 31-like Pfam Description: B-cell receptor-associated protein 31-like
  misc_feature (1)..(98): Homolog of NCBI NO: 18402620 NR Description: expressed protein
  misc_feature (1)..(128): Homolog of NCBI NO: 30682503 NR Description: expressed protein [Arabidopsis thaliana]
  misc_feature (1)..(183): Homolog of NCBI NO: 22655198 NR Description: unknown protein [Arabidopsis thaliana]
  misc_feature (1)..(183): Homolog of NCBI NO: 21553655 NR Description: unknown [Arabidopsis thaliana]
  misc_feature (1)..(183): Homolog of NCBI NO: 18422225 NR Description: expressed protein
  misc_feature (1)..(183): Homolog of NCBI NO: 9759015 NR Description: gene_id:K16E1.4~unknown protein [Arabidopsis
  misc_feature (1)..(183): Homolog of NCBI NO: 34897474 NR Description: unknown protein [Oryza sativa (japonica
  misc_feature (1)..(188): Homolog of NCBI NO: 15239667 NR Description: putative protein; protein id: At5g48660.1
  misc_feature (1)..(190): Homolog of NCBI NO: 15231412 NR Description: unknown protein; protein id: At3g07190.1
MKSLDQLKLGKRPATLKTIAGTMSVILLSNLMNIIKIQNKGAKLGTMSPMDQVLWRTHLLEASLMGVVLFFGFIIDRTHHYLEKLITLRSNVGSSKGELEELRKERIELKEKEEKTSKEIKQLKEKLSCVSENLKKLEKESKEKETKLETAEAHVTALQKQSSELLLEYDRLLEDNQNLQSQILVGTKKT

SEQ ID NO: 21984 - protein, 168 aa, Arabidopsis thaliana
  peptide (1)..(168): Ceres Seq. ID no. 12371608
  misc_feature (1)..(148): Pfam Name: B-cell receptor-associated protein 31-like Pfam Description: B-cell receptor-associated protein 31-like
  misc_feature (1)..(76): Homolog of NCBI NO: 18402620 NR Description: expressed protein
  misc_feature (1)..(106): Homolog of NCBI NO: 30682503 NR Description: expressed protein [Arabidopsis thaliana]
  misc_feature (1)..(161): Homolog of NCBI NO: 22655198 NR Description: unknown protein [Arabidopsis thaliana]
  misc_feature (1)..(161): Homolog of NCBI NO: 21553655 NR Description: unknown [Arabidopsis thaliana]
  misc_feature (1)..(161): Homolog of NCBI NO: 18422225 NR Description: expressed protein
  misc_feature (1)..(161): Homolog of NCBI NO: 9759015 NR Description: gene_id:K16E1.4~unknown protein [Arabidopsis
  misc_feature (1)..(161): Homolog of NCBI NO: 34897474 NR Description: unknown protein [Oryza sativa (japonica
  misc_feature (1)..(166): Homolog of NCBI NO: 15239667 NR Description: putative protein; protein id: At5g48660.1
  misc_feature (1)..(168): Homolog of NCBI NO: 15231412 NR Description: unknown protein; protein id: At3g07190.1
MSVILLSNLMNIIKIQNKGAKLGTMSPMDQVLWRTHLLEASLMGVVLFFGFIIDRTHHYLEKLITLRSNVGSSKGELEELRKERIELKEKEEKTSKEIKQLKEKLSCVSENLKKLEKESKEKETKLETAEAHVTALQKQSSELLLEYDRLLEDNQNLQSQILVGTKKT

SEQ ID NO: 21985 - DNA, 2208 bp, Arabidopsis thaliana
  misc_feature (1)..(2208): Ceres Seq. ID no. 13490374
  misc_feature: MA Experiment ID: 108573 Result: Up-regulated in Transcription
  misc_feature: MA Experiment 108573 PARAMETER Experiment Name: At_Drought_cDNA_P Parameter: Timepoint (hr) Value: 6
  misc_feature: MA Experiment 108573 PARAMETER Experiment Name: At_Drought_cDNA_P Parameter: Tissue Value: Aerial
  misc_feature: MA Experiment 108573 PARAMETER Experiment Name: At_Drought_cDNA_P Parameter: Treatment Value: Drought vs. No Drought
  misc_feature: MA Experiment ID: 20000184 Result: Down-regulated in Transcription
  misc_feature: MA Experiment 20000184 PARAMETER Experiment Name: At_Shoots__P Parameter: Age (day) Value: 7
  misc_feature: MA Experiment 20000184 PARAMETER Experiment Name: At_Shoots__P Parameter: Tissue Value: Shoots vs. Whole Plant
  misc_feature: MA Experiment ID: 20000438 Result: Down-regulated in Transcription
  misc_feature: MA Experiment 20000438 PARAMETER Experiment Name: At_Shoots__P Parameter: Age (day) Value: 14
  misc_feature: MA Experiment 20000438 PARAMETER Experiment Name: At_Shoots__P Parameter: Tissue Value: Shoots vs. Whole Plant
  misc_feature: MA Experiment ID: 20000794 Result: Up-regulated in Transcription
  misc_feature: MA Experiment 20000794 PARAMETER Experiment Name: At_Petals_P Parameter: Age (day) Value: 23-25 days
  misc_feature: MA Experiment 20000794 PARAMETER Experiment Name: At_Petals_P Parameter: Plant Line Value: WS
  misc_feature: MA Experiment 20000794 PARAMETER Experiment Name: At_Petals_P Parameter: Tissue Value: Petals vs. Whole plant
attgggatataacataactaagaaagtatagccatcacatctgaagctctgagggcaatgtagttggaaccatctttgcccttgaagtcgttaccagcatacttggagtaaagtactgtgcttccggttgatactggtagaggcgtaattttaccttcctcgtctagggaacccggtccaactgctatcaccgtgccaatagaaggcttctctttggtagtctcggttaacaacaaccctccagctgttttctcctccgcctcagcaaccttaataaagactcggtcattcaaaggtttgagatctttgatgtcctctgtctcaagaatgccaacaatatcatcttccttgaggataagatgcttcacatcattgaactccacctcagttcctgcgtatttggagtagataatttgtgctccagtagggacagtgatatcaattttgttcttcccaatagttcttccttcacccacggcaacgacttcacctccttgaggttttgattgagcagtggatggaagtaagataccacctaaagtcttctcctctgcctccttgatcttcaccaaaactcgatctcccaatggcttaattgaagtatacttaggggcaacaacagaagcagctttgacaaccaaacgacggaactggctctgtctaagggtccctggtttcaaagatgaaaacttgacactcgaagctctgagaccatccagcgaggctaagctccttgctgacatagtcactggtgacgctgtaagttgagtcgccgccatttctccttgttgaggataagaaaaaggttgagactttcggaggataaaaccctaaaaattgcagtagagagagagttagatcggttctcgagaaccggagcaaatattttactctcttatttcgaagagagagagagaagaagacggaagctagaagaaatcgtttttgatcggagatagtgtatgagctagttgtttgtaatttgacggctctcgggaactgatctatctccggtgtctctgctttgtcggtagctacaggagtgaagagagtttctacaagggttttaatggaagatgatgactctccttcttctcgggatttggatgcacagaacccttatgatcgattgcttgctctagatacaagtaccgtagatccaaattgtaacttggattcggtttctgccatttatctagcgatgaagagctctaagctggaatgtgttgacgagcgtggtcaagattcccttattacttcggtatgcatggaggatgaagaggatgaggagctcgatgagtttgatccttatctgtttatcaagaacttgccgaacctgtcttctgttgtcccaactttcaggccggtcttgcttcctaaacaaacccgaagctgtcctcctatttctcttgtcctagaccttgatgaaactcttgtgcactcgactctagagccgtgtggtgaggtagatttcacattcccagtgaattttaatgaagaagagcatatggtgtatgtgcgatgccgtcctcacctcaaagagtttatggagagagtgtcccgactttttgagatcattatatttacagctagccaaagtatttatgctgagcaacttctgaacgtgcttgaccctaagagaaagctctttcgccatagagtgtaccgtgactcgtgtgttttctttgatggtaactacctcaaggatttgtcagtcctcgggcgtgatttatctcgtgttatcattgttgataactccccacaggcatttggtttccaagtggaaaatggagtgccaatagagagctggtttaatgacccatcagataaagaactccttcacttgctgccatttcttgaaagcctaattggagttgaagatgtaaggccaatgatcgccaagaaattcaatctaagggagaagattgatgcagctgtagccgcacctgaatatcctgctgaggcgggagatcctttcgaaaggtaaagtctatcgccaaaacacttttaaaggaagaatctggcacaagagcagaggttggagaagatatataagtatatcaatgttgttttcttattagtttaaattaagaacttggtatacagagaaagacaggatatgcctgtaaaaacagtttaaggcacaataactgtataattgttttctcgtttatttactagtacacatagattaacatttcaagtttc

SEQ ID NO: 21986 - protein, 305 aa, Arabidopsis thaliana
  peptide (1)..(305): Ceres Seq. ID no. 13490375
  misc_feature (99)..(278): Pfam Name: NLI interacting factor-like phosphatase Pfam Description: NLI interacting factor-like phosphatase
  misc_feature (59)..(284): Homolog of NCBI NO: 26326063 NR Description: unnamed protein product [Mus musculus]
  misc_feature (43)..(284): Homolog of NCBI NO: 34856794 NR Description: similar to hypothetical protein HSPC129 [Rattus
  misc_feature (59)..(284): Homolog of NCBI NO: 7705461 NR Description: hypothetical protein HSPC129 [Homo sapiens]
  misc_feature (59)..(284): Homolog of NCBI NO: 23273027 NR Description: hypothetical protein HSPC129 [Homo sapiens]
  misc_feature (59)..(284): Homolog of NCBI NO: 6841354 NR Description: HSPC058 [Homo sapiens]
  misc_feature (59)..(284): Homolog of NCBI NO: 7022613 NR Description: unnamed protein product [Homo sapiens]
  misc_feature (59)..(284): Homolog of NCBI NO: 28838482 NR Description: Unknown (protein for MGC:52903) [Xenopus laevis]
  misc_feature (71)..(282): Homolog of NCBI NO: 31212163 NR Description: ENSANGP00000011443 [Anopheles gambiae]
  misc_feature (38)..(289): Homolog of NCBI NO: 34897436 NR Description: putative NLI-interacting factor
  misc_feature (1)..(305): Homolog of NCBI NO: 15239800 NR Description: expressed protein [Arabidopsis thaliana]
MEDDDSPSSRDLDAQNPYDRLLALDTSTVDPNCNLDSVSAIYLAMKSSKLECVDERGQDSLITSVCMEDEEDEELDEFDPYLFIKNLPNLSSVVPTFRPVLLPKQTRSCPPISLVLDLDETLVHSTLEPCGEVDFTFPVNFNEEEHMVYVRCRPHLKEFMERVSRLFEIIIFTASQSIYAEQLLNVLDPKRKLFRHRVYRDSCVFFDGNYLKDLSVLGRDLSRVIIVDNSPQAFGFQVENGVPIESWFNDPSDKELLHLLPFLESLIGVEDVRPMIAKKFNLREKIDAAVAAPEYPAEAGDPFER

SEQ ID NO: 21987 - protein, 261 aa, Arabidopsis thaliana
  peptide (1)..(261): Ceres Seq. ID no. 13490376
  misc_feature (55)..(234): Pfam Name: NLI interacting factor-like phosphatase Pfam Description: NLI interacting factor-like phosphatase
  misc_feature (15)..(240): Homolog of NCBI NO: 26326063 NR Description: unnamed protein product [Mus musculus]
  misc_feature (1)..(240): Homolog of NCBI NO: 34856794 NR Description: similar to hypothetical protein HSPC129 [Rattus
  misc_feature (15)..(240): Homolog of NCBI NO: 23273027 NR Description: hypothetical protein HSPC129 [Homo sapiens]
  misc_feature (15)..(240): Homolog of NCBI NO: 7705461 NR Description: hypothetical protein HSPC129 [Homo sapiens]
  misc_feature (15)..(240): Homolog of NCBI NO: 6841354 NR Description: HSPC058 [Homo sapiens]
  misc_feature (15)..(240): Homolog of NCBI NO: 7022613 NR Description: unnamed protein product [Homo sapiens]
  misc_feature (15)..(240): Homolog of NCBI NO: 28838482 NR Description: Unknown (protein for MGC:52903) [Xenopus laevis]
  misc_feature (27)..(238): Homolog of NCBI NO: 31212163 NR Description: ENSANGP00000011443 [Anopheles gambiae]
  misc_feature (1)..(245): Homolog of NCBI NO: 34897436 NR Description: putative NLI-interacting factor
  misc_feature (1)..(261): Homolog of NCBI NO: 15239800 NR Description: expressed protein [Arabidopsis thaliana]
MKSSKLECVDERGQDSLITSVCMEDEEDEELDEFDPYLFIKNLPNLSSVVPTFRPVLLPKQTRSCPPISLVLDLDETLVHSTLEPCGEVDFTFPVNFNEEEHMVYVRCRPHLKEFMERVSRLFEIIIFTASQSIYAEQLLNVLDPKRKLFRHRVYRDSCVFFDGNYLKDLSVLGRDLSRVIIVDNSPQAFGFQVENGVPIESWFNDPSDKELLHLLPFLESLIGVEDVRPMIAKKFNLREKIDAAVAAPEYPAEAGDPFER

SEQ ID NO: 21988 - protein, 239 aa, Arabidopsis thaliana
  peptide (1)..(239): Ceres Seq. ID no. 13490377
  misc_feature (33)..(212): Pfam Name: NLI interacting factor-like phosphatase Pfam Description: NLI interacting factor-like phosphatase
  misc_feature (1)..(218): Homolog of NCBI NO: 26326063 NR Description: unnamed protein product [Mus musculus]
  misc_feature (1)..(218): Homolog of NCBI NO: 34856794 NR Description: similar to hypothetical protein HSPC129 [Rattus
  misc_feature (1)..(218): Homolog of NCBI NO: 23273027 NR Description: hypothetical protein HSPC129 [Homo sapiens]
  misc_feature (1)..(218): Homolog of NCBI NO: 7705461 NR Description: hypothetical protein HSPC129 [Homo sapiens]
  misc_feature (1)..(218): Homolog of NCBI NO: 6841354 NR Description: HSPC058 [Homo sapiens]
  misc_feature (1)..(218): Homolog of NCBI NO: 7022613 NR Description: unnamed protein product [Homo sapiens]
  misc_feature (1)..(218): Homolog of NCBI NO: 28838482 NR Description: Unknown (protein for MGC:52903) [Xenopus laevis]
  misc_feature (5)..(216): Homolog of NCBI NO: 31212163 NR Description: ENSANGP00000011443 [Anopheles gambiae]
  misc_feature (1)..(223): Homolog of NCBI NO: 34897436 NR Description: putative NLI-interacting factor
  misc_feature (1)..(239): Homolog of NCBI NO: 15239800 NR Description: expressed protein [Arabidopsis thaliana]
MEDEEDEELDEFDPYLFIKNLPNLSSVVPTFRPVLLPKQTRSCPPISLVLDLDETLVHSTLEPCGEVDFTFPVNFNEEEHMVYVRCRPHLKEFMERVSRLFEIIIFTASQSIYAEQLLNVLDPKRKLFRHRVYRDSCVFFDGNYLKDLSVLGRDLSRVIIVDNSPQAFGFQVENGVPIESWFNDPSDKELLHLLPFLESLIGVEDVRPMIAKKFNLREKIDAAVAAPEYPAEAGDPFER

SEQ ID NO: 21989 - DNA, 1415 bp, Arabidopsis thaliana
  misc_feature (1)..(1415): Ceres Seq. ID no. 12396260
  misc_feature: MA Experiment ID: 108462 Result: Up-regulated in Transcription
  misc_feature: MA Experiment 108462 PARAMETER Experiment Name: At_Germinating_Seeds_cDNA_P Parameter: Age (day) Value: 2 vs. 0
  misc_feature: MA Experiment 108462 PARAMETER Experiment Name: At_Germinating_Seeds_cDNA_P Parameter: Tissue Value: Germinating Seeds
  misc_feature: MA Experiment ID: 108463 Result: Up-regulated in Transcription
  misc_feature: MA Experiment 108463 PARAMETER Experiment Name: At_Germinating_Seeds_cDNA_P Parameter: Age (day) Value: 3 vs. 0
  misc_feature: MA Experiment 108463 PARAMETER Experiment Name: At_Germinating_Seeds_cDNA_P Parameter: Tissue Value: Germinating Seeds
  misc_feature: MA Experiment ID: 108464 Result: Up-regulated in Transcription
  misc_feature: MA Experiment 108464 PARAMETER Experiment Name: At_Germinating_Seeds_cDNA_P Parameter: Age (day) Value: 4 vs. 0
  misc_feature: MA Experiment 108464 PARAMETER Experiment Name: At_Germinating_Seeds_cDNA_P Parameter: Tissue Value: Germinating Seeds
  misc_feature: MA Experiment ID: 108473 Result: Up-regulated in Transcription
  misc_feature: MA Experiment 108473 PARAMETER Experiment Name: At_Drought_Flowers_cDNA_P Parameter: Timepoint (hr) Value: 7 d
  misc_feature: MA Experiment 108473 PARAMETER Experiment Name: At_Drought_Flowers_cDNA_P Parameter: Tissue Value: Flower
  misc_feature: MA Experiment 108473 PARAMETER Experiment Name: At_Drought_Flowers_cDNA_P Parameter: Treatment Value: Drought vs. No Drought
  misc_feature: MA Experiment ID: 108501 Result: Down-regulated in Transcription
  misc_feature: MA Experiment 108501 PARAMETER Experiment Name: At_ap2_floral_buds_cDNA_P Parameter: Plant Line Value: ap2 (Ler.)
  misc_feature: MA Experiment 108501 PARAMETER Experiment Name: At_ap2_floral_buds_cDNA_P Parameter: Tissue Value: Closed Flower
  misc_feature: MA Experiment ID: 108572 Result: Up-regulated in Transcription
  misc_feature: MA Experiment 108572 PARAMETER Experiment Name: At_Drought_cDNA_P Parameter: Timepoint (hr) Value: 1
  misc_feature: MA Experiment 108572 PARAMETER Experiment Name: At_Drought_cDNA_P Parameter: Tissue Value: Aerial
  misc_feature: MA Experiment 108572 PARAMETER Experiment Name: At_Drought_cDNA_P Parameter: Treatment Value: Drought vs. No Drought
  misc_feature: MA Experiment ID: 108573 Result: Up-regulated in Transcription
  misc_feature: MA Experiment 108573 PARAMETER Experiment Name: At_Drought_cDNA_P Parameter: Timepoint (hr) Value: 6
  misc_feature: MA Experiment 108573 PARAMETER Experiment Name: At_Drought_cDNA_P Parameter: Tissue Value: Aerial
  misc_feature: MA Experiment 108573 PARAMETER Experiment Name: At_Drought_cDNA_P Parameter: Treatment Value: Drought vs. No Drought
  misc_feature: MA Experiment ID: 108576 Result: Up-regulated in Transcription
  misc_feature: MA Experiment 108576 PARAMETER Experiment Name: At_42deg_Heat_cDNA_P Parameter: Temperature (deg C) Value: 42 vs. 22
  misc_feature: MA Experiment 108576 PARAMETER Experiment Name: At_42deg_Heat_cDNA_P Parameter: Timepoint (hr) Value: 1
  misc_feature: MA Experiment 108576 PARAMETER Experiment Name: At_42deg_Heat_cDNA_P Parameter: Tissue Value: Aerial
  misc_feature: MA Experiment ID: 108577 Result: Up-regulated in Transcription
  misc_feature: MA Experiment 108577 PARAMETER Experiment Name: At_42deg_Heat_cDNA_P Parameter: Temperature (deg C) Value: 42 vs. 22
  misc_feature: MA Experiment 108577 PARAMETER Experiment Name: At_42deg_Heat_cDNA_P Parameter: Timepoint (hr) Value: 6
  misc_feature: MA Experiment 108577 PARAMETER Experiment Name: At_42deg_Heat_cDNA_P Parameter: Tissue Value: Aerial
  misc_feature: MA Experiment ID: 108585 Result: Up-regulated in Transcription
  misc_feature: MA Experiment 108585 PARAMETER Experiment Name: At_5mM_NaNP_cDNA_P Parameter: Timepoint (hr) Value: 6
  misc_feature: MA Experiment 108585 PARAMETER Experiment Name: At_5mM_NaNP_cDNA_P Parameter: Tissue Value: Aerial
  misc_feature: MA Experiment 108585 PARAMETER Experiment Name: At_5mM_NaNP_cDNA_P Parameter: Treatment Value: null
  misc_feature: MA Experiment ID: 108595 Result: Down-regulated in Transcription
  misc_feature: MA Experiment 108595 PARAMETER Experiment Name: At_Ler-pi_Ovule_cDNA_P Parameter: Plant Line Value: null
  misc_feature: MA Experiment ID: 20000069 Result: Down-regulated in Transcription
  misc_feature: MA Experiment 20000069 PARAMETER Experiment Name: At_100uM_ABA_Mutants_cDNA_P Parameter: Plant Line Value: CS23
  misc_feature: MA Experiment 20000069 PARAMETER Experiment Name: At_100uM_ABA_Mutants_cDNA_P Parameter: Timepoint (hr) Value: 6
  misc_feature: MA Experiment 20000069 PARAMETER Experiment Name: At_100uM_ABA_Mutants_cDNA_P Parameter: Tissue Value: Aerial
  misc_feature: MA Experiment 20000069 PARAMETER Experiment Name: At_100uM_ABA_Mutants_cDNA_P Parameter: Treatment Value: 100uM ABA vs. No Treatment
  misc_feature: MA Experiment ID: 20000086 Result: Down-regulated in Transcription
  misc_feature: MA Experiment 20000086 PARAMETER Experiment Name: At_100uM_ABA_Mutants_cDNA_P Parameter: Plant Line Value: CS22
  misc_feature: MA Experiment 20000086 PARAMETER Experiment Name: At_100uM_ABA_Mutants_cDNA_P Parameter: Timepoint (hr) Value: 6
  misc_feature: MA Experiment 20000086 PARAMETER Experiment Name: At_100uM_ABA_Mutants_cDNA_P Parameter: Tissue Value: Aerial
  misc_feature: MA Experiment 20000086 PARAMETER Experiment Name: At_100uM_ABA_Mutants_cDNA_P Parameter: Treatment Value: 100uM ABA vs. No Treatment
  misc_feature: MA Experiment ID: 20000087 Result: Down-regulated in Transcription
  misc_feature: MA Experiment 20000087 PARAMETER Experiment Name: At_100uM_ABA_Mutants_cDNA_P Parameter: Plant Line Value: WS
  misc_feature: MA Experiment 20000087 PARAMETER Experiment Name: At_100uM_ABA_Mutants_cDNA_P Parameter: Timepoint (hr) Value: 6
  misc_feature: MA Experiment 20000087 PARAMETER Experiment Name: At_100uM_ABA_Mutants_cDNA_P Parameter: Tissue Value: Aerial
  misc_feature: MA Experiment 20000087 PARAMETER Experiment Name: At_100uM_ABA_Mutants_cDNA_P Parameter: Treatment Value: 100uM ABA vs. No Treatment
  misc_feature: MA Experiment ID: 20000089 Result: Down-regulated in Transcription
  misc_feature: MA Experiment ID: 20000090 Result: Down-regulated in Transcription
  misc_feature: MA Experiment ID: 20000093 Result: Up-regulated in Transcription
  misc_feature: MA Experiment 20000093 PARAMETER Experiment Name: At_42deg_Heat_cDNA_P Parameter: Temperature (deg C) Value: 42 vs. 22
  misc_feature: MA Experiment 20000093 PARAMETER Experiment Name: At_42deg_Heat_cDNA_P Parameter: Timepoint (hr) Value: 0.5
  misc_feature: MA Experiment 20000093 PARAMETER Experiment Name: At_42deg_Heat_cDNA_P Parameter: Tissue Value: Aerial
  misc_feature: MA Experiment ID: 20000111 Result: Up-regulated in Transcription
  misc_feature: MA Experiment 20000111 PARAMETER Experiment Name: At_42deg_Heat_cDNA_P Parameter: Temperature (deg C) Value: 42 vs. 22
  misc_feature: MA Experiment 20000111 PARAMETER Experiment Name: At_42deg_Heat_cDNA_P Parameter: Timepoint (hr) Value: 6
  misc_feature: MA Experiment 20000111 PARAMETER Experiment Name: At_42deg_Heat_cDNA_P Parameter: Tissue Value: Aerial
  misc_feature: MA Experiment ID: 20000112 Result: Up-regulated in Transcription
  misc_feature: MA Experiment 20000112 PARAMETER Experiment Name: At_42deg_Heat_cDNA_P Parameter: Temperature (deg C) Value: 42 vs. 22
  misc_feature: MA Experiment 20000112 PARAMETER Experiment Name: At_42deg_Heat_cDNA_P Parameter: Timepoint (hr) Value: 2
  misc_feature: MA Experiment 20000112 PARAMETER Experiment Name: At_42deg_Heat_cDNA_P Parameter: Tissue Value: Aerial
  misc_feature: MA Experiment ID: 20000113 Result: Up-regulated in Transcription
  misc_feature: MA Experiment 20000113 PARAMETER Experiment Name: At_42deg_Heat_cDNA_P Parameter: Temperature (deg C) Value: 42 vs. 22
  misc_feature: MA Experiment 20000113 PARAMETER Experiment Name: At_42deg_Heat_cDNA_P Parameter: Timepoint (hr) Value: 8
  misc_feature: MA Experiment 20000113 PARAMETER Experiment Name: At_42deg_Heat_cDNA_P Parameter: Tissue Value: Aerial
  misc_feature: MA Experiment ID: 20000117 Result: Down-regulated in Transcription
  misc_feature: MA Experiment 20000117 PARAMETER Experiment Name: At_100uM_ABA_Mutants_cDNA_P Parameter: Plant Line Value: Columbia
  misc_feature: MA Experiment 20000117 PARAMETER Experiment Name: At_100uM_ABA_Mutants_cDNA_P Parameter: Timepoint (hr) Value: 6
  misc_feature: MA Experiment 20000117 PARAMETER Experiment Name: At_100uM_ABA_Mutants_cDNA_P Parameter: Tissue Value: Aerial
  misc_feature: MA Experiment 20000117 PARAMETER Experiment Name: At_100uM_ABA_Mutants_cDNA_P Parameter: Treatment Value: 100uM ABA vs. No Treatment
  misc_feature: MA Experiment ID: 20000171 Result: Up-regulated in Transcription
  misc_feature: MA Experiment 20000171 PARAMETER Experiment Name: At_42deg_Heat_P Parameter: Age (day) Value: 14
  misc_feature: MA Experiment 20000171 PARAMETER Experiment Name: At_42deg_Heat_P Parameter: Organism Value: A. thaliana
  misc_feature: MA Experiment 20000171 PARAMETER Experiment Name: At_42deg_Heat_P Parameter: Plant Line Value: WS
  misc_feature: MA Experiment 20000171 PARAMETER Experiment Name: At_42deg_Heat_P Parameter: Temperature (deg C) Value: 42 vs. 22
  misc_feature: MA Experiment 20000171 PARAMETER Experiment Name: At_42deg_Heat_P Parameter: Timepoint (hr) Value: 1
  misc_feature: MA Experiment 20000171 PARAMETER Experiment Name: At_42deg_Heat_P Parameter: Tissue Value: Aerial
  misc_feature: MA Experiment ID: 20000173 Result: Up-regulated in Transcription
  misc_feature: MA Experiment 20000173 PARAMETER Experiment Name: At_42deg_Heat_P Parameter: Age (day) Value: 14
  misc_feature: MA Experiment 20000173 PARAMETER Experiment Name: At_42deg_Heat_P Parameter: Organism Value: A. thaliana
  misc_feature: MA Experiment 20000173 PARAMETER Experiment Name: At_42deg_Heat_P Parameter: Plant Line Value: WS
  misc_feature: MA Experiment 20000173 PARAMETER Experiment Name: At_42deg_Heat_P Parameter: Temperature (deg C) Value: 42 vs. 22
  misc_feature: MA Experiment 20000173 PARAMETER Experiment Name: At_42deg_Heat_P Parameter: Timepoint (hr) Value: 6
  misc_feature: MA Experiment 20000173 PARAMETER Experiment Name: At_42deg_Heat_P Parameter: Tissue Value: Aerial
  misc_feature: MA Experiment ID: 20000227 Result: Down-regulated in Transcription
  misc_feature: MA Experiment 20000227 PARAMETER Experiment Name: At_Root-Tips-vs-Tops_P Parameter: Tissue Value: Root Tips vs. Root Tops
  misc_feature: MA Experiment ID: 20000234 Result: Down-regulated in Transcription
  misc_feature: MA Experiment 20000234 PARAMETER Experiment Name: At_Siliques_P Parameter: Age (day) Value: 21
  misc_feature: MA Experiment 20000234 PARAMETER Experiment Name: At_Siliques_P Parameter: Organism Value: A. thaliana
  misc_feature: MA Experiment 20000234 PARAMETER Experiment Name: At_Siliques_P Parameter: Plant Line Value: WS
  misc_feature: MA Experiment 20000234 PARAMETER Experiment Name: At_Siliques_P Parameter: Tissue Value: Less Than 5mm Siliques vs. Whole Plant
  misc_feature: MA Experiment ID: 20000264 Result: Down-regulated in Transcription
  misc_feature: MA Experiment 20000264 PARAMETER Experiment Name: At_Open_Flower_P Parameter: Age (day) Value: 21
  misc_feature: MA Experiment 20000264 PARAMETER Experiment Name: At_Open_Flower_P Parameter: Plant Line Value: WS
  misc_feature: MA Experiment 20000264 PARAMETER Experiment Name: At_Open_Flower_P Parameter: Tissue Value: Open Flower vs. Whole Plant
  misc_feature: MA Experiment ID: 20000436 Result: Up-regulated in Transcription
  misc_feature: MA Experiment 20000436 PARAMETER Experiment Name: At_Drought_P Parameter: Age (day) Value: 7
  misc_feature: MA Experiment 20000436 PARAMETER Experiment Name: At_Drought_P Parameter: Organism Value: A. thaliana
  misc_feature: MA Experiment 20000436 PARAMETER Experiment Name: At_Drought_P Parameter: Plant Line Value: WS
  misc_feature: MA Experiment 20000436 PARAMETER Experiment Name: At_Drought_P Parameter: Timepoint (hr) Value: 12
  misc_feature: MA Experiment 20000436 PARAMETER Experiment Name: At_Drought_P Parameter: Tissue Value: Whole Plant
  misc_feature: MA Experiment 20000436 PARAMETER Experiment Name: At_Drought_P Parameter: Treatment Value: Drought vs. No Drought
  misc_feature: MA Experiment ID: 20000437 Result: Up-regulated in Transcription
  misc_feature: MA Experiment 20000437 PARAMETER Experiment Name: At_Drought_P Parameter: Age (day) Value: 8
  misc_feature: MA Experiment 20000437 PARAMETER Experiment Name: At_Drought_P Parameter: Organism Value: A. thaliana
  misc_feature: MA Experiment 20000437 PARAMETER Experiment Name: At_Drought_P Parameter: Plant Line Value: WS
  misc_feature: MA Experiment 20000437 PARAMETER Experiment Name: At_Drought_P Parameter: Timepoint (hr) Value: 24
  misc_feature: MA Experiment 20000437 PARAMETER Experiment Name: At_Drought_P Parameter: Tissue Value: Whole Plant
  misc_feature: MA Experiment 20000437 PARAMETER Experiment Name: At_Drought_P Parameter: Treatment Value: Drought vs. No Drought
  misc_feature: MA Experiment ID: 20001248 Result: Up-regulated in Transcription
  misc_feature: MA Experiment 20001248 PARAMETER Experiment Name: At_Far-red-induction_P Parameter: Age (day) Value: 7
  misc_feature: MA Experiment 20001248 PARAMETER Experiment Name: At_Far-red-induction_P Parameter: Light Value: Far-red vs. White
  misc_feature: MA Experiment 20001248 PARAMETER Experiment Name: At_Far-red-induction_P Parameter: Organism Value: A. thaliana
  misc_feature: MA Experiment 20001248 PARAMETER Experiment Name: At_Far-red-induction_P Parameter: Plant Line Value: Columbia
  misc_feature: MA Experiment 20001248 PARAMETER Experiment Name: At_Far-red-induction_P Parameter: Timepoint (hr) Value: 4
  misc_feature: MA Experiment 20001248 PARAMETER Experiment Name: At_Far-red-induction_P Parameter: Tissue Value: Whole Plant
  misc_feature: MA Experiment ID: 20001450 Result: Up-regulated in Transcription
  misc_feature: MA Experiment 20001450 PARAMETER Experiment Name: At_Far-red-induction_P Parameter: Age (day) Value: 7
  misc_feature: MA Experiment 20001450 PARAMETER Experiment Name: At_Far-red-induction_P Parameter: Light Value: Far-red vs. White
  misc_feature: MA Experiment 20001450 PARAMETER Experiment Name: At_Far-red-induction_P Parameter: Organism Value: A. thaliana
  misc_feature: MA Experiment 20001450 PARAMETER Experiment Name: At_Far-red-induction_P Parameter: Plant Line Value: Columbia
  misc_feature: MA Experiment 20001450 PARAMETER Experiment Name: At_Far-red-induction_P Parameter: Timepoint (hr) Value: 8
  misc_feature: MA Experiment 20001450 PARAMETER Experiment Name: At_Far-red-induction_P Parameter: Tissue Value: Whole Plant
  misc_feature: MA Experiment ID: 20001451 Result: Up-regulated in Transcription
  misc_feature: MA Experiment 20001451 PARAMETER Experiment Name: At_Far-red-induction_P Parameter: Age (day) Value: 7
  misc_feature: MA Experiment 20001451 PARAMETER Experiment Name: At_Far-red-induction_P Parameter: Light Value: Far-red vs. White
  misc_feature: MA Experiment 20001451 PARAMETER Experiment Name: At_Far-red-induction_P Parameter: Organism Value: A. thaliana
  misc_feature: MA Experiment 20001451 PARAMETER Experiment Name: At_Far-red-induction_P Parameter: Plant Line Value: Columbia
  misc_feature: MA Experiment 20001451 PARAMETER Experiment Name: At_Far-red-induction_P Parameter: Timepoint (hr) Value: 24
  misc_feature: MA Experiment 20001451 PARAMETER Experiment Name: At_Far-red-induction_P Parameter: Tissue Value: Whole Plant
  misc_feature: MA Experiment ID: 20001557 Result: Down-regulated in Transcription
  misc_feature: MA Experiment 20001557 PARAMETER Experiment Name: At_Drought_Soil_Dry_P Parameter: Age (day) Value: 27
  misc_feature: MA Experiment 20001557 PARAMETER Experiment Name: At_Drought_Soil_Dry_P Parameter: Organism Value: A. thaliana
  misc_feature: MA Experiment 20001557 PARAMETER Experiment Name: At_Drought_Soil_Dry_P Parameter: Plant Line Value: WS
  misc_feature: MA Experiment 20001557 PARAMETER Experiment Name: At_Drought_Soil_Dry_P Parameter: Post Timepoint (hr) Value: 3
  misc_feature: MA Experiment 20001557 PARAMETER Experiment Name: At_Drought_Soil_Dry_P Parameter: Post-Treatment Value: Re-Water vs. No Drought
  misc_feature: MA Experiment 20001557 PARAMETER Experiment Name: At_Drought_Soil_Dry_P Parameter: Timepoint (day) Value: 13
  misc_feature: MA Experiment 20001557 PARAMETER Experiment Name: At_Drought_Soil_Dry_P Parameter: Treatment Value: Drought vs. No Drought
  misc_feature: MA Experiment ID: 20001560 Result: Down-regulated in Transcription
  misc_feature: MA Experiment 20001560 PARAMETER Experiment Name: At_Drought_Soil_Dry_P Parameter: Age (day) Value: 28
  misc_feature: MA Experiment 20001560 PARAMETER Experiment Name: At_Drought_Soil_Dry_P Parameter: Organism Value: A. thaliana
  misc_feature: MA Experiment 20001560 PARAMETER Experiment Name: At_Drought_Soil_Dry_P Parameter: Plant Line Value: WS
  misc_feature: MA Experiment 20001560 PARAMETER Experiment Name: At_Drought_Soil_Dry_P Parameter: Post Timepoint (hr) Value: None
  misc_feature: MA Experiment 20001560 PARAMETER Experiment Name: At_Drought_Soil_Dry_P Parameter: Post-Treatment Value: None
  misc_feature: MA Experiment 20001560 PARAMETER Experiment Name: At_Drought_Soil_Dry_P Parameter: Timepoint (day) Value: 14
  misc_feature: MA Experiment 20001560 PARAMETER Experiment Name: At_Drought_Soil_Dry_P Parameter: Treatment Value: Drought vs. No Drought
  misc_feature: MA Experiment ID: 20001757 Result: Up-regulated in Transcription
  misc_feature: MA Experiment 20001757 PARAMETER Experiment Name: At_50mM_NH4NO3_L-to-H_P Parameter: Timepoint (hr) Value: 6
  misc_feature: MA Experiment 20001757 PARAMETER Experiment Name: At_50mM_NH4NO3_L-to-H_P Parameter: Tissue Value: Leaf
  misc_feature: MA Experiment 20001757 PARAMETER Experiment Name: At_50mM_NH4NO3_L-to-H_P Parameter: Treatment Value: 50mM NH4NO3 vs 100mM Mannitol
  misc_feature: MA Experiment ID: 20001905 Result: Up-regulated in Transcription
  misc_feature: MA Experiment 20001905 PARAMETER Experiment Name: At_Drought_Reproduction_P Parameter: Age (day) Value: 40
  misc_feature: MA Experiment 20001905 PARAMETER Experiment Name: At_Drought_Reproduction_P Parameter: Organism Value: A. thaliana
  misc_feature: MA Experiment 20001905 PARAMETER Experiment Name: At_Drought_Reproduction_P Parameter: Plant Line Value: WS
  misc_feature: MA Experiment 20001905 PARAMETER Experiment Name: At_Drought_Reproduction_P Parameter: Timepoint (day) Value: 10
  misc_feature: MA Experiment 20001905 PARAMETER Experiment Name: At_Drought_Reproduction_P Parameter: Tissue Value: Rosettes
  misc_feature: MA Experiment 20001905 PARAMETER Experiment Name: At_Drought_Reproduction_P Parameter: Treatment Value: Drought vs. No Drought
  misc_feature: MA Experiment ID: 20001911 Result: Up-regulated in Transcription
  misc_feature: MA Experiment 20001911 PARAMETER Experiment Name: At_Drought_Reproduction_P Parameter: Age (day) Value: 40
  misc_feature: MA Experiment 20001911 PARAMETER Experiment Name: At_Drought_Reproduction_P Parameter: Organism Value: A. thaliana
  misc_feature: MA Experiment 20001911 PARAMETER Experiment Name: At_Drought_Reproduction_P Parameter: Plant Line Value: WS
  misc_feature: MA Experiment 20001911 PARAMETER Experiment Name: At_Drought_Reproduction_P Parameter: Timepoint (day) Value: 10
  misc_feature: MA Experiment 20001911 PARAMETER Experiment Name: At_Drought_Reproduction_P Parameter: Tissue Value: Flowers
  misc_feature: MA Experiment 20001911 PARAMETER Experiment Name: At_Drought_Reproduction_P Parameter: Treatment Value: Drought vs. No Drought
gattataaattttctcgtgaagctaatttttcctgagaaagaaagcgaaacttcgctggcgactaaagattgctgagaagacacgtcgtctctgtgagaactttttctttttcttctggtatattctggagacagatattgttttttcttctgattagagaataatatgacggaagtgattagcaaaacgagtttgttcttaggagcttgtggtaatcatcaccgtgttgatgatttctctttctctccggtgagttttggtgggtttggtttgaaaaagagtttctcttgtctgaagcttaagagtcagaagcctcttagaagtgtattttacggaaaacagatcgttttcggagattctcaagacgagagcttcagaagatcatcagctatcacagctcagacaactttgaggattgggacagctcagaagtggtgggagaaaggtctgaaagataacatgagagagatctcttcagctcaagagctcgttgattctcttactaacgctggtgataagcttgttgttgttgatttcttctcacctggctgtggtggctgcaaggctctccatcctaagatatgtcagtttgcagagatgaacccggatgtgcagtttcttcaggtgaattacgaggagcataagtccatgtgttatagtcttggtgtccatgttctcccttttttccgattctaccgtggctctcagggtcgtgtttgcagctttagctgtaccaatgccacgatcaagaaattcagagatgccttggcaaagcatggtccagataggtgcagcctcggaccgaccaaaggccttgaagagaaagagcttgtggcacttgcagccaacaaagaactcaactttacttacacaccaaagcctgtaccagttgagaaagaagcagccactcctgattcaaacccaagtctccctgttcctcttccttcgatgagctccaatgacgaaaaaacattggtctccgcagggagatgagactgaataaacatttccctgtatagtttgcgtgatagtagtagtagcagcagctggatatattgcagtacctaaagatgtcagttctcggagcagccagccggtttagtggggtttagttttttttcgggtcccctgagcaaaatcggttcttggcctctgggtttacctagagcaaaaccagttccgatggttacttgagttttgctcagttcttatgggattggagtggaaggtcgtgcgctcggcagcatggaagctttctcctttcaatcagcttcagtagagttttggtttctttgtttgttttttatttgctttaagaatttaatgtaaataaaaatccaatgaggattatcatacaatgtcatgaaggatctatgaattagtatctaatgttagtatatattatggtttttcc

SEQ ID NO: 21990 - protein, 275 aa, Arabidopsis thaliana
  peptide (1)..(275): Ceres Seq. ID no. 12396261
  misc_feature (69)..(204): Homolog of NCBI NO: 4973258 NR Description: thioredoxin-like 2 [Arabidopsis thaliana]
  misc_feature (69)..(204): Homolog of NCBI NO: 21553512 NR Description: putative thioredoxin [Arabidopsis thaliana]
  misc_feature (89)..(228): Homolog of NCBI NO: 21554313 NR Description: thioredoxin-like protein [Arabidopsis thaliana]
  misc_feature (89)..(228): Homolog of NCBI NO: 18417441 NR Description: Thioredoxin - like protein
  misc_feature (73)..(235): Homolog of NCBI NO: 19071639 NR Description: putative thioredoxin [Oryza sativa (japonica
  misc_feature (40)..(231): Homolog of NCBI NO: 15240254 NR Description: thioredoxin-like 3
  misc_feature (31)..(237): Homolog of NCBI NO: 15225825 NR Description: putative thioredoxin; protein id: At2g33270.1
  misc_feature (71)..(275): Homolog of NCBI NO: 34394520 NR Description: putative thioredoxin [Oryza sativa (japonica
  misc_feature (41)..(275): Homolog of NCBI NO: 308906 NR Description: thioredoxin
  misc_feature (1)..(275): Homolog of NCBI NO: 15223262 NR Description: putative thioredoxin
MTEVISKTSLFLGACGNHHRVDDFSFSPVSFGGFGLKKSFSCLKLKSQKPLRSVFYGKQIVFGDSQDESFRRSSAITAQTTLRIGTAQKWWEKGLKDNMREISSAQELVDSLTNAGDKLVVVDFFSPGCGGCKALHPKICQFAEMNPDVQFLQVNYEEHKSMCYSLGVHVLPFFRFYRGSQGRVCSFSCTNATIKKFRDALAKHGPDRCSLGPTKGLEEKELVALAANKELNFTYTPKPVPVEKEAATPDSNPSLPVPLPSMSSNDEKTLVSAGR

SEQ ID NO: 21991 - protein, 177 aa, Arabidopsis thaliana
  peptide (1)..(177): Ceres Seq. ID no. 12396262
  misc_feature (1)..(106): Homolog of NCBI NO: 4973258 NR Description: thioredoxin-like 2 [Arabidopsis thaliana]
  misc_feature (1)..(106): Homolog of NCBI NO: 21553512 NR Description: putative thioredoxin [Arabidopsis thaliana]
  misc_feature (1)..(130): Homolog of NCBI NO: 21554313 NR Description: thioredoxin-like protein [Arabidopsis thaliana]
  misc_feature (1)..(130): Homolog of NCBI NO: 18417441 NR Description: Thioredoxin - like protein
  misc_feature (1)..(137): Homolog of NCBI NO: 19071639 NR Description: putative thioredoxin [Oryza sativa (japonica
  misc_feature (1)..(133): Homolog of NCBI NO: 15240254 NR Description: thioredoxin-like 3
  misc_feature (1)..(139): Homolog of NCBI NO: 15225825 NR Description: putative thioredoxin; protein id: At2g33270.1
  misc_feature (1)..(177): Homolog of NCBI NO: 34394520 NR Description: putative thioredoxin [Oryza sativa (japonica
  misc_feature (1)..(177): Homolog of NCBI NO: 308906 NR Description: thioredoxin
  misc_feature (1)..(177): Homolog of NCBI NO: 15223262 NR Description: putative thioredoxin
MREISSAQELVDSLTNAGDKLVVVDFFSPGCGGCKALHPKICQFAEMNPDVQFLQVNYEEHKSMCYSLGVHVLPFFRFYRGSQGRVCSFSCTNATIKKFRDALAKHGPDRCSLGPTKGLEEKELVALAANKELNFTYTPKPVPVEKEAATPDSNPSLPVPLPSMSSNDEKTLVSAGR

SEQ ID NO: 21992 - DNA, 1179 bp, Arabidopsis thaliana
  misc_feature (1)..(1179): Ceres Seq. ID no. 12579429
  misc_feature: MA Experiment ID: 108434 Result: Down-regulated in Transcription
  misc_feature: MA Experiment 108434 PARAMETER Experiment Name: At_Root_Tips_cDNA_P Parameter: Tissue Value: Root Tips
  misc_feature: MA Experiment ID: 108462 Result: Up-regulated in Transcription
  misc_feature: MA Experiment 108462 PARAMETER Experiment Name: At_Germinating_Seeds_cDNA_P Parameter: Age (day) Value: 2 vs. 0
  misc_feature: MA Experiment 108462 PARAMETER Experiment Name: At_Germinating_Seeds_cDNA_P Parameter: Tissue Value: Germinating Seeds
  misc_feature: MA Experiment ID: 108463 Result: Up-regulated in Transcription
  misc_feature: MA Experiment 108463 PARAMETER Experiment Name: At_Germinating_Seeds_cDNA_P Parameter: Age (day) Value: 3 vs. 0
  misc_feature: MA Experiment 108463 PARAMETER Experiment Name: At_Germinating_Seeds_cDNA_P Parameter: Tissue Value: Germinating Seeds
  misc_feature: MA Experiment ID: 108464 Result: Up-regulated in Transcription
  misc_feature: MA Experiment 108464 PARAMETER Experiment Name: At_Germinating_Seeds_cDNA_P Parameter: Age (day) Value: 4 vs. 0
  misc_feature: MA Experiment 108464 PARAMETER Experiment Name: At_Germinating_Seeds_cDNA_P Parameter: Tissue Value: Germinating Seeds
  misc_feature: MA Experiment ID: 108473 Result: Up-regulated in Transcription
  misc_feature: MA Experiment 108473 PARAMETER Experiment Name: At_Drought_Flowers_cDNA_P Parameter: Timepoint (hr) Value: 7 d
  misc_feature: MA Experiment 108473 PARAMETER Experiment Name: At_Drought_Flowers_cDNA_P Parameter: Tissue Value: Flower
  misc_feature: MA Experiment 108473 PARAMETER Experiment Name: At_Drought_Flowers_cDNA_P Parameter: Treatment Value: Drought vs. No Drought
  misc_feature: MA Experiment ID: 108488 Result: Down-regulated in Transcription
  misc_feature: MA Experiment ID: 108609 Result: Up-regulated in Transcription
  misc_feature: MA Experiment 108609 PARAMETER Experiment Name: At_100uM_ABA_cDNA_P Parameter: Timepoint (hr) Value: 24
  misc_feature: MA Experiment 108609 PARAMETER Experiment Name: At_100uM_ABA_cDNA_P Parameter: Tissue Value: Aerial
  misc_feature: MA Experiment 108609 PARAMETER Experiment Name: At_100uM_ABA_cDNA_P Parameter: Treatment Value: 100uM ABA vs. No Treatment
  misc_feature: MA Experiment ID: 20000144 Result: Up-regulated in Transcription
  misc_feature: MA Experiment 20000144 PARAMETER Experiment Name: At_42deg_Heat_cDNA_P Parameter: Temperature (deg C) Value: 42 vs. 22
  misc_feature: MA Experiment 20000144 PARAMETER Experiment Name: At_42deg_Heat_cDNA_P Parameter: Timepoint (hr) Value: 1
  misc_feature: MA Experiment 20000144 PARAMETER Experiment Name: At_42deg_Heat_cDNA_P Parameter: Tissue Value: Aerial
  misc_feature: MA Experiment ID: 20000171 Result: Up-regulated in Transcription
  misc_feature: MA Experiment 20000171 PARAMETER Experiment Name: At_42deg_Heat_P Parameter: Age (day) Value: 14
  misc_feature: MA Experiment 20000171 PARAMETER Experiment Name: At_42deg_Heat_P Parameter: Organism Value: A. thaliana
  misc_feature: MA Experiment 20000171 PARAMETER Experiment Name: At_42deg_Heat_P Parameter: Plant Line Value: WS
  misc_feature: MA Experiment 20000171 PARAMETER Experiment Name: At_42deg_Heat_P Parameter: Temperature (deg C) Value: 42 vs. 22
  misc_feature: MA Experiment 20000171 PARAMETER Experiment Name: At_42deg_Heat_P Parameter: Timepoint (hr) Value: 1
  misc_feature: MA Experiment 20000171 PARAMETER Experiment Name: At_42deg_Heat_P Parameter: Tissue Value: Aerial
  misc_feature: MA Experiment ID: 20000185 Result: Up-regulated in Transcription
  misc_feature: MA Experiment 20000185 PARAMETER Experiment Name: At_Roots__P Parameter: Age (day) Value: 7 vs. 21
  misc_feature: MA Experiment 20000185 PARAMETER Experiment Name: At_Roots__P Parameter: Organism Value: A. thaliana
  misc_feature: MA Experiment 20000185 PARAMETER Experiment Name: At_Roots__P Parameter: Tissue Value: Roots vs. Whole Plant
  misc_feature: MA Experiment ID: 20000227 Result: Down-regulated in Transcription
  misc_feature: MA Experiment 20000227 PARAMETER Experiment Name: At_Root-Tips-vs-Tops_P Parameter: Tissue Value: Root Tips vs. Root Tops
  misc_feature: MA Experiment ID: 20000265 Result: Down-regulated in Transcription
  misc_feature: MA Experiment 20000265 PARAMETER Experiment Name: At_Open_Flower_P Parameter: Age (day) Value: 21
  misc_feature: MA Experiment 20000265 PARAMETER Experiment Name: At_Open_Flower_P Parameter: Plant Line Value: WS
  misc_feature: MA Experiment 20000265 PARAMETER Experiment Name: At_Open_Flower_P Parameter: Tissue Value: Closed Flower vs. Whole Plant
  misc_feature: MA Experiment ID: 20000439 Result: Up-regulated in Transcription
  misc_feature: MA Experiment 20000439 PARAMETER Experiment Name: At_Roots__P Parameter: Age (day) Value: 14 vs. 21
  misc_feature: MA Experiment 20000439 PARAMETER Experiment Name: At_Roots__P Parameter: Organism Value: A. thaliana
  misc_feature: MA Experiment 20000439 PARAMETER Experiment Name: At_Roots__P Parameter: Tissue Value: Roots vs. Whole Plant
  misc_feature: MA Experiment ID: 20000452 Result: Down-regulated in Transcription
  misc_feature: MA Experiment 20000452 PARAMETER Experiment Name: At_CS6879_Shoots-Roots_P Parameter: Age (day) Value: 14
  misc_feature: MA Experiment 20000452 PARAMETER Experiment Name: At_CS6879_Shoots-Roots_P Parameter: Organism Value: A. thaliana
  misc_feature: MA Experiment 20000452 PARAMETER Experiment Name: At_CS6879_Shoots-Roots_P Parameter: Plant Line Value: CS6879 vs. WS
  misc_feature: MA Experiment 20000452 PARAMETER Experiment Name: At_CS6879_Shoots-Roots_P Parameter: Tissue Value: Shoots
  misc_feature: MA Experiment ID: 20000495 Result: Up-regulated in Transcription
  misc_feature: MA Experiment 20000495 PARAMETER Experiment Name: At_Guard_Cells_P Parameter: Harvest Date Value: 8/2/2002
  misc_feature: MA Experiment 20000495 PARAMETER Experiment Name: At_Guard_Cells_P Parameter: Organism Value: A. thaliana
  misc_feature: MA Experiment 20000495 PARAMETER Experiment Name: At_Guard_Cells_P Parameter: Tissue Value: Guard Cells vs. Leaves
  misc_feature: MA Experiment ID: 20001247 Result: Up-regulated in Transcription
  misc_feature: MA Experiment 20001247 PARAMETER Experiment Name: At_Far-red-induction_P Parameter: Age (day) Value: 7
  misc_feature: MA Experiment 20001247 PARAMETER Experiment Name: At_Far-red-induction_P Parameter: Light Value: Far-red vs. White
  misc_feature: MA Experiment 20001247 PARAMETER Experiment Name: At_Far-red-induction_P Parameter: Organism Value: A. thaliana
  misc_feature: MA Experiment 20001247 PARAMETER Experiment Name: At_Far-red-induction_P Parameter: Plant Line Value: Columbia
  misc_feature: MA Experiment 20001247 PARAMETER Experiment Name: At_Far-red-induction_P Parameter: Timepoint (hr) Value: 1
  misc_feature: MA Experiment 20001247 PARAMETER Experiment Name: At_Far-red-induction_P Parameter: Tissue Value: Whole Plant
  misc_feature: MA Experiment ID: 20001558 Result: Up-regulated in Transcription
  misc_feature: MA Experiment 20001558 PARAMETER Experiment Name: At_Drought_Soil_Dry_P Parameter: Age (day) Value: 27
  misc_feature: MA Experiment 20001558 PARAMETER Experiment Name: At_Drought_Soil_Dry_P Parameter: Organism Value: A. thaliana
  misc_feature: MA Experiment 20001558 PARAMETER Experiment Name: At_Drought_Soil_Dry_P Parameter: Plant Line Value: WS
  misc_feature: MA Experiment 20001558 PARAMETER Experiment Name: At_Drought_Soil_Dry_P Parameter: Post Timepoint (hr) Value: 6
  misc_feature: MA Experiment 20001558 PARAMETER Experiment Name: At_Drought_Soil_Dry_P Parameter: Post-Treatment Value: Re-Water vs. No Drought
  misc_feature: MA Experiment 20001558 PARAMETER Experiment Name: At_Drought_Soil_Dry_P Parameter: Timepoint (day) Value: 13
  misc_feature: MA Experiment 20001558 PARAMETER Experiment Name: At_Drought_Soil_Dry_P Parameter: Treatment Value: Drought vs. No Drought
  misc_feature: MA Experiment ID: 20001560 Result: Up-regulated in Transcription
  misc_feature: MA Experiment 20001560 PARAMETER Experiment Name: At_Drought_Soil_Dry_P Parameter: Age (day) Value: 28
  misc_feature: MA Experiment 20001560 PARAMETER Experiment Name: At_Drought_Soil_Dry_P Parameter: Organism Value: A. thaliana
  misc_feature: MA Experiment 20001560 PARAMETER Experiment Name: At_Drought_Soil_Dry_P Parameter: Plant Line Value: WS
  misc_feature: MA Experiment 20001560 PARAMETER Experiment Name: At_Drought_Soil_Dry_P Parameter: Post Timepoint (hr) Value: None
  misc_feature: MA Experiment 20001560 PARAMETER Experiment Name: At_Drought_Soil_Dry_P Parameter: Post-Treatment Value: None
  misc_feature: MA Experiment 20001560 PARAMETER Experiment Name: At_Drought_Soil_Dry_P Parameter: Timepoint (day) Value: 14
  misc_feature: MA Experiment 20001560 PARAMETER Experiment Name: At_Drought_Soil_Dry_P Parameter: Treatment Value: Drought vs. No Drought
  misc_feature: MA Experiment ID: 20001757 Result: Down-regulated in Transcription
  misc_feature: MA Experiment 20001757 PARAMETER Experiment Name: At_50mM_NH4NO3_L-to-H_P Parameter: Timepoint (hr) Value: 6
  misc_feature: MA Experiment 20001757 PARAMETER Experiment Name: At_50mM_NH4NO3_L-to-H_P Parameter: Tissue Value: Leaf
  misc_feature: MA Experiment 20001757 PARAMETER Experiment Name: At_50mM_NH4NO3_L-to-H_P Parameter: Treatment Value: 50mM NH4NO3 vs 100mM Mannitol
atcttaattatactgatctttatcgttgactagatttaagaaacaaaataataagatggttagggcaaatatagtgagcatggttctgttgatgcatgccatcgttgggtttccttttcatgcgaggggattaagtatgacttactacatgatgagctgtcctttcgctgaacagattgtgaagaacagtgttaacaatgctcttcaagccgatcccactttagccgctggtcttatccgtatgttgttccacgactgtttcatcgagggatgtgatgcgtcaattctgctagattcaacgaaagacaacactgcggaaaaggattcgcctgcgaatctgagtctacgtggctacgagatcatcgatgatgcaaaggagaaaatcgagaatagatgtccaggagttgtatcatgcgcagatatagttgccatggctgctagagatgctgtcttttgggctggtggtccatattatgacataccgaaaggaaggtttgatggtaaaagatcaaagatagaagatacaagaaatctaccttcaccttttcttaatgcctctcaactcattcaaacttttggccaacgtggtttcactccacaagatgttgttgctctctctggagcacataccctaggagttgcacgatgctcctccttcaaggctagacttaccgtcccagactcttcattagactcgacttttgcaaacactctctctaaaacatgcagcgcgggtgacaatgcagagcaaccctttgatgctacgcgcaacgatttcgacaatgcttacttcaatgcgcttcagatgaaatcaggagtcctcttttcagaccaaactttattcaacacaccaaggaccaggaatcttgttaacggctatgcacttaaccaagccaagttcttctttgatttccaacaggccatgcgcaagatgagcaatcttgatgttaaacttggctctcaaggtgaagtccgtcaaaattgtcggagtattaattaggctagaccacatctacttacgatttttgtatttataataagttctctactcttgttatatgaagaatcatgaatcttctaggctactatgtaaaaattgtgtactctcgtaatatgcagttgtatacttattgcttgtgtggttcagatatccatcaaaaagtaatatactttggttgc

SEQ ID NO: 21993 - protein, 314 aa, Arabidopsis thaliana
  peptide (1)..(314): Ceres Seq. ID no. 12579430
  misc_feature (42)..(278): Pfam Name: Peroxidase Pfam Description: Peroxidase
  misc_feature (2)..(313): Homolog of NCBI NO: 15238309 NR Description: peroxidase, putative
  misc_feature (41)..(314): Homolog of NCBI NO: 2956707 NR Description: peroxidase [Spinacia oleracea]
  misc_feature (6)..(314): Homolog of NCBI NO: 15242213 NR Description: peroxidase, putative
  misc_feature (6)..(314): Homolog of NCBI NO: 7484677 NR Description: peroxidase (EC 1.11.1.7) prx11 precursor - spinach
  misc_feature (1)..(314): Homolog of NCBI NO: 26397921 NR Description: Peroxidase 47 precursor (Atperox P47) (ATP32)
  misc_feature (1)..(314): Homolog of NCBI NO: 18418208 NR Description: peroxidase, putative
MVRANIVSMVLLMHAIVGFPFHARGLSMTYYMMSCPFAEQIVKNSVNNALQADPTLAAGLIRMLFHDCFIEGCDASILLDSTKDNTAEKDSPANLSLRGYEIIDDAKEKIENRCPGVVSCADIVAMAARDAVFWAGGPYYDIPKGRFDGKRSKIEDTRNLPSPFLNASQLIQTFGQRGFTPQDVVALSGAHTLGVARCSSFKARLTVPDSSLDSTFANTLSKTCSAGDNAEQPFDATRNDFDNAYFNALQMKSGVLFSDQTLFNTPRTRNLVNGYALNQAKFFFDFQQAMRKMSNLDVKLGSQGEVRQNCRSIN

SEQ ID NO: 21994 - protein, 306 aa, Arabidopsis thaliana
  peptide (1)..(306): Ceres Seq. ID no. 12579431
  misc_feature (34)..(270): Pfam Name: Peroxidase Pfam Description: Peroxidase
  misc_feature (1)..(306): Homolog of NCBI NO: 18418208 NR Description: peroxidase, putative
  misc_feature (1)..(305): Homolog of NCBI NO: 15238309 NR Description: peroxidase, putative
  misc_feature (33)..(306): Homolog of NCBI NO: 2956707 NR Description: peroxidase [Spinacia oleracea]
  misc_feature (1)..(306): Homolog of NCBI NO: 15242213 NR Description: peroxidase, putative
  misc_feature (1)..(306): Homolog of NCBI NO: 7484677 NR Description: peroxidase (EC 1.11.1.7) prx11 precursor - spinach
  misc_feature (1)..(306): Homolog of NCBI NO: 26397921 NR Description: Peroxidase 47 precursor (Atperox P47) (ATP32)
MVLLMHAIVGFPFHARGLSMTYYMMSCPFAEQIVKNSVNNALQADPTLAAGLIRMLFHDCFIEGCDASILLDSTKDNTAEKDSPANLSLRGYEIIDDAKEKIENRCPGVVSCADIVAMAARDAVFWAGGPYYDIPKGRFDGKRSKIEDTRNLPSPFLNASQLIQTFGQRGFTPQDVVALSGAHTLGVARCSSFKARLTVPDSSLDSTFANTLSKTCSAGDNAEQPFDATRNDFDNAYFNALQMKSGVLFSDQTLFNTPRTRNLVNGYALNQAKFFFDFQQAMRKMSNLDVKLGSQGEVRQNCRSIN

SEQ ID NO: 21995 - protein, 302 aa, Arabidopsis thaliana
  peptide (1)..(302): Ceres Seq. ID no. 12579432
  misc_feature (30)..(266): Pfam Name: Peroxidase Pfam Description: Peroxidase
  misc_feature (1)..(301): Homolog of NCBI NO: 15238309 NR Description: peroxidase, putative
  misc_feature (29)..(302): Homolog of NCBI NO: 2956707 NR Description: peroxidase [Spinacia oleracea]
  misc_feature (1)..(302): Homolog of NCBI NO: 15242213 NR Description: peroxidase, putative
  misc_feature (1)..(302): Homolog of NCBI NO: 7484677 NR Description: peroxidase (EC 1.11.1.7) prx11 precursor - spinach
  misc_feature (1)..(302): Homolog of NCBI NO: 26397921 NR Description: Peroxidase 47 precursor (Atperox P47) (ATP32)
  misc_feature (1)..(302): Homolog of NCBI NO: 18418208 NR Description: peroxidase, putative
MHAIVGFPFHARGLSMTYYMMSCPFAEQIVKNSVNNALQADPTLAAGLIRMLFHDCFIEGCDASILLDSTKDNTAEKDSPANLSLRGYEIIDDAKEKIENRCPGVVSCADIVAMAARDAVFWAGGPYYDIPKGRFDGKRSKIEDTRNLPSPFLNASQLIQTFGQRGFTPQDVVALSGAHTLGVARCSSFKARLTVPDSSLDSTFANTLSKTCSAGDNAEQPFDATRNDFDNAYFNALQMKSGVLFSDQTLFNTPRTRNLVNGYALNQAKFFFDFQQAMRKMSNLDVKLGSQGEVRQNCRSIN

SEQ ID NO: 21996 - DNA, 1617 bp, Arabidopsis thaliana
  misc_feature (1)..(1617): Ceres Seq. ID no. 13486880
  misc_feature: MA Experiment ID: 20000113 Result: Down-regulated in Transcription
  misc_feature: MA Experiment 20000113 PARAMETER Experiment Name: At_42deg_Heat_cDNA_P Parameter: Temperature (deg C) Value: 42 vs. 22
  misc_feature: MA Experiment 20000113 PARAMETER Experiment Name: At_42deg_Heat_cDNA_P Parameter: Timepoint (hr) Value: 8
  misc_feature: MA Experiment 20000113 PARAMETER Experiment Name: At_42deg_Heat_cDNA_P Parameter: Tissue Value: Aerial
cacgcgtccggaaatttgttctgagctcaacgccatttttgacgatttcgaatctctgtcttctctgagttgttccaagtaatcggagggaactcgtaaagtggaagaataggagaaagagagaaggaagaagatttgtgaatagctcttgatctggtgaagaatggatgcaattagaaaacaagctagcaggttgagagaacaagttgcgagacagcagcaggctgtctttaagcaatttggaggagggggatatggctctggtttagctgatgaagcagaactcaatcagcatcagaagctagaaaagctttacatatccactcgtgctgctaagcattaccaaagagatattgttcgtggtgtggaaggttatatagttacagggtcaaaacaagttgaaataggtacgaaattgtctgaggatagcaggaaatatggttcagagaatacatgtacgaatggtaacgtattaacacgggctgcactgaactatgggcgtgctcgagcacaaatggagaaggaacgtggaaatatgttgaaggctcttggtacacaggttgctgagccattacgggcaatggttttgggagctccattggaggatgctagacatcttgctcaacgctatgacagaatgcgccaagaagctgaagctcaggctacagaagttgccagacgccaagcaaaggcgagagagtctcaaggtaatcctgacatcttgatgaaactggaatctgctgaagcaaaacttcacgacctaaaatcaaatatgacaatattggggaaagaagctgcttctgctttagcttccgttgaagatcaacaacagaaattgactcttgaacgacttctttcaatggttgaatctgaacgcgcctaccatcaaagagtcctccaaatacttgatcagctcgaaggagagatggtatctgagaggcaacgtatagaagctccctctactccctcaagcgcagacagtatgccgccacctccatcatatgaggaagctaatggagtgtttgcatctcagatgcatgacacgtcaacagatagcatgggttacttcttaggagaggtcttgttcccatatcacggtgtgacagatgtcgagctcagcttatcaactggtgaatacgttgttgttagaaaggttacaggcagtggatgggccgaaggtgaatgcaaaggcaaagctggttggttcccttatgggtacattgaaagacgggaacgagttcttgctagcaaagtgtccgaagttttctgagaatttgaaggtaacattatggttctttgttggttatggaattgagttgcttctgtagaagagttgtgtgttctgtagaagaaaaagaaagaaaagattcacgggctaaaacagaagtccatatgcatgaggatcagagttgatgcgggtttctgccatgttctgaatctaatagtgatgccacttgaacaagagttcagtttttaggtattatcttcatattggatttggatattttctttgtcatttgatgtaaacgccacatctctgtttatcttcgtatgtgaatacacttcttttcgggtcttatttgtgattttttgtctaaattactttcatttgatagc

SEQ ID NO: 21997 - protein, 368 aa, Arabidopsis thaliana
  peptide (1)..(368): Ceres Seq. ID no. 13486881
  misc_feature (302)..(356): Pfam Name: SH3 domain Pfam Description: SH3 domain
  misc_feature (140)..(368): Homolog of NCBI NO: 37535998 NR Description: unknown protein [Oryza sativa (japonica
  misc_feature (293)..(368): Homolog of NCBI NO: 7485521 NR Description: hypothetical protein F15J5.30 - Arabidopsis
  misc_feature (1)..(242): Homolog of NCBI NO: 7485521 NR Description: hypothetical protein F15J5.30 - Arabidopsis
  misc_feature (254)..(366): Homolog of NCBI NO: 15221714 NR Description: SH3 domain-containing protein 1 [Arabidopsis
  misc_feature (1)..(270): Homolog of NCBI NO: 15221714 NR Description: SH3 domain-containing protein 1 [Arabidopsis
  misc_feature (301)..(366): Homolog of NCBI NO: 34902022 NR Description: unknown protein [Oryza sativa (japonica
  misc_feature (1)..(282): Homolog of NCBI NO: 34902022 NR Description: unknown protein [Oryza sativa (japonica
  misc_feature (1)..(368): Homolog of NCBI NO: 38344978 NR Description: OSJNBa0011L07.8 [Oryza sativa (japonica
  misc_feature (1)..(368): Homolog of NCBI NO: 7487662 NR Description: hypothetical protein T4L20.240 - Arabidopsis
  misc_feature (1)..(368): Homolog of NCBI NO: 18418491 NR Description: SH3 domain-containing protein 2 [Arabidopsis
MDAIRKQASRLREQVARQQQAVFKQFGGGGYGSGLADEAELNQHQKLEKLYISTRAAKHYQRDIVRGVEGYIVTGSKQVEIGTKLSEDSRKYGSENTCTNGNVLTRAALNYGRARAQMEKERGNMLKALGTQVAEPLRAMVLGAPLEDARHLAQRYDRMRQEAEAQATEVARRQAKARESQGNPDILMKLESAEAKLHDLKSNMTILGKEAASALASVEDQQQKLTLERLLSMVESERAYHQRVLQILDQLEGEMVSERQRIEAPSTPSSADSMPPPPSYEEANGVFASQMHDTSTDSMGYFLGEVLFPYHGVTDVELSLSTGEYVVVRKVTGSGWAEGECKGKAGWFPYGYIERRERVLASKVSEVF

SEQ ID NO: 21998 - protein, 251 aa, Arabidopsis thaliana
  peptide (1)..(251): Ceres Seq. ID no. 13486882
  misc_feature (185)..(239): Pfam Name: SH3 domain Pfam Description: SH3 domain
  misc_feature (23)..(251): Homolog of NCBI NO: 37535998 NR Description: unknown protein [Oryza sativa (japonica
  misc_feature (176)..(251): Homolog of NCBI NO: 7485521 NR Description: hypothetical protein F15J5.30 - Arabidopsis
  misc_feature (1)..(125): Homolog of NCBI NO: 7485521 NR Description: hypothetical protein F15J5.30 - Arabidopsis
  misc_feature (137)..(249): Homolog of NCBI NO: 15221714 NR Description: SH3 domain-containing protein 1 [Arabidopsis
  misc_feature (1)..(153): Homolog of NCBI NO: 15221714 NR Description: SH3 domain-containing protein 1 [Arabidopsis
  misc_feature (184)..(249): Homolog of NCBI NO: 34902022 NR Description: unknown protein [Oryza sativa (japonica
  misc_feature (1)..(165): Homolog of NCBI NO: 34902022 NR Description: unknown protein [Oryza sativa (japonica
  misc_feature (1)..(251): Homolog of NCBI NO: 38344978 NR Description: OSJNBa0011L07.8 [Oryza sativa (japonica
  misc_feature (1)..(251): Homolog of NCBI NO: 7487662 NR Description: hypothetical protein T4L20.240 - Arabidopsis
  misc_feature (1)..(251): Homolog of NCBI NO: 18418491 NR Description: SH3 domain-containing protein 2 [Arabidopsis
MEKERGNMLKALGTQVAEPLRAMVLGAPLEDARHLAQRYDRMRQEAEAQATEVARRQAKARESQGNPDILMKLESAEAKLHDLKSNMTILGKEAASALASVEDQQQKLTLERLLSMVESERAYHQRVLQILDQLEGEMVSERQRIEAPSTPSSADSMPPPPSYEEANGVFASQMHDTSTDSMGYFLGEVLFPYHGVTDVELSLSTGEYVVVRKVTGSGWAEGECKGKAGWFPYGYIERRERVLASKVSEVF

SEQ ID NO: 21999 - protein, 244 aa, Arabidopsis thaliana
  peptide (1)..(244): Ceres Seq. ID no. 13486883
  misc_feature (178)..(232): Pfam Name: SH3 domain Pfam Description: SH3 domain
  misc_feature (16)..(244): Homolog of NCBI NO: 37535998 NR Description: unknown protein [Oryza sativa (japonica
  misc_feature (169)..(244): Homolog of NCBI NO: 7485521 NR Description: hypothetical protein F15J5.30 - Arabidopsis
  misc_feature (1)..(118): Homolog of NCBI NO: 7485521 NR Description: hypothetical protein F15J5.30 - Arabidopsis
  misc_feature (130)..(242): Homolog of NCBI NO: 15221714 NR Description: SH3 domain-containing protein 1 [Arabidopsis
  misc_feature (1)..(146): Homolog of NCBI NO: 15221714 NR Description: SH3 domain-containing protein 1 [Arabidopsis
  misc_feature (177)..(242): Homolog of NCBI NO: 34902022 NR Description: unknown protein [Oryza sativa (japonica
  misc_feature (1)..(158): Homolog of NCBI NO: 34902022 NR Description: unknown protein [Oryza sativa (japonica
  misc_feature (1)..(244): Homolog of NCBI NO: 38344978 NR Description: OSJNBa0011L07.8 [Oryza sativa (japonica
  misc_feature (1)..(244): Homolog of NCBI NO: 7487662 NR Description: hypothetical protein T4L20.240 - Arabidopsis
  misc_feature (1)..(244): Homolog of NCBI NO: 18418491 NR Description: SH3 domain-containing protein 2 [Arabidopsis
MLKALGTQVAEPLRAMVLGAPLEDARHLAQRYDRMRQEAEAQATEVARRQAKARESQGNPDILMKLESAEAKLHDLKSNMTILGKEAASALASVEDQQQKLTLERLLSMVESERAYHQRVLQILDQLEGEMVSERQRIEAPSTPSSADSMPPPPSYEEANGVFASQMHDTSTDSMGYFLGEVLFPYHGVTDVELSLSTGEYVVVRKVTGSGWAEGECKGKAGWFPYGYIERRERVLASKVSEVF

SEQ ID NO: 22000 - DNA, 1730 bp, Arabidopsis thaliana
  misc_feature (1)..(1730): Ceres Seq. ID no. 13496336
  misc_feature: MA Experiment ID: 108434 Result: Up-regulated in Transcription
  misc_feature: MA Experiment 108434 PARAMETER Experiment Name: At_Root_Tips_cDNA_P Parameter: Tissue Value: Root Tips
  misc_feature: MA Experiment ID: 108435 Result: Up-regulated in Transcription
  misc_feature: MA Experiment 108435 PARAMETER Experiment Name: At_stm_Mutants_cDNA_P Parameter: Plant Line Value: wt Landsburg vs stm
  misc_feature: MA Experiment 108435 PARAMETER Experiment Name: At_stm_Mutants_cDNA_P Parameter: Tissue Value: Shoot Apical Meristem Region
  misc_feature: MA Experiment ID: 108462 Result: Down-regulated in Transcription
  misc_feature: MA Experiment 108462 PARAMETER Experiment Name: At_Germinating_Seeds_cDNA_P Parameter: Age (day) Value: 2 vs. 0
  misc_feature: MA Experiment 108462 PARAMETER Experiment Name: At_Germinating_Seeds_cDNA_P Parameter: Tissue Value: Germinating Seeds
  misc_feature: MA Experiment ID: 108463 Result: Down-regulated in Transcription
  misc_feature: MA Experiment 108463 PARAMETER Experiment Name: At_Germinating_Seeds_cDNA_P Parameter: Age (day) Value: 3 vs. 0
  misc_feature: MA Experiment 108463 PARAMETER Experiment Name: At_Germinating_Seeds_cDNA_P Parameter: Tissue Value: Germinating Seeds
  misc_feature: MA Experiment ID: 108464 Result: Down-regulated in Transcription
  misc_feature: MA Experiment 108464 PARAMETER Experiment Name: At_Germinating_Seeds_cDNA_P Parameter: Age (day) Value: 4 vs. 0
  misc_feature: MA Experiment 108464 PARAMETER Experiment Name: At_Germinating_Seeds_cDNA_P Parameter: Tissue Value: Germinating Seeds
  misc_feature: MA Experiment ID: 108489 Result: Up-regulated in Transcription
  misc_feature: MA Experiment ID: 108573 Result: Down-regulated in Transcription
  misc_feature: MA Experiment 108573 PARAMETER Experiment Name: At_Drought_cDNA_P Parameter: Timepoint (hr) Value: 6
  misc_feature: MA Experiment 108573 PARAMETER Experiment Name: At_Drought_cDNA_P Parameter: Tissue Value: Aerial
  misc_feature: MA Experiment 108573 PARAMETER Experiment Name: At_Drought_cDNA_P Parameter: Treatment Value: Drought vs. No Drought
  misc_feature: MA Experiment ID: 108579 Result: Up-regulated in Transcription
  misc_feature: MA Experiment 108579 PARAMETER Experiment Name: At_4deg_Cold_cDNA_P Parameter: Temperature (deg C) Value: 4 vs. 22
  misc_feature: MA Experiment 108579 PARAMETER Experiment Name: At_4deg_Cold_cDNA_P Parameter: Timepoint (hr) Value: 6
  misc_feature: MA Experiment 108579 PARAMETER Experiment Name: At_4deg_Cold_cDNA_P Parameter: Tissue Value: Aerial
  misc_feature: MA Experiment ID: 20000090 Result: Up-regulated in Transcription
  misc_feature: MA Experiment ID: 20000234 Result: Up-regulated in Transcription
  misc_feature: MA Experiment 20000234 PARAMETER Experiment Name: At_Siliques_P Parameter: Age (day) Value: 21
  misc_feature: MA Experiment 20000234 PARAMETER Experiment Name: At_Siliques_P Parameter: Organism Value: A. thaliana
  misc_feature: MA Experiment 20000234 PARAMETER Experiment Name: At_Siliques_P Parameter: Plant Line Value: WS
  misc_feature: MA Experiment 20000234 PARAMETER Experiment Name: At_Siliques_P Parameter: Tissue Value: Less Than 5mm Siliques vs. Whole Plant
  misc_feature: MA Experiment ID: 20000264 Result: Up-regulated in Transcription
  misc_feature: MA Experiment 20000264 PARAMETER Experiment Name: At_Open_Flower_P Parameter: Age (day) Value: 21
  misc_feature: MA Experiment 20000264 PARAMETER Experiment Name: At_Open_Flower_P Parameter: Plant Line Value: WS
  misc_feature: MA Experiment 20000264 PARAMETER Experiment Name: At_Open_Flower_P Parameter: Tissue Value: Open Flower vs. Whole Plant
  misc_feature: MA Experiment ID: 20000437 Result: Down-regulated in Transcription
  misc_feature: MA Experiment 20000437 PARAMETER Experiment Name: At_Drought_P Parameter: Age (day) Value: 8
  misc_feature: MA Experiment 20000437 PARAMETER Experiment Name: At_Drought_P Parameter: Organism Value: A. thaliana
  misc_feature: MA Experiment 20000437 PARAMETER Experiment Name: At_Drought_P Parameter: Plant Line Value: WS
  misc_feature: MA Experiment 20000437 PARAMETER Experiment Name: At_Drought_P Parameter: Timepoint (hr) Value: 24
  misc_feature: MA Experiment 20000437 PARAMETER Experiment Name: At_Drought_P Parameter: Tissue Value: Whole Plant
  misc_feature: MA Experiment 20000437 PARAMETER Experiment Name: At_Drought_P Parameter: Treatment Value: Drought vs. No Drought
  misc_feature: MA Experiment ID: 20000495 Result: Up-regulated in Transcription
  misc_feature: MA Experiment 20000495 PARAMETER Experiment Name: At_Guard_Cells_P Parameter: Harvest Date Value: 8/2/2002
  misc_feature: MA Experiment 20000495 PARAMETER Experiment Name: At_Guard_Cells_P Parameter: Organism Value: A. thaliana
  misc_feature: MA Experiment 20000495 PARAMETER Experiment Name: At_Guard_Cells_P Parameter: Tissue Value: Guard Cells vs. Leaves
  misc_feature: MA Experiment ID: 20001247 Result: Down-regulated in Transcription
  misc_feature: MA Experiment 20001247 PARAMETER Experiment Name: At_Far-red-induction_P Parameter: Age (day) Value: 7
  misc_feature: MA Experiment 20001247 PARAMETER Experiment Name: At_Far-red-induction_P Parameter: Light Value: Far-red vs. White
  misc_feature: MA Experiment 20001247 PARAMETER Experiment Name: At_Far-red-induction_P Parameter: Organism Value: A. thaliana
  misc_feature: MA Experiment 20001247 PARAMETER Experiment Name: At_Far-red-induction_P Parameter: Plant Line Value: Columbia
  misc_feature: MA Experiment 20001247 PARAMETER Experiment Name: At_Far-red-induction_P Parameter: Timepoint (hr) Value: 1
  misc_feature: MA Experiment 20001247 PARAMETER Experiment Name: At_Far-red-induction_P Parameter: Tissue Value: Whole Plant
  misc_feature: MA Experiment ID: 20001557 Result: Up-regulated in Transcription
  misc_feature: MA Experiment 20001557 PARAMETER Experiment Name: At_Drought_Soil_Dry_P Parameter: Age (day) Value: 27
  misc_feature: MA Experiment 20001557 PARAMETER Experiment Name: At_Drought_Soil_Dry_P Parameter: Organism Value: A. thaliana
  misc_feature: MA Experiment 20001557 PARAMETER Experiment Name: At_Drought_Soil_Dry_P Parameter: Plant Line Value: WS
  misc_feature: MA Experiment 20001557 PARAMETER Experiment Name: At_Drought_Soil_Dry_P Parameter: Post Timepoint (hr) Value: 3
  misc_feature: MA Experiment 20001557 PARAMETER Experiment Name: At_Drought_Soil_Dry_P Parameter: Post-Treatment Value: Re-Water vs. No Drought
  misc_feature: MA Experiment 20001557 PARAMETER Experiment Name: At_Drought_Soil_Dry_P Parameter: Timepoint (day) Value: 13
  misc_feature: MA Experiment 20001557 PARAMETER Experiment Name: At_Drought_Soil_Dry_P Parameter: Treatment Value: Drought vs. No Drought
  misc_feature: MA Experiment ID: 20001558 Result: Up-regulated in Transcription
  misc_feature: MA Experiment 20001558 PARAMETER Experiment Name: At_Drought_Soil_Dry_P Parameter: Age (day) Value: 27
  misc_feature: MA Experiment 20001558 PARAMETER Experiment Name: At_Drought_Soil_Dry_P Parameter: Organism Value: A. thaliana
  misc_feature: MA Experiment 20001558 PARAMETER Experiment Name: At_Drought_Soil_Dry_P Parameter: Plant Line Value: WS
  misc_feature: MA Experiment 20001558 PARAMETER Experiment Name: At_Drought_Soil_Dry_P Parameter: Post Timepoint (hr) Value: 6
  misc_feature: MA Experiment 20001558 PARAMETER Experiment Name: At_Drought_Soil_Dry_P Parameter: Post-Treatment Value: Re-Water vs. No Drought
  misc_feature: MA Experiment 20001558 PARAMETER Experiment Name: At_Drought_Soil_Dry_P Parameter: Timepoint (day) Value: 13
  misc_feature: MA Experiment 20001558 PARAMETER Experiment Name: At_Drought_Soil_Dry_P Parameter: Treatment Value: Drought vs. No Drought
  misc_feature: MA Experiment ID: 20001560 Result: Up-regulated in Transcription
  misc_feature: MA Experiment 20001560 PARAMETER Experiment Name: At_Drought_Soil_Dry_P Parameter: Age (day) Value: 28
  misc_feature: MA Experiment 20001560 PARAMETER Experiment Name: At_Drought_Soil_Dry_P Parameter: Organism Value: A. thaliana
  misc_feature: MA Experiment 20001560 PARAMETER Experiment Name: At_Drought_Soil_Dry_P Parameter: Plant Line Value: WS
  misc_feature: MA Experiment 20001560 PARAMETER Experiment Name: At_Drought_Soil_Dry_P Parameter: Post Timepoint (hr) Value: None
  misc_feature: MA Experiment 20001560 PARAMETER Experiment Name: At_Drought_Soil_Dry_P Parameter: Post-Treatment Value: None
  misc_feature: MA Experiment 20001560 PARAMETER Experiment Name: At_Drought_Soil_Dry_P Parameter: Timepoint (day) Value: 14
  misc_feature: MA Experiment 20001560 PARAMETER Experiment Name: At_Drought_Soil_Dry_P Parameter: Treatment Value: Drought vs. No Drought
  misc_feature: MA Experiment ID: 20001757 Result: Up-regulated in Transcription
  misc_feature: MA Experiment 20001757 PARAMETER Experiment Name: At_50mM_NH4NO3_L-to-H_P Parameter: Timepoint (hr) Value: 6
  misc_feature: MA Experiment 20001757 PARAMETER Experiment Name: At_50mM_NH4NO3_L-to-H_P Parameter: Tissue Value: Leaf
  misc_feature: MA Experiment 20001757 PARAMETER Experiment Name: At_50mM_NH4NO3_L-to-H_P Parameter: Treatment Value: 50mM NH4NO3 vs 100mM Mannitol
gtgttcgcctttctctcgtacaagtcaaaatggcgtccgttgttcttcgaaaccctagctcgaagcgccttgttccattctcttcccagatctactctcgctgtggtgcttccgttacttcctcttactcgatctctcattctatcggtggagatgatctctcttcctctaccttcggaacctcctccttctggagatccatggccacttttactcgaaataaacctcatgtaaatgttggaactattgggcatgttgatcatggcaagaccactttaactgctgcaatcacaaaggttcttgctgaggagggcaaagctaaagctattgcctttgatgaaattgataaagctcctgaagagaagaagagaggaattactattgccacggctcatgtggagtatgaaactgcaaagcgtcactatgctcatgtggattgccctggacacgcagattatgttaaaaatatgattactggagctgcgcaaatggatggcggaattcttgtggtttcaggaccagatggacccatgccgcagacaaaggaacatattctacttgcacgccaggttggtgttccctcacttgtgtgcttcttgaacaaagttgatgtggtggatgaccctgagctcttggagcttgtcgagatggaactacgtgagctcctcagcttctacaagtttcctggggatgatattcccatcatccgaggatctgctctgtccgcattacagggcaccaatgatgaaattggaaggcaagctatattaaagctgatggatgctgttgatgaatatatacctgaccctgttcgcgtccttgacaagcctttcttgatgccaattgaagatgttttctcaattcaaggacgtggaactgttgcaaccggtcgtatcgaacagggagtcattaaagtgggtgaagaagttgagatattgggtttacgtgaggggggtgttccactgaaatcgactgtaactggggttgagatgttcaagaagattttggataatggacaggctggtgataatgtaggacttcttctgcgtgggctaaagagagaagacattcagcgtggaatggtgattgctaagcctggttcatgcaagacatacaagaagtttgaagcagagatttacgtgctcacaaaggatgaaggtggacgtcacactgcatttttctctaactacaggcctcagttttacttgaggactgcagatatcactggcaaagtggaattacccgaaaacgtgaagatggttatgcctggtgacaatgtcacagctgttttcgagttaatcatgcctgtcccactcgaaacaggtcaaagatttgccttaagggaaggaggtagaacagttggagctggtgttgtatcaaaagtgatgacctaaactactcaaaagcacattcttctccttcgttctctaggaatccatcaatttcgagatttttctttttgtctttttgctgctttgagatttctttgggtagatcaaataaacagagagaaacttaatttatgtttccaatgagaaagattagggcagagggcacgaaacgtctatttctttttgatgcttcctactttgtgaaactttcaaaaagccacttccaattctttctcaccttcgtggtttgtcaagtatttgtttttatttctttaaaccaaaatcatgaattttcgattattaaattaagttgaccagaaatgaaatatttatttcatg

SEQ ID NO: 22001 - protein, 463 aa, Arabidopsis thaliana
  peptide (1)..(463): Ceres Seq. ID no. 13496337
  misc_feature (74)..(270): Pfam Name: Elongation factor Tu GTP binding domain Pfam Description: Elongation factor Tu GTP binding domain
  misc_feature (64)..(462): Homolog of NCBI NO: 22965193 NR Description: hypothetical protein [Rhodopseudomonas palustris]
  misc_feature (70)..(462): Homolog of NCBI NO: 22998293 NR Description: hypothetical protein [Magnetococcus sp. MC-1]
  misc_feature (70)..(462): Homolog of NCBI NO: 21952751 NR Description: elongation factor Tu [Myxococcus xanthus]
  misc_feature (68)..(461): Homolog of NCBI NO: 23108387 NR Description: hypothetical protein [Novosphingobium
  misc_feature (68)..(462): Homolog of NCBI NO: 27380513 NR Description: elongation factor TU [Bradyrhizobium japonicum]
  misc_feature (68)..(462): Homolog of NCBI NO: 23054529 NR Description: hypothetical protein [Geobacter metallireducens]
  misc_feature (10)..(463): Homolog of NCBI NO: 11181616 NR Description: translational elongation factor EF-TuM [Zea mays]
  misc_feature (11)..(461): Homolog of NCBI NO: 18001149 NR Description: translational elongation factor Tu [Oryza sativa]
  misc_feature (19)..(463): Homolog of NCBI NO: 1149571 NR Description: mitochondrial elongation factor Tu [Arabidopsis
  misc_feature (10)..(463): Homolog of NCBI NO: 15236220 NR Description: elongation factor Tu (EF-Tu), putative
VRLSLVQVKMASVVLRNPSSKRLVPFSSQIYSRCGASVTSSYSISHSIGGDDLSSSTFGTSSFWRSMATFTRNKPHVNVGTIGHVDHGKTTLTAAITKVLAEEGKAKAIAFDEIDKAPEEKKRGITIATAHVEYETAKRHYAHVDCPGHADYVKNMITGAAQMDGGILVVSGPDGPMPQTKEHILLARQVGVPSLVCFLNKVDVVDDPELLELVEMELRELLSFYKFPGDDIPIIRGSALSALQGTNDEIGRQAILKLMDAVDEYIPDPVRVLDKPFLMPIEDVFSIQGRGTVATGRIEQGVIKVGEEVEILGLREGGVPLKSTVTGVEMFKKILDNGQAGDNVGLLLRGLKREDIQRGMVIAKPGSCKTYKKFEAEIYVLTKDEGGRHTAFFSNYRPQFYLRTADITGKVELPENVKMVMPGDNVTAVFELIMPVPLETGQRFALREGGRTVGAGVVSKVMT

SEQ ID NO: 22002 - protein, 454 aa, Arabidopsis thaliana
  peptide (1)..(454): Ceres Seq. ID no. 13496338
  misc_feature (65)..(261): Pfam Name: Elongation factor Tu GTP binding domain Pfam Description: Elongation factor Tu GTP binding domain
  misc_feature (55)..(453): Homolog of NCBI NO: 22965193 NR Description: hypothetical protein [Rhodopseudomonas palustris]
  misc_feature (61)..(453): Homolog of NCBI NO: 22998293 NR Description: hypothetical protein [Magnetococcus sp. MC-1]
  misc_feature (61)..(453): Homolog of NCBI NO: 21952751 NR Description: elongation factor Tu [Myxococcus xanthus]
  misc_feature (59)..(452): Homolog of NCBI NO: 23108387 NR Description: hypothetical protein [Novosphingobium
  misc_feature (59)..(453): Homolog of NCBI NO: 27380513 NR Description: elongation factor TU [Bradyrhizobium japonicum]
  misc_feature (59)..(453): Homolog of NCBI NO: 23054529 NR Description: hypothetical protein [Geobacter metallireducens]
  misc_feature (1)..(454): Homolog of NCBI NO: 11181616 NR Description: translational elongation factor EF-TuM [Zea mays]
  misc_feature (2)..(452): Homolog of NCBI NO: 18001149 NR Description: translational elongation factor Tu [Oryza sativa]
  misc_feature (10)..(454): Homolog of NCBI NO: 1149571 NR Description: mitochondrial elongation factor Tu [Arabidopsis
  misc_feature (1)..(454): Homolog of NCBI NO: 15236220 NR Description: elongation factor Tu (EF-Tu), putative
MASVVLRNPSSKRLVPFSSQIYSRCGASVTSSYSISHSIGGDDLSSSTFGTSSFWRSMATFTRNKPHVNVGTIGHVDHGKTTLTAAITKVLAEEGKAKAIAFDEIDKAPEEKKRGITIATAHVEYETAKRHYAHVDCPGHADYVKNMITGAAQMDGGILVVSGPDGPMPQTKEHILLARQVGVPSLVCFLNKVDVVDDPELLELVEMELRELLSFYKFPGDDIPIIRGSALSALQGTNDEIGRQAILKLMDAVDEYIPDPVRVLDKPFLMPIEDVFSIQGRGTVATGRIEQGVIKVGEEVEILGLREGGVPLKSTVTGVEMFKKILDNGQAGDNVGLLLRGLKREDIQRGMVIAKPGSCKTYKKFEAEIYVLTKDEGGRHTAFFSNYRPQFYLRTADITGKVELPENVKMVMPGDNVTAVFELIMPVPLETGQRFALREGGRTVGAGVVSKVMT

SEQ ID NO: 22003 - protein, 397 aa, Arabidopsis thaliana
  peptide (1)..(397): Ceres Seq. ID no. 13496339
  misc_feature (8)..(204): Pfam Name: Elongation factor Tu GTP binding domain Pfam Description: Elongation factor Tu GTP binding domain
  misc_feature (1)..(396): Homolog of NCBI NO: 22965193 NR Description: hypothetical protein [Rhodopseudomonas palustris]
  misc_feature (4)..(396): Homolog of NCBI NO: 22998293 NR Description: hypothetical protein [Magnetococcus sp. MC-1]
  misc_feature (4)..(396): Homolog of NCBI NO: 21952751 NR Description: elongation factor Tu [Myxococcus xanthus]
  misc_feature (2)..(395): Homolog of NCBI NO: 23108387 NR Description: hypothetical protein [Novosphingobium
  misc_feature (2)..(396): Homolog of NCBI NO: 27380513 NR Description: elongation factor TU [Bradyrhizobium japonicum]
  misc_feature (2)..(396): Homolog of NCBI NO: 23054529 NR Description: hypothetical protein [Geobacter metallireducens]
  misc_feature (1)..(397): Homolog of NCBI NO: 11181616 NR Description: translational elongation factor EF-TuM [Zea mays]
  misc_feature (1)..(395): Homolog of NCBI NO: 18001149 NR Description: translational elongation factor Tu [Oryza sativa]
  misc_feature (1)..(397): Homolog of NCBI NO: 1149571 NR Description: mitochondrial elongation factor Tu [Arabidopsis
  misc_feature (1)..(397): Homolog of NCBI NO: 15236220 NR Description: elongation factor Tu (EF-Tu), putative
MATFTRNKPHVNVGTIGHVDHGKTTLTAAITKVLAEEGKAKAIAFDEIDKAPEEKKRGITIATAHVEYETAKRHYAHVDCPGHADYVKNMITGAAQMDGGILVVSGPDGPMPQTKEHILLARQVGVPSLVCFLNKVDVVDDPELLELVEMELRELLSFYKFPGDDIPIIRGSALSALQGTNDEIGRQAILKLMDAVDEYIPDPVRVLDKPFLMPIEDVFSIQGRGTVATGRIEQGVIKVGEEVEILGLREGGVPLKSTVTGVEMFKKILDNGQAGDNVGLLLRGLKREDIQRGMVIAKPGSCKTYKKFEAEIYVLTKDEGGRHTAFFSNYRPQFYLRTADITGKVELPENVKMVMPGDNVTAVFELIMPVPLETGQRFALREGGRTVGAGVVSKVMT

SEQ ID NO: 22004 - DNA, 2292 bp, Arabidopsis thaliana
  misc_feature (1)..(2292): Ceres Seq. ID no. 13486668
  misc_feature: MA Experiment ID: 108434 Result: Down-regulated in Transcription
  misc_feature: MA Experiment 108434 PARAMETER Experiment Name: At_Root_Tips_cDNA_P Parameter: Tissue Value: Root Tips
  misc_feature: MA Experiment ID: 108435 Result: Up-regulated in Transcription
  misc_feature: MA Experiment 108435 PARAMETER Experiment Name: At_stm_Mutants_cDNA_P Parameter: Plant Line Value: wt Landsburg vs stm
  misc_feature: MA Experiment 108435 PARAMETER Experiment Name: At_stm_Mutants_cDNA_P Parameter: Tissue Value: Shoot Apical Meristem Region
  misc_feature: MA Experiment ID: 108461 Result: Up-regulated in Transcription
  misc_feature: MA Experiment 108461 PARAMETER Experiment Name: At_Germinating_Seeds_cDNA_P Parameter: Age (day) Value: 1 vs. 0
  misc_feature: MA Experiment 108461 PARAMETER Experiment Name: At_Germinating_Seeds_cDNA_P Parameter: Tissue Value: Germinating Seeds
  misc_feature: MA Experiment ID: 108462 Result: Up-regulated in Transcription
  misc_feature: MA Experiment 108462 PARAMETER Experiment Name: At_Germinating_Seeds_cDNA_P Parameter: Age (day) Value: 2 vs. 0
  misc_feature: MA Experiment 108462 PARAMETER Experiment Name: At_Germinating_Seeds_cDNA_P Parameter: Tissue Value: Germinating Seeds
  misc_feature: MA Experiment ID: 108463 Result: Up-regulated in Transcription
  misc_feature: MA Experiment 108463 PARAMETER Experiment Name: At_Germinating_Seeds_cDNA_P Parameter: Age (day) Value: 3 vs. 0
  misc_feature: MA Experiment 108463 PARAMETER Experiment Name: At_Germinating_Seeds_cDNA_P Parameter: Tissue Value: Germinating Seeds
  misc_feature: MA Experiment ID: 108464 Result: Up-regulated in Transcription
  misc_feature: MA Experiment 108464 PARAMETER Experiment Name: At_Germinating_Seeds_cDNA_P Parameter: Age (day) Value: 4 vs. 0
  misc_feature: MA Experiment 108464 PARAMETER Experiment Name: At_Germinating_Seeds_cDNA_P Parameter: Tissue Value: Germinating Seeds
  misc_feature: MA Experiment ID: 108488 Result: Down-regulated in Transcription
  misc_feature: MA Experiment ID: 108585 Result: Up-regulated in Transcription
  misc_feature: MA Experiment 108585 PARAMETER Experiment Name: At_5mM_NaNP_cDNA_P Parameter: Timepoint (hr) Value: 6
  misc_feature: MA Experiment 108585 PARAMETER Experiment Name: At_5mM_NaNP_cDNA_P Parameter: Tissue Value: Aerial
  misc_feature: MA Experiment 108585 PARAMETER Experiment Name: At_5mM_NaNP_cDNA_P Parameter: Treatment Value: null
  misc_feature: MA Experiment ID: 108595 Result: Up-regulated in Transcription
  misc_feature: MA Experiment 108595 PARAMETER Experiment Name: At_Ler-pi_Ovule_cDNA_P Parameter: Plant Line Value: null
  misc_feature: MA Experiment ID: 20000070 Result: Up-regulated in Transcription
  misc_feature: MA Experiment 20000070 PARAMETER Experiment Name: At_100uM_ABA_Mutants_cDNA_P Parameter: Plant Line Value: CS24
  misc_feature: MA Experiment 20000070 PARAMETER Experiment Name: At_100uM_ABA_Mutants_cDNA_P Parameter: Timepoint (hr) Value: 6
  misc_feature: MA Experiment 20000070 PARAMETER Experiment Name: At_100uM_ABA_Mutants_cDNA_P Parameter: Tissue Value: Aerial
  misc_feature: MA Experiment 20000070 PARAMETER Experiment Name: At_100uM_ABA_Mutants_cDNA_P Parameter: Treatment Value: 100uM ABA vs. No Treatment
  misc_feature: MA Experiment ID: 20000071 Result: Up-regulated in Transcription
  misc_feature: MA Experiment 20000071 PARAMETER Experiment Name: At_100uM_ABA_Mutants_cDNA_P Parameter: Plant Line Value: CS8104
  misc_feature: MA Experiment 20000071 PARAMETER Experiment Name: At_100uM_ABA_Mutants_cDNA_P Parameter: Timepoint (hr) Value: 6
  misc_feature: MA Experiment 20000071 PARAMETER Experiment Name: At_100uM_ABA_Mutants_cDNA_P Parameter: Tissue Value: Aerial
  misc_feature: MA Experiment 20000071 PARAMETER Experiment Name: At_100uM_ABA_Mutants_cDNA_P Parameter: Treatment Value: 100uM ABA vs. No Treatment
  misc_feature: MA Experiment ID: 20000072 Result: Up-regulated in Transcription
  misc_feature: MA Experiment 20000072 PARAMETER Experiment Name: At_100uM_ABA_Mutants_cDNA_P Parameter: Plant Line Value: CS8105
  misc_feature: MA Experiment 20000072 PARAMETER Experiment Name: At_100uM_ABA_Mutants_cDNA_P Parameter: Timepoint (hr) Value: 6
  misc_feature: MA Experiment 20000072 PARAMETER Experiment Name: At_100uM_ABA_Mutants_cDNA_P Parameter: Tissue Value: Aerial
  misc_feature: MA Experiment 20000072 PARAMETER Experiment Name: At_100uM_ABA_Mutants_cDNA_P Parameter: Treatment Value: 100uM ABA vs. No Treatment
  misc_feature: MA Experiment ID: 20000086 Result: Up-regulated in Transcription
  misc_feature: MA Experiment 20000086 PARAMETER Experiment Name: At_100uM_ABA_Mutants_cDNA_P Parameter: Plant Line Value: CS22
  misc_feature: MA Experiment 20000086 PARAMETER Experiment Name: At_100uM_ABA_Mutants_cDNA_P Parameter: Timepoint (hr) Value: 6
  misc_feature: MA Experiment 20000086 PARAMETER Experiment Name: At_100uM_ABA_Mutants_cDNA_P Parameter: Tissue Value: Aerial
  misc_feature: MA Experiment 20000086 PARAMETER Experiment Name: At_100uM_ABA_Mutants_cDNA_P Parameter: Treatment Value: 100uM ABA vs. No Treatment
  misc_feature: MA Experiment ID: 20000087 Result: Up-regulated in Transcription
  misc_feature: MA Experiment 20000087 PARAMETER Experiment Name: At_100uM_ABA_Mutants_cDNA_P Parameter: Plant Line Value: WS
  misc_feature: MA Experiment 20000087 PARAMETER Experiment Name: At_100uM_ABA_Mutants_cDNA_P Parameter: Timepoint (hr) Value: 6
  misc_feature: MA Experiment 20000087 PARAMETER Experiment Name: At_100uM_ABA_Mutants_cDNA_P Parameter: Tissue Value: Aerial
  misc_feature: MA Experiment 20000087 PARAMETER Experiment Name: At_100uM_ABA_Mutants_cDNA_P Parameter: Treatment Value: 100uM ABA vs. No Treatment
  misc_feature: MA Experiment ID: 20000088 Result: Up-regulated in Transcription
  misc_feature: MA Experiment 20000088 PARAMETER Experiment Name: At_100uM_ABA_Mutants_cDNA_P Parameter: Plant Line Value: Landsberg
  misc_feature: MA Experiment 20000088 PARAMETER Experiment Name: At_100uM_ABA_Mutants_cDNA_P Parameter: Timepoint (hr) Value: 6
  misc_feature: MA Experiment 20000088 PARAMETER Experiment Name: At_100uM_ABA_Mutants_cDNA_P Parameter: Tissue Value: Aerial
  misc_feature: MA Experiment 20000088 PARAMETER Experiment Name: At_100uM_ABA_Mutants_cDNA_P Parameter: Treatment Value: 100uM ABA vs. No Treatment
  misc_feature: MA Experiment ID: 20000117 Result: Up-regulated in Transcription
  misc_feature: MA Experiment 20000117 PARAMETER Experiment Name: At_100uM_ABA_Mutants_cDNA_P Parameter: Plant Line Value: Columbia
  misc_feature: MA Experiment 20000117 PARAMETER Experiment Name: At_100uM_ABA_Mutants_cDNA_P Parameter: Timepoint (hr) Value: 6
  misc_feature: MA Experiment 20000117 PARAMETER Experiment Name: At_100uM_ABA_Mutants_cDNA_P Parameter: Tissue Value: Aerial
  misc_feature: MA Experiment 20000117 PARAMETER Experiment Name: At_100uM_ABA_Mutants_cDNA_P Parameter: Treatment Value: 100uM ABA vs. No Treatment
  misc_feature: MA Experiment ID: 20000180 Result: Up-regulated in Transcription
  misc_feature: MA Experiment 20000180 PARAMETER Experiment Name: At_Germinating_Seeds_P Parameter: Age (hr) Value: 24 vs. 0
  misc_feature: MA Experiment 20000180 PARAMETER Experiment Name: At_Germinating_Seeds_P Parameter: Tissue Value: Germinating Seeds
  misc_feature: MA Experiment ID: 20000184 Result: Down-regulated in Transcription
  misc_feature: MA Experiment 20000184 PARAMETER Experiment Name: At_Shoots__P Parameter: Age (day) Value: 7
  misc_feature: MA Experiment 20000184 PARAMETER Experiment Name: At_Shoots__P Parameter: Tissue Value: Shoots vs. Whole Plant
  misc_feature: MA Experiment ID: 20000185 Result: Down-regulated in Transcription
  misc_feature: MA Experiment 20000185 PARAMETER Experiment Name: At_Roots__P Parameter: Age (day) Value: 7 vs. 21
  misc_feature: MA Experiment 20000185 PARAMETER Experiment Name: At_Roots__P Parameter: Organism Value: A. thaliana
  misc_feature: MA Experiment 20000185 PARAMETER Experiment Name: At_Roots__P Parameter: Tissue Value: Roots vs. Whole Plant
  misc_feature: MA Experiment ID: 20000227 Result: Up-regulated in Transcription
  misc_feature: MA Experiment 20000227 PARAMETER Experiment Name: At_Root-Tips-vs-Tops_P Parameter: Tissue Value: Root Tips vs. Root Tops
  misc_feature: MA Experiment ID: 20000234 Result: Down-regulated in Transcription
  misc_feature: MA Experiment 20000234 PARAMETER Experiment Name: At_Siliques_P Parameter: Age (day) Value: 21
  misc_feature: MA Experiment 20000234 PARAMETER Experiment Name: At_Siliques_P Parameter: Organism Value: A. thaliana
  misc_feature: MA Experiment 20000234 PARAMETER Experiment Name: At_Siliques_P Parameter: Plant Line Value: WS
  misc_feature: MA Experiment 20000234 PARAMETER Experiment Name: At_Siliques_P Parameter: Tissue Value: Less Than 5mm Siliques vs. Whole Plant
  misc_feature: MA Experiment ID: 20000264 Result: Down-regulated in Transcription
  misc_feature: MA Experiment 20000264 PARAMETER Experiment Name: At_Open_Flower_P Parameter: Age (day) Value: 21
  misc_feature: MA Experiment 20000264 PARAMETER Experiment Name: At_Open_Flower_P Parameter: Plant Line Value: WS
  misc_feature: MA Experiment 20000264 PARAMETER Experiment Name: At_Open_Flower_P Parameter: Tissue Value: Open Flower vs. Whole Plant
  misc_feature: MA Experiment ID: 20000265 Result: Down-regulated in Transcription
  misc_feature: MA Experiment 20000265 PARAMETER Experiment Name: At_Open_Flower_P Parameter: Age (day) Value: 21
  misc_feature: MA Experiment 20000265 PARAMETER Experiment Name: At_Open_Flower_P Parameter: Plant Line Value: WS
  misc_feature: MA Experiment 20000265 PARAMETER Experiment Name: At_Open_Flower_P Parameter: Tissue Value: Closed Flower vs. Whole Plant
  misc_feature: MA Experiment ID: 20000267 Result: Up-regulated in Transcription
  misc_feature: MA Experiment 20000267 PARAMETER Experiment Name: At_Drought_P Parameter: Age (day) Value: 7
  misc_feature: MA Experiment 20000267 PARAMETER Experiment Name: At_Drought_P Parameter: Organism Value: A. thaliana
  misc_feature: MA Experiment 20000267 PARAMETER Experiment Name: At_Drought_P Parameter: Plant Line Value: WS
  misc_feature: MA Experiment 20000267 PARAMETER Experiment Name: At_Drought_P Parameter: Timepoint (hr) Value: 6
  misc_feature: MA Experiment 20000267 PARAMETER Experiment Name: At_Drought_P Parameter: Tissue Value: Whole Plant
  misc_feature: MA Experiment 20000267 PARAMETER Experiment Name: At_Drought_P Parameter: Treatment Value: Drought vs. No Drought
  misc_feature: MA Experiment ID: 20000286 Result: Down-regulated in Transcription
  misc_feature: MA Experiment 20000286 PARAMETER Experiment Name: At_Open_Flower_P Parameter: Age (day) Value: 21
  misc_feature: MA Experiment 20000286 PARAMETER Experiment Name: At_Open_Flower_P Parameter: Plant Line Value: WS
  misc_feature: MA Experiment 20000286 PARAMETER Experiment Name: At_Open_Flower_P Parameter: Tissue Value: Half Open vs. Whole Plant
  misc_feature: MA Experiment ID: 20000308 Result: Up-regulated in Transcription
  misc_feature: MA Experiment 20000308 PARAMETER Experiment Name: At_100mM_NaCl__P Parameter: Age (day) Value: 17
  misc_feature: MA Experiment 20000308 PARAMETER Experiment Name: At_100mM_NaCl__P Parameter: Organism Value: A. thaliana
  misc_feature: MA Experiment 20000308 PARAMETER Experiment Name: At_100mM_NaCl__P Parameter: Plant Line Value: WS
  misc_feature: MA Experiment 20000308 PARAMETER Experiment Name: At_100mM_NaCl__P Parameter: Timepoint (hr) Value: 72
  misc_feature: MA Experiment 20000308 PARAMETER Experiment Name: At_100mM_NaCl__P Parameter: Tissue Value: Whole Plant
  misc_feature: MA Experiment 20000308 PARAMETER Experiment Name: At_100mM_NaCl__P Parameter: Treatment Value: 100mM NaCl vs. No Treatment
  misc_feature: MA Experiment ID: 20000437 Result: Down-regulated in Transcription
  misc_feature: MA Experiment 20000437 PARAMETER Experiment Name: At_Drought_P Parameter: Age (day) Value: 8
  misc_feature: MA Experiment 20000437 PARAMETER Experiment Name: At_Drought_P Parameter: Organism Value: A. thaliana
  misc_feature: MA Experiment 20000437 PARAMETER Experiment Name: At_Drought_P Parameter: Plant Line Value: WS
  misc_feature: MA Experiment 20000437 PARAMETER Experiment Name: At_Drought_P Parameter: Timepoint (hr) Value: 24
  misc_feature: MA Experiment 20000437 PARAMETER Experiment Name: At_Drought_P Parameter: Tissue Value: Whole Plant
  misc_feature: MA Experiment 20000437 PARAMETER Experiment Name: At_Drought_P Parameter: Treatment Value: Drought vs. No Drought
  misc_feature: MA Experiment ID: 20000438 Result: Down-regulated in Transcription
  misc_feature: MA Experiment 20000438 PARAMETER Experiment Name: At_Shoots__P Parameter: Age (day) Value: 14
  misc_feature: MA Experiment 20000438 PARAMETER Experiment Name: At_Shoots__P Parameter: Tissue Value: Shoots vs. Whole Plant
  misc_feature: MA Experiment ID: 20000439 Result: Down-regulated in Transcription
  misc_feature: MA Experiment 20000439 PARAMETER Experiment Name: At_Roots__P Parameter: Age (day) Value: 14 vs. 21
  misc_feature: MA Experiment 20000439 PARAMETER Experiment Name: At_Roots__P Parameter: Organism Value: A. thaliana
  misc_feature: MA Experiment 20000439 PARAMETER Experiment Name: At_Roots__P Parameter: Tissue Value: Roots vs. Whole Plant
  misc_feature: MA Experiment ID: 20000451 Result: Up-regulated in Transcription
  misc_feature: MA Experiment 20000451 PARAMETER Experiment Name: At_CS6879_Shoots-Roots_P Parameter: Age (day) Value: 14
  misc_feature: MA Experiment 20000451 PARAMETER Experiment Name: At_CS6879_Shoots-Roots_P Parameter: Organism Value: A. thaliana
  misc_feature: MA Experiment 20000451 PARAMETER Experiment Name: At_CS6879_Shoots-Roots_P Parameter: Plant Line Value: CS6879 vs. WS
  misc_feature: MA Experiment 20000451 PARAMETER Experiment Name: At_CS6879_Shoots-Roots_P Parameter: Tissue Value: Roots
  misc_feature: MA Experiment ID: 20000453 Result: Up-regulated in Transcription
  misc_feature: MA Experiment 20000453 PARAMETER Experiment Name: At_100uM_ABA_P Parameter: Age (day) Value: 15
  misc_feature: MA Experiment 20000453 PARAMETER Experiment Name: At_100uM_ABA_P Parameter: Organism Value: A. thaliana
  misc_feature: MA Experiment 20000453 PARAMETER Experiment Name: At_100uM_ABA_P Parameter: Plant Line Value: WS
  misc_feature: MA Experiment 20000453 PARAMETER Experiment Name: At_100uM_ABA_P Parameter: Timepoint (hr) Value: 24
  misc_feature: MA Experiment 20000453 PARAMETER Experiment Name: At_100uM_ABA_P Parameter: Tissue Value: Aerial
  misc_feature: MA Experiment 20000453 PARAMETER Experiment Name: At_100uM_ABA_P Parameter: Treatment Value: 100uM ABA vs. No Treatment
  misc_feature: MA Experiment ID: 20000456 Result: Up-regulated in Transcription
  misc_feature: MA Experiment 20000456 PARAMETER Experiment Name: At_100uM_BA_P Parameter: Age (day) Value: 14
  misc_feature: MA Experiment 20000456 PARAMETER Experiment Name: At_100uM_BA_P Parameter: Organism Value: A. thaliana
  misc_feature: MA Experiment 20000456 PARAMETER Experiment Name: At_100uM_BA_P Parameter: Plant Line Value: WS
  misc_feature: MA Experiment 20000456 PARAMETER Experiment Name: At_100uM_BA_P Parameter: Timepoint (hr) Value: 6
  misc_feature: MA Experiment 20000456 PARAMETER Experiment Name: At_100uM_BA_P Parameter: Tissue Value: Aerial
  misc_feature: MA Experiment 20000456 PARAMETER Experiment Name: At_100uM_BA_P Parameter: Treatment Value: 100uM BA vs. No Treatment
  misc_feature: MA Experiment ID: 20000460 Result: Up-regulated in Transcription
  misc_feature: MA Experiment 20000460 PARAMETER Experiment Name: At_10percent_PEG_P Parameter: Age (day) Value: 12
  misc_feature: MA Experiment 20000460 PARAMETER Experiment Name: At_10percent_PEG_P Parameter: Organism Value: A. thaliana
  misc_feature: MA Experiment 20000460 PARAMETER Experiment Name: At_10percent_PEG_P Parameter: Plant Line Value: WS
  misc_feature: MA Experiment 20000460 PARAMETER Experiment Name: At_10percent_PEG_P Parameter: Timepoint (day) Value: 12
  misc_feature: MA Experiment 20000460 PARAMETER Experiment Name: At_10percent_PEG_P Parameter: Tissue Value: Whole Plant
  misc_feature: MA Experiment 20000460 PARAMETER Experiment Name: At_10percent_PEG_P Parameter: Treatment Value: 10percent PEG vs. No Treatment
  misc_feature: MA Experiment ID: 20000527 Result: Up-regulated in Transcription
  misc_feature: MA Experiment 20000527 PARAMETER Experiment Name: At_10percent_PEG_P Parameter: Age (day) Value: 20
  misc_feature: MA Experiment 20000527 PARAMETER Experiment Name: At_10percent_PEG_P Parameter: Organism Value: A. thaliana
  misc_feature: MA Experiment 20000527 PARAMETER Experiment Name: At_10percent_PEG_P Parameter: Plant Line Value: WS
  misc_feature: MA Experiment 20000527 PARAMETER Experiment Name: At_10percent_PEG_P Parameter: Timepoint (day) Value: 20
  misc_feature: MA Experiment 20000527 PARAMETER Experiment Name: At_10percent_PEG_P Parameter: Tissue Value: Whole Plant
  misc_feature: MA Experiment 20000527 PARAMETER Experiment Name: At_10percent_PEG_P Parameter: Treatment Value: 10percent PEG vs. No Treatment
  misc_feature: MA Experiment ID: 20000709 Result: Up-regulated in Transcription
  misc_feature: MA Experiment 20000709 PARAMETER Experiment Name: At_15mM_NH4NO3_L-to-H_P Parameter: Age (hr) Value: 14
  misc_feature: MA Experiment 20000709 PARAMETER Experiment Name: At_15mM_NH4NO3_L-to-H_P Parameter: Organism Value: A. thaliana
  misc_feature: MA Experiment 20000709 PARAMETER Experiment Name: At_15mM_NH4NO3_L-to-H_P Parameter: Plant Line Value: WS
  misc_feature: MA Experiment 20000709 PARAMETER Experiment Name: At_15mM_NH4NO3_L-to-H_P Parameter: Timepoint (hr) Value: 4
  misc_feature: MA Experiment 20000709 PARAMETER Experiment Name: At_15mM_NH4NO3_L-to-H_P Parameter: Tissue Value: Aerial
  misc_feature: MA Experiment 20000709 PARAMETER Experiment Name: At_15mM_NH4NO3_L-to-H_P Parameter: Treatment Value: 15mM NH4NO3 vs. 30mM Mannitol
  misc_feature: MA Experiment ID: 20000794 Result: Down-regulated in Transcription
  misc_feature: MA Experiment 20000794 PARAMETER Experiment Name: At_Petals_P Parameter: Age (day) Value: 23-25 days
  misc_feature: MA Experiment 20000794 PARAMETER Experiment Name: At_Petals_P Parameter: Plant Line Value: WS
  misc_feature: MA Experiment 20000794 PARAMETER Experiment Name: At_Petals_P Parameter: Tissue Value: Petals vs. Whole plant
  misc_feature: MA Experiment ID: 20001554 Result: Down-regulated in Transcription
  misc_feature: MA Experiment 20001554 PARAMETER Experiment Name: At_Drought_Soil_Dry_P Parameter: Age (day) Value: 21
  misc_feature: MA Experiment 20001554 PARAMETER Experiment Name: At_Drought_Soil_Dry_P Parameter: Organism Value: A. thaliana
  misc_feature: MA Experiment 20001554 PARAMETER Experiment Name: At_Drought_Soil_Dry_P Parameter: Plant Line Value: WS
  misc_feature: MA Experiment 20001554 PARAMETER Experiment Name: At_Drought_Soil_Dry_P Parameter: Post Timepoint (hr) Value: None
  misc_feature: MA Experiment 20001554 PARAMETER Experiment Name: At_Drought_Soil_Dry_P Parameter: Post-Treatment Value: None
  misc_feature: MA Experiment 20001554 PARAMETER Experiment Name: At_Drought_Soil_Dry_P Parameter: Timepoint (day) Value: 7
  misc_feature: MA Experiment 20001554 PARAMETER Experiment Name: At_Drought_Soil_Dry_P Parameter: Treatment Value: Drought vs. No Drought
  misc_feature: MA Experiment ID: 20001556 Result: Down-regulated in Transcription
  misc_feature: MA Experiment 20001556 PARAMETER Experiment Name: At_Drought_Soil_Dry_P Parameter: Age (day) Value: 26
  misc_feature: MA Experiment 20001556 PARAMETER Experiment Name: At_Drought_Soil_Dry_P Parameter: Organism Value: A. thaliana
  misc_feature: MA Experiment 20001556 PARAMETER Experiment Name: At_Drought_Soil_Dry_P Parameter: Plant Line Value: WS
  misc_feature: MA Experiment 20001556 PARAMETER Experiment Name: At_Drought_Soil_Dry_P Parameter: Post Timepoint (hr) Value: None
  misc_feature: MA Experiment 20001556 PARAMETER Experiment Name: At_Drought_Soil_Dry_P Parameter: Post-Treatment Value: None
  misc_feature: MA Experiment 20001556 PARAMETER Experiment Name: At_Drought_Soil_Dry_P Parameter: Timepoint (day) Value: 12
  misc_feature: MA Experiment 20001556 PARAMETER Experiment Name: At_Drought_Soil_Dry_P Parameter: Treatment Value: Drought vs. No Drought
  misc_feature: MA Experiment ID: 20001757 Result: Down-regulated in Transcription
  misc_feature: MA Experiment 20001757 PARAMETER Experiment Name: At_50mM_NH4NO3_L-to-H_P Parameter: Timepoint (hr) Value: 6
  misc_feature: MA Experiment 20001757 PARAMETER Experiment Name: At_50mM_NH4NO3_L-to-H_P Parameter: Tissue Value: Leaf
  misc_feature: MA Experiment 20001757 PARAMETER Experiment Name: At_50mM_NH4NO3_L-to-H_P Parameter: Treatment Value: 50mM NH4NO3 vs 100mM Mannitol
  misc_feature: MA Experiment ID: 20001904 Result: Down-regulated in Transcription
  misc_feature: MA Experiment 20001904 PARAMETER Experiment Name: At_Drought_Reproduction_P Parameter: Age (day) Value: 37
  misc_feature: MA Experiment 20001904 PARAMETER Experiment Name: At_Drought_Reproduction_P Parameter: Organism Value: A. thaliana
  misc_feature: MA Experiment 20001904 PARAMETER Experiment Name: At_Drought_Reproduction_P Parameter: Plant Line Value: WS
  misc_feature: MA Experiment 20001904 PARAMETER Experiment Name: At_Drought_Reproduction_P Parameter: Timepoint (day) Value: 7
  misc_feature: MA Experiment 20001904 PARAMETER Experiment Name: At_Drought_Reproduction_P Parameter: Tissue Value: Rosettes
  misc_feature: MA Experiment 20001904 PARAMETER Experiment Name: At_Drought_Reproduction_P Parameter: Treatment Value: Drought vs. No Drought
gtcaaggacgttttaagaatctggtggaattgatttgatagtagtatacaattgtgatgtatatatacatacaaatattaactgttcttggatttattgaaaggaaatgactttaaattacaagaagcgtgacccacacgttaagtcagtctttctttactaatattcttttcgattagtcaaataaacctcatgaacaagtcattggagcccacttaaactctacttttctattcttcttctttctttttgttattctatatattagttagcaacttccacgttgtagcgatggaaggatccaagctacttccttgcgtccataagtctccggttcccacctcccaccaattatatataaattatgagattttgggtttaacaaaactcaaaaaacacaaatacacccaaaacaagatgagctcctctgactcttcttccgccgaatcccgtctagccacggctaagacggttctcaccaccgcggcttcggtggctgcgaccgcaatgctagctcgatctttagtccaagattatttgcctgacgaggtgcatcactacatttcctatggattccgttccatctttggttacttctcatcccaaatgacgataatcatcgaagaatttgaaggttttgctcacaatgaagtctttgaagctgcagaggcctatctagccaccaagatctctccttctaacaaaagaatcaaagtgagtaaacatgagaaagaaaacaactacaatgtcaccgtggagcgtgacgaagaagttgttgacacctacaatggcgtcaaattccagtggatcctccattgtcgtcatgtcgagtccaagcacttccacaacccacgggatctaaactccacactgagatctgaggtccgatcattcgaactcaacttccacaagaaattcaaagacgtagctcttgaatcttacttgccattcatggtgaaaagagccacgttgatgaagcaagagaagaaaacactcaagatcttcactctctccccagaaaacatgtatgggaactactctgacgcgtggacctctgttactcttgaccatccttctaccttcaaaactctagcaatggattcagatgtcaagacaagtgtgatggaagatctagacaaattcgtaaagcgaagagacttctataaaagggttggtaaagcttggaagagaggttacttgctgtacggtccaccaggcacagggaagtcaagcttgatcgcagccatggccaatcatctcaactttgatatatacgacctagagttgaccgcggttaacaacaattctgagctccggcgattattgattgccactgctaatcgttcgattcttatcgtagaagatatcgattgttcactagaattgaaagataggactagcgatgaacctcctcgggaatctgacgatatagaagatccacggtataaaaaagtgacactctctggactgttgaatttcatagatggtctatggtcaagctgcggtgacgaaaggatcataatcttcacaaccaattacaaagagaaactcgacgcggccttgctgagaccaggacgtatggatatgcacatccacatgtcgtattgcacaccaagtactttcaaagctcttgctttgaactatcttgagatcaaagagcaccgccttttcagcaagatcgaggaaggtattgaggcgacagaggtcactccagcagaagtagctgaacagcttatgagaaatgactctgtagacaaggttcttgagggtttgattgagttcttgaaagtcaagaagatcgaaaacgaacaagataaggccaaaacagagaagcaagagttggagaacaagaaaaagaccaaggagggaacagattccgtagtcaagaaagaggttgatgaacagctagtgaggaatgaccgtgttgataaggttcttgagggtttggtcgagttgttaaaagccaagaagatcgaggacgaccaagataaagccaaacatgaggaggttgaacaacattaacttgtgagatatcaatacctaaatcattaaatcgccagttactgtctataatctacagattcatttataaacctagtcctaagataaaataatcttagagagattgagaccaaaaaagggaaaaaattgaggagatcagataaaacacctctgcatccgagtggtagctgtaaagagaagagcacgtgtatttatacaaaactatgcgtttagcttgttttttctctctgttttttttctaactttttttagcacaatttgttttaagct

SEQ ID NO: 22005 - protein, 576 aa, Arabidopsis thaliana
  peptide (1)..(576): Ceres Seq. ID no. 13486669
  misc_feature (301)..(492): Pfam Name: ATPase family associated with various cellular Pfam Description: ATPase family associated with various cellular
  misc_feature (48)..(388): Homolog of NCBI NO: 7485704 NR Description: hypothetical protein F18B3.220 - Arabidopsis
  misc_feature (530)..(568): Homolog of NCBI NO: 39104562 NR Description: putative BCS1 protein [Arabidopsis thaliana]
  misc_feature (48)..(507): Homolog of NCBI NO: 39104562 NR Description: putative BCS1 protein [Arabidopsis thaliana]
  misc_feature (530)..(568): Homolog of NCBI NO: 30693380 NR Description: AAA-type ATPase family [Arabidopsis thaliana]
  misc_feature (530)..(568): Homolog of NCBI NO: 7485704 NR Description: hypothetical protein F18B3.220 - Arabidopsis
  misc_feature (387)..(507): Homolog of NCBI NO: 7485704 NR Description: hypothetical protein F18B3.220 - Arabidopsis
  misc_feature (48)..(507): Homolog of NCBI NO: 30693380 NR Description: AAA-type ATPase family [Arabidopsis thaliana]
  misc_feature (43)..(576): Homolog of NCBI NO: 21592769 NR Description: BCS1 protein-like protein [Arabidopsis thaliana]
  misc_feature (43)..(576): Homolog of NCBI NO: 7485703 NR Description: hypothetical protein F18B3.210 - Arabidopsis
  misc_feature (1)..(576): Homolog of NCBI NO: 30693378 NR Description: AAA-type ATPase family [Arabidopsis thaliana]
MEGSKLLPCVHKSPVPTSHQLYINYEILGLTKLKKHKYTQNKMSSSDSSSAESRLATAKTVLTTAASVAATAMLARSLVQDYLPDEVHHYISYGFRSIFGYFSSQMTIIIEEFEGFAHNEVFEAAEAYLATKISPSNKRIKVSKHEKENNYNVTVERDEEVVDTYNGVKFQWILHCRHVESKHFHNPRDLNSTLRSEVRSFELNFHKKFKDVALESYLPFMVKRATLMKQEKKTLKIFTLSPENMYGNYSDAWTSVTLDHPSTFKTLAMDSDVKTSVMEDLDKFVKRRDFYKRVGKAWKRGYLLYGPPGTGKSSLIAAMANHLNFDIYDLELTAVNNNSELRRLLIATANRSILIVEDIDCSLELKDRTSDEPPRESDDIEDPRYKKVTLSGLLNFIDGLWSSCGDERIIIFTTNYKEKLDAALLRPGRMDMHIHMSYCTPSTFKALALNYLEIKEHRLFSKIEEGIEATEVTPAEVAEQLMRNDSVDKVLEGLIEFLKVKKIENEQDKAKTEKQELENKKKTKEGTDSVVKKEVDEQLVRNDRVDKVLEGLVELLKAKKIEDDQDKAKHEEVEQH

SEQ ID NO: 22006 - protein, 534 aa, Arabidopsis thaliana
  peptide (1)..(534): Ceres Seq. ID no. 13486670
  misc_feature (259)..(450): Pfam Name: ATPase family associated with various cellular Pfam Description: ATPase family associated with various cellular
  misc_feature (488)..(526): Homolog of NCBI NO: 7485704 NR Description: hypothetical protein F18B3.220 - Arabidopsis
  misc_feature (345)..(465): Homolog of NCBI NO: 7485704 NR Description: hypothetical protein F18B3.220 - Arabidopsis
  misc_feature (6)..(346): Homolog of NCBI NO: 7485704 NR Description: hypothetical protein F18B3.220 - Arabidopsis
  misc_feature (488)..(526): Homolog of NCBI NO: 39104562 NR Description: putative BCS1 protein [Arabidopsis thaliana]
  misc_feature (6)..(465): Homolog of NCBI NO: 39104562 NR Description: putative BCS1 protein [Arabidopsis thaliana]
  misc_feature (488)..(526): Homolog of NCBI NO: 30693380 NR Description: AAA-type ATPase family [Arabidopsis thaliana]
  misc_feature (6)..(465): Homolog of NCBI NO: 30693380 NR Description: AAA-type ATPase family [Arabidopsis thaliana]
  misc_feature (1)..(534): Homolog of NCBI NO: 21592769 NR Description: BCS1 protein-like protein [Arabidopsis thaliana]
  misc_feature (1)..(534): Homolog of NCBI NO: 7485703 NR Description: hypothetical protein F18B3.210 - Arabidopsis
  misc_feature (1)..(534): Homolog of NCBI NO: 30693378 NR Description: AAA-type ATPase family [Arabidopsis thaliana]
MSSSDSSSAESRLATAKTVLTTAASVAATAMLARSLVQDYLPDEVHHYISYGFRSIFGYFSSQMTIIIEEFEGFAHNEVFEAAEAYLATKISPSNKRIKVSKHEKENNYNVTVERDEEVVDTYNGVKFQWILHCRHVESKHFHNPRDLNSTLRSEVRSFELNFHKKFKDVALESYLPFMVKRATLMKQEKKTLKIFTLSPENMYGNYSDAWTSVTLDHPSTFKTLAMDSDVKTSVMEDLDKFVKRRDFYKRVGKAWKRGYLLYGPPGTGKSSLIAAMANHLNFDIYDLELTAVNNNSELRRLLIATANRSILIVEDIDCSLELKDRTSDEPPRESDDIEDPRYKKVTLSGLLNFIDGLWSSCGDERIIIFTTNYKEKLDAALLRPGRMDMHIHMSYCTPSTFKALALNYLEIKEHRLFSKIEEGIEATEVTPAEVAEQLMRNDSVDKVLEGLIEFLKVKKIENEQDKAKTEKQELENKKKTKEGTDSVVKKEVDEQLVRNDRVDKVLEGLVELLKAKKIEDDQDKAKHEEVEQH

SEQ ID NO: 22007 - protein, 504 aa, Arabidopsis thaliana
  peptide (1)..(504): Ceres Seq. ID no. 13486671
  misc_feature (229)..(420): Pfam Name: ATPase family associated with various cellular Pfam Description: ATPase family associated with various cellular
  misc_feature (458)..(496): Homolog of NCBI NO: 7485704 NR Description: hypothetical protein F18B3.220 - Arabidopsis
  misc_feature (315)..(435): Homolog of NCBI NO: 7485704 NR Description: hypothetical protein F18B3.220 - Arabidopsis
  misc_feature (1)..(316): Homolog of NCBI NO: 7485704 NR Description: hypothetical protein F18B3.220 - Arabidopsis
  misc_feature (458)..(496): Homolog of NCBI NO: 39104562 NR Description: putative BCS1 protein [Arabidopsis thaliana]
  misc_feature (1)..(435): Homolog of NCBI NO: 39104562 NR Description: putative BCS1 protein [Arabidopsis thaliana]
  misc_feature (458)..(496): Homolog of NCBI NO: 30693380 NR Description: AAA-type ATPase family [Arabidopsis thaliana]
  misc_feature (1)..(435): Homolog of NCBI NO: 30693380 NR Description: AAA-type ATPase family [Arabidopsis thaliana]
  misc_feature (1)..(504): Homolog of NCBI NO: 21592769 NR Description: BCS1 protein-like protein [Arabidopsis thaliana]
  misc_feature (1)..(504): Homolog of NCBI NO: 7485703 NR Description: hypothetical protein F18B3.210 - Arabidopsis
  misc_feature (1)..(504): Homolog of NCBI NO: 30693378 NR Description: AAA-type ATPase family [Arabidopsis thaliana]
MLARSLVQDYLPDEVHHYISYGFRSIFGYFSSQMTIIIEEFEGFAHNEVFEAAEAYLATKISPSNKRIKVSKHEKENNYNVTVERDEEVVDTYNGVKFQWILHCRHVESKHFHNPRDLNSTLRSEVRSFELNFHKKFKDVALESYLPFMVKRATLMKQEKKTLKIFTLSPENMYGNYSDAWTSVTLDHPSTFKTLAMDSDVKTSVMEDLDKFVKRRDFYKRVGKAWKRGYLLYGPPGTGKSSLIAAMANHLNFDIYDLELTAVNNNSELRRLLIATANRSILIVEDIDCSLELKDRTSDEPPRESDDIEDPRYKKVTLSGLLNFIDGLWSSCGDERIIIFTTNYKEKLDAALLRPGRMDMHIHMSYCTPSTFKALALNYLEIKEHRLFSKIEEGIEATEVTPAEVAEQLMRNDSVDKVLEGLIEFLKVKKIENEQDKAKTEKQELENKKKTKEGTDSVVKKEVDEQLVRNDRVDKVLEGLVELLKAKKIEDDQDKAKHEEVEQH

SEQ ID NO: 22008 - DNA, 1132 bp, Arabidopsis thaliana
  misc_feature (1)..(1132): Ceres Seq. ID no. 12348495
  misc_feature: MA Experiment ID: 108488 Result: Down-regulated in Transcription
  misc_feature: MA Experiment ID: 108561 Result: Up-regulated in Transcription
  misc_feature: MA Experiment 108561 PARAMETER Experiment Name: At_100uM_ABA_cDNA_P Parameter: Timepoint (hr) Value: 6
  misc_feature: MA Experiment 108561 PARAMETER Experiment Name: At_100uM_ABA_cDNA_P Parameter: Tissue Value: Aerial
  misc_feature: MA Experiment 108561 PARAMETER Experiment Name: At_100uM_ABA_cDNA_P Parameter: Treatment Value: 100uM ABA vs. No Treatment
  misc_feature: MA Experiment ID: 108572 Result: Up-regulated in Transcription
  misc_feature: MA Experiment 108572 PARAMETER Experiment Name: At_Drought_cDNA_P Parameter: Timepoint (hr) Value: 1
  misc_feature: MA Experiment 108572 PARAMETER Experiment Name: At_Drought_cDNA_P Parameter: Tissue Value: Aerial
  misc_feature: MA Experiment 108572 PARAMETER Experiment Name: At_Drought_cDNA_P Parameter: Treatment Value: Drought vs. No Drought
  misc_feature: MA Experiment ID: 108573 Result: Up-regulated in Transcription
  misc_feature: MA Experiment 108573 PARAMETER Experiment Name: At_Drought_cDNA_P Parameter: Timepoint (hr) Value: 6
  misc_feature: MA Experiment 108573 PARAMETER Experiment Name: At_Drought_cDNA_P Parameter: Tissue Value: Aerial
  misc_feature: MA Experiment 108573 PARAMETER Experiment Name: At_Drought_cDNA_P Parameter: Treatment Value: Drought vs. No Drought
  misc_feature: MA Experiment ID: 108577 Result: Down-regulated in Transcription
  misc_feature: MA Experiment 108577 PARAMETER Experiment Name: At_42deg_Heat_cDNA_P Parameter: Temperature (deg C) Value: 42 vs. 22
  misc_feature: MA Experiment 108577 PARAMETER Experiment Name: At_42deg_Heat_cDNA_P Parameter: Timepoint (hr) Value: 6
  misc_feature: MA Experiment 108577 PARAMETER Experiment Name: At_42deg_Heat_cDNA_P Parameter: Tissue Value: Aerial
  misc_feature: MA Experiment ID: 108595 Result: Down-regulated in Transcription
  misc_feature: MA Experiment 108595 PARAMETER Experiment Name: At_Ler-pi_Ovule_cDNA_P Parameter: Plant Line Value: null
  misc_feature: MA Experiment ID: 108605 Result: Up-regulated in Transcription
  misc_feature: MA Experiment 108605 PARAMETER Experiment Name: At_100uM_ABA_cDNA_P Parameter: Timepoint (hr) Value: 6
  misc_feature: MA Experiment 108605 PARAMETER Experiment Name: At_100uM_ABA_cDNA_P Parameter: Tissue Value: Aerial
  misc_feature: MA Experiment 108605 PARAMETER Experiment Name: At_100uM_ABA_cDNA_P Parameter: Treatment Value: 100uM ABA vs. No Treatment
  misc_feature: MA Experiment ID: 108607 Result: Up-regulated in Transcription
  misc_feature: MA Experiment 108607 PARAMETER Experiment Name: At_100uM_ABA_cDNA_P Parameter: Timepoint (hr) Value: 4
  misc_feature: MA Experiment 108607 PARAMETER Experiment Name: At_100uM_ABA_cDNA_P Parameter: Tissue Value: Aerial
  misc_feature: MA Experiment 108607 PARAMETER Experiment Name: At_100uM_ABA_cDNA_P Parameter: Treatment Value: 100uM ABA vs. No Treatment
  misc_feature: MA Experiment ID: 20000069 Result: Up-regulated in Transcription
  misc_feature: MA Experiment 20000069 PARAMETER Experiment Name: At_100uM_ABA_Mutants_cDNA_P Parameter: Plant Line Value: CS23
  misc_feature: MA Experiment 20000069 PARAMETER Experiment Name: At_100uM_ABA_Mutants_cDNA_P Parameter: Timepoint (hr) Value: 6
  misc_feature: MA Experiment 20000069 PARAMETER Experiment Name: At_100uM_ABA_Mutants_cDNA_P Parameter: Tissue Value: Aerial
  misc_feature: MA Experiment 20000069 PARAMETER Experiment Name: At_100uM_ABA_Mutants_cDNA_P Parameter: Treatment Value: 100uM ABA vs. No Treatment
  misc_feature: MA Experiment ID: 20000070 Result: Up-regulated in Transcription
  misc_feature: MA Experiment 20000070 PARAMETER Experiment Name: At_100uM_ABA_Mutants_cDNA_P Parameter: Plant Line Value: CS24
  misc_feature: MA Experiment 20000070 PARAMETER Experiment Name: At_100uM_ABA_Mutants_cDNA_P Parameter: Timepoint (hr) Value: 6
  misc_feature: MA Experiment 20000070 PARAMETER Experiment Name: At_100uM_ABA_Mutants_cDNA_P Parameter: Tissue Value: Aerial
  misc_feature: MA Experiment 20000070 PARAMETER Experiment Name: At_100uM_ABA_Mutants_cDNA_P Parameter: Treatment Value: 100uM ABA vs. No Treatment
  misc_feature: MA Experiment ID: 20000071 Result: Up-regulated in Transcription
  misc_feature: MA Experiment 20000071 PARAMETER Experiment Name: At_100uM_ABA_Mutants_cDNA_P Parameter: Plant Line Value: CS8104
  misc_feature: MA Experiment 20000071 PARAMETER Experiment Name: At_100uM_ABA_Mutants_cDNA_P Parameter: Timepoint (hr) Value: 6
  misc_feature: MA Experiment 20000071 PARAMETER Experiment Name: At_100uM_ABA_Mutants_cDNA_P Parameter: Tissue Value: Aerial
  misc_feature: MA Experiment 20000071 PARAMETER Experiment Name: At_100uM_ABA_Mutants_cDNA_P Parameter: Treatment Value: 100uM ABA vs. No Treatment
  misc_feature: MA Experiment ID: 20000086 Result: Up-regulated in Transcription
  misc_feature: MA Experiment 20000086 PARAMETER Experiment Name: At_100uM_ABA_Mutants_cDNA_P Parameter: Plant Line Value: CS22
  misc_feature: MA Experiment 20000086 PARAMETER Experiment Name: At_100uM_ABA_Mutants_cDNA_P Parameter: Timepoint (hr) Value: 6
  misc_feature: MA Experiment 20000086 PARAMETER Experiment Name: At_100uM_ABA_Mutants_cDNA_P Parameter: Tissue Value: Aerial
  misc_feature: MA Experiment 20000086 PARAMETER Experiment Name: At_100uM_ABA_Mutants_cDNA_P Parameter: Treatment Value: 100uM ABA vs. No Treatment
  misc_feature: MA Experiment ID: 20000088 Result: Up-regulated in Transcription
  misc_feature: MA Experiment 20000088 PARAMETER Experiment Name: At_100uM_ABA_Mutants_cDNA_P Parameter: Plant Line Value: Landsberg
  misc_feature: MA Experiment 20000088 PARAMETER Experiment Name: At_100uM_ABA_Mutants_cDNA_P Parameter: Timepoint (hr) Value: 6
  misc_feature: MA Experiment 20000088 PARAMETER Experiment Name: At_100uM_ABA_Mutants_cDNA_P Parameter: Tissue Value: Aerial
  misc_feature: MA Experiment 20000088 PARAMETER Experiment Name: At_100uM_ABA_Mutants_cDNA_P Parameter: Treatment Value: 100uM ABA vs. No Treatment
  misc_feature: MA Experiment ID: 20000111 Result: Down-regulated in Transcription
  misc_feature: MA Experiment 20000111 PARAMETER Experiment Name: At_42deg_Heat_cDNA_P Parameter: Temperature (deg C) Value: 42 vs. 22
  misc_feature: MA Experiment 20000111 PARAMETER Experiment Name: At_42deg_Heat_cDNA_P Parameter: Timepoint (hr) Value: 6
  misc_feature: MA Experiment 20000111 PARAMETER Experiment Name: At_42deg_Heat_cDNA_P Parameter: Tissue Value: Aerial
  misc_feature: MA Experiment ID: 20000224 Result: Down-regulated in Transcription
  misc_feature: MA Experiment ID: 20000314 Result: Down-regulated in Transcription
  misc_feature: MA Experiment 20000314 PARAMETER Experiment Name: At_14day_Shoots-Roots_Sub_P Parameter: Age (day) Value: 14
  misc_feature: MA Experiment 20000314 PARAMETER Experiment Name: At_14day_Shoots-Roots_Sub_P Parameter: Organism Value: A. thaliana
  misc_feature: MA Experiment 20000314 PARAMETER Experiment Name: At_14day_Shoots-Roots_Sub_P Parameter: Plant Line Value: WS
  misc_feature: MA Experiment 20000314 PARAMETER Experiment Name: At_14day_Shoots-Roots_Sub_P Parameter: Tissue Value: Roots vs. Whole Plant
  misc_feature: MA Experiment ID: 20000328 Result: Down-regulated in Transcription
  misc_feature: MA Experiment 20000328 PARAMETER Experiment Name: At_42deg_Heat_Sub_P Parameter: Age (day) Value: 14
  misc_feature: MA Experiment 20000328 PARAMETER Experiment Name: At_42deg_Heat_Sub_P Parameter: Organism Value: A. thaliana
  misc_feature: MA Experiment 20000328 PARAMETER Experiment Name: At_42deg_Heat_Sub_P Parameter: Plant Line Value: WS
  misc_feature: MA Experiment 20000328 PARAMETER Experiment Name: At_42deg_Heat_Sub_P Parameter: Temperature (deg C) Value: 42 vs. 22
  misc_feature: MA Experiment 20000328 PARAMETER Experiment Name: At_42deg_Heat_Sub_P Parameter: Timepoint (hr) Value: 6
  misc_feature: MA Experiment 20000328 PARAMETER Experiment Name: At_42deg_Heat_Sub_P Parameter: Tissue Value: Aerial
  misc_feature: MA Experiment ID: 20000355 Result: Down-regulated in Transcription
  misc_feature: MA Experiment 20000355 PARAMETER Experiment Name: At_Siliques_Sub_P Parameter: Age (day) Value: 21
  misc_feature: MA Experiment 20000355 PARAMETER Experiment Name: At_Siliques_Sub_P Parameter: Organism Value: A. thaliana
  misc_feature: MA Experiment 20000355 PARAMETER Experiment Name: At_Siliques_Sub_P Parameter: Plant Line Value: WS
  misc_feature: MA Experiment 20000355 PARAMETER Experiment Name: At_Siliques_Sub_P Parameter: Tissue Value: Less Than 5mm Siliques vs. Whole Plant
aaaaaaacaattattttcagacacagagagactcagacaggagatatgaactgcggaggaaaggtggtctgcgttaccggagcttccggctacatagcgtcttggattgtcaagcttttgctcctccgtggctacaccgtcaatgccactgttcgagatccaaaggacaagaagaaaacagaacatcttcttgcactagacggtgcaaaagaaagactcaaattgttcaaagcagatcttttggaagaatcttcttttgatcaagctatcgatggttgtgatgctgtcttccacactgcttctccagttctattcactgtcacagatcctcagactgagctgattgatccagccttaaagggtactattaacgtccttaatacatgcaaacaagtttcttctgtcaagagggtcattctgacatcttccacggctgcggttctctctcgtcagcctcctattgggccaaacgacctggtggacgagactttcttctccgatccaagtctatgcagggagacaaagaattggtattcactctccaagattttggccgagaatgcagcgtggcaatttgccaaagacaatggaatcgacatggttgtgttgaatcctggatttatttgcggaccactcttgcaaccaactcttaacatgtcggtagagctaattgtggatttcataaatggtaagaaccctttcaataaaagatactacaggttctcggacgtaagagatgtcgccttggttcatatcaaagcgttggagactccttcagccaatggcagatacatcatcgatggtccaaatatgagtgtaaacgacattatagacattcttcggaagctgttcccagatttgtctattgctgatacgaatgaagaaagtgagatgaatgagatgatatgccaagtgtgtgtggagaaagtgaaaaatttgggagtagagttcactcctatgaaatcaagccttagagacactattgttagcctcaaggagaaatgtcttttatgattctgttcgtatatttgtaactattatgtgtatttttattttgttagtattactaattcaagtggtttaagttgttgagactctttaaaatctaagcattttataaagaataatatat

SEQ ID NO: 22009 - protein, 337 aa, Arabidopsis thaliana
  peptide (1)..(337): Ceres Seq. ID no. 12348496
  misc_feature (25)..(288): Pfam Name: 3-beta hydroxysteroid dehydrogenase/isomerase family Pfam Description: 3-beta hydroxysteroid dehydrogenase/isomerase
  misc_feature (17)..(334): Homolog of NCBI NO: 15239741 NR Description: cinnamyl-alcohol dehydrogenase - like protein
  misc_feature (54)..(337): Homolog of NCBI NO: 30681183 NR Description: cinnamyl-alcohol dehydrogenase (CAD) family
  misc_feature (54)..(337): Homolog of NCBI NO: 16648726 NR Description: At1g09500/F14J9_16 [Arabidopsis thaliana]
  misc_feature (16)..(337): Homolog of NCBI NO: 12597772 NR Description: cinnamyl alcohol dehydrogenase, putative
  misc_feature (16)..(337): Homolog of NCBI NO: 30697406 NR Description: cinnamyl-alcohol dehydrogenase (CAD) family
  misc_feature (19)..(337): Homolog of NCBI NO: 15217531 NR Description: putative cinnamyl alcohol dehydrogenase; protein
  misc_feature (19)..(337): Homolog of NCBI NO: 15217530 NR Description: putative cinnamyl alcohol dehydrogenase
  misc_feature (16)..(337): Homolog of NCBI NO: 25284016 NR Description: hypothetical protein [imported] - Arabidopsis
  misc_feature (8)..(337): Homolog of NCBI NO: 15217528 NR Description: putative cinnamyl alcohol dehydrogenase; protein
  misc_feature (16)..(337): Homolog of NCBI NO: 15217529 NR Description: putative cinnamyl alcohol dehydrogenase
KKTIIFRHRETQTGDMNCGGKVVCVTGASGYIASWIVKLLLLRGYTVNATVRDPKDKKKTEHLLALDGAKERLKLFKADLLEESSFDQAIDGCDAVFHTASPVLFTVTDPQTELIDPALKGTINVLNTCKQVSSVKRVILTSSTAAVLSRQPPIGPNDLVDETFFSDPSLCRETKNWYSLSKILAENAAWQFAKDNGIDMVVLNPGFICGPLLQPTLNMSVELIVDFINGKNPFNKRYYRFSDVRDVALVHIKALETPSANGRYIIDGPNMSVNDIIDILRKLFPDLSIADTNEESEMNEMICQVCVEKVKNLGVEFTPMKSSLRDTIVSLKEKCLL

SEQ ID NO: 22010 - protein, 322 aa, Arabidopsis thaliana
  peptide (1)..(322): Ceres Seq. ID no. 12348497
  misc_feature (10)..(273): Pfam Name: 3-beta hydroxysteroid dehydrogenase/isomerase family Pfam Description: 3-beta hydroxysteroid dehydrogenase/isomerase
  misc_feature (2)..(319): Homolog of NCBI NO: 15239741 NR Description: cinnamyl-alcohol dehydrogenase - like protein
  misc_feature (39)..(322): Homolog of NCBI NO: 30681183 NR Description: cinnamyl-alcohol dehydrogenase (CAD) family
  misc_feature (39)..(322): Homolog of NCBI NO: 16648726 NR Description: At1g09500/F14J9_16 [Arabidopsis thaliana]
  misc_feature (1)..(322): Homolog of NCBI NO: 12597772 NR Description: cinnamyl alcohol dehydrogenase, putative
  misc_feature (1)..(322): Homolog of NCBI NO: 30697406 NR Description: cinnamyl-alcohol dehydrogenase (CAD) family
  misc_feature (4)..(322): Homolog of NCBI NO: 15217531 NR Description: putative cinnamyl alcohol dehydrogenase; protein
  misc_feature (4)..(322): Homolog of NCBI NO: 15217530 NR Description: putative cinnamyl alcohol dehydrogenase
  misc_feature (1)..(322): Homolog of NCBI NO: 25284016 NR Description: hypothetical protein [imported] - Arabidopsis
  misc_feature (1)..(322): Homolog of NCBI NO: 15217528 NR Description: putative cinnamyl alcohol dehydrogenase; protein
  misc_feature (1)..(322): Homolog of NCBI NO: 15217529 NR Description: putative cinnamyl alcohol dehydrogenase
MNCGGKVVCVTGASGYIASWIVKLLLLRGYTVNATVRDPKDKKKTEHLLALDGAKERLKLFKADLLEESSFDQAIDGCDAVFHTASPVLFTVTDPQTELIDPALKGTINVLNTCKQVSSVKRVILTSSTAAVLSRQPPIGPNDLVDETFFSDPSLCRETKNWYSLSKILAENAAWQFAKDNGIDMVVLNPGFICGPLLQPTLNMSVELIVDFINGKNPFNKRYYRFSDVRDVALVHIKALETPSANGRYIIDGPNMSVNDIIDILRKLFPDLSIADTNEESEMNEMICQVCVEKVKNLGVEFTPMKSSLRDTIVSLKEKCLL

SEQ ID NO: 22011 - DNA, 945 bp, Arabidopsis thaliana
  misc_feature (1)..(945): Ceres Seq. ID no. 13592238
  misc_feature: MA Experiment ID: 108434 Result: Up-regulated in Transcription
  misc_feature: MA Experiment 108434 PARAMETER Experiment Name: At_Root_Tips_cDNA_P Parameter: Tissue Value: Root Tips
  misc_feature: MA Experiment ID: 108435 Result: Down-regulated in Transcription
  misc_feature: MA Experiment 108435 PARAMETER Experiment Name: At_stm_Mutants_cDNA_P Parameter: Plant Line Value: wt Landsburg vs stm
  misc_feature: MA Experiment 108435 PARAMETER Experiment Name: At_stm_Mutants_cDNA_P Parameter: Tissue Value: Shoot Apical Meristem Region
  misc_feature: MA Experiment ID: 108488 Result: Up-regulated in Transcription
  misc_feature: MA Experiment ID: 108595 Result: Down-regulated in Transcription
  misc_feature: MA Experiment 108595 PARAMETER Experiment Name: At_Ler-pi_Ovule_cDNA_P Parameter: Plant Line Value: null
  misc_feature: MA Experiment ID: 20000071 Result: Down-regulated in Transcription
  misc_feature: MA Experiment 20000071 PARAMETER Experiment Name: At_100uM_ABA_Mutants_cDNA_P Parameter: Plant Line Value: CS8104
  misc_feature: MA Experiment 20000071 PARAMETER Experiment Name: At_100uM_ABA_Mutants_cDNA_P Parameter: Timepoint (hr) Value: 6
  misc_feature: MA Experiment 20000071 PARAMETER Experiment Name: At_100uM_ABA_Mutants_cDNA_P Parameter: Tissue Value: Aerial
  misc_feature: MA Experiment 20000071 PARAMETER Experiment Name: At_100uM_ABA_Mutants_cDNA_P Parameter: Treatment Value: 100uM ABA vs. No Treatment
  misc_feature: MA Experiment ID: 20000185 Result: Down-regulated in Transcription
  misc_feature: MA Experiment 20000185 PARAMETER Experiment Name: At_Roots__P Parameter: Age (day) Value: 7 vs. 21
  misc_feature: MA Experiment 20000185 PARAMETER Experiment Name: At_Roots__P Parameter: Organism Value: A. thaliana
  misc_feature: MA Experiment 20000185 PARAMETER Experiment Name: At_Roots__P Parameter: Tissue Value: Roots vs. Whole Plant
  misc_feature: MA Experiment ID: 20000437 Result: Down-regulated in Transcription
  misc_feature: MA Experiment 20000437 PARAMETER Experiment Name: At_Drought_P Parameter: Age (day) Value: 8
  misc_feature: MA Experiment 20000437 PARAMETER Experiment Name: At_Drought_P Parameter: Organism Value: A. thaliana
  misc_feature: MA Experiment 20000437 PARAMETER Experiment Name: At_Drought_P Parameter: Plant Line Value: WS
  misc_feature: MA Experiment 20000437 PARAMETER Experiment Name: At_Drought_P Parameter: Timepoint (hr) Value: 24
  misc_feature: MA Experiment 20000437 PARAMETER Experiment Name: At_Drought_P Parameter: Tissue Value: Whole Plant
  misc_feature: MA Experiment 20000437 PARAMETER Experiment Name: At_Drought_P Parameter: Treatment Value: Drought vs. No Drought
  misc_feature: MA Experiment ID: 20000439 Result: Down-regulated in Transcription
  misc_feature: MA Experiment 20000439 PARAMETER Experiment Name: At_Roots__P Parameter: Age (day) Value: 14 vs. 21
  misc_feature: MA Experiment 20000439 PARAMETER Experiment Name: At_Roots__P Parameter: Organism Value: A. thaliana
  misc_feature: MA Experiment 20000439 PARAMETER Experiment Name: At_Roots__P Parameter: Tissue Value: Roots vs. Whole Plant
  misc_feature: MA Experiment ID: 20000794 Result: Down-regulated in Transcription
  misc_feature: MA Experiment 20000794 PARAMETER Experiment Name: At_Petals_P Parameter: Age (day) Value: 23-25 days
  misc_feature: MA Experiment 20000794 PARAMETER Experiment Name: At_Petals_P Parameter: Plant Line Value: WS
  misc_feature: MA Experiment 20000794 PARAMETER Experiment Name: At_Petals_P Parameter: Tissue Value: Petals vs. Whole plant
  misc_feature: MA Experiment ID: 20001757 Result: Up-regulated in Transcription
  misc_feature: MA Experiment 20001757 PARAMETER Experiment Name: At_50mM_NH4NO3_L-to-H_P Parameter: Timepoint (hr) Value: 6
  misc_feature: MA Experiment 20001757 PARAMETER Experiment Name: At_50mM_NH4NO3_L-to-H_P Parameter: Tissue Value: Leaf
  misc_feature: MA Experiment 20001757 PARAMETER Experiment Name: At_50mM_NH4NO3_L-to-H_P Parameter: Treatment Value: 50mM NH4NO3 vs 100mM Mannitol
  misc_feature: MA Experiment ID: 20001906 Result: Down-regulated in Transcription
  misc_feature: MA Experiment 20001906 PARAMETER Experiment Name: At_Drought_Reproduction_P Parameter: Age (day) Value: 35
  misc_feature: MA Experiment 20001906 PARAMETER Experiment Name: At_Drought_Reproduction_P Parameter: Organism Value: A. thaliana
  misc_feature: MA Experiment 20001906 PARAMETER Experiment Name: At_Drought_Reproduction_P Parameter: Plant Line Value: WS
  misc_feature: MA Experiment 20001906 PARAMETER Experiment Name: At_Drought_Reproduction_P Parameter: Timepoint (day) Value: 5
  misc_feature: MA Experiment 20001906 PARAMETER Experiment Name: At_Drought_Reproduction_P Parameter: Tissue Value: Siliques
  misc_feature: MA Experiment 20001906 PARAMETER Experiment Name: At_Drought_Reproduction_P Parameter: Treatment Value: Drought vs. No Drought
  misc_feature: MA Experiment ID: 20001911 Result: Down-regulated in Transcription
  misc_feature: MA Experiment 20001911 PARAMETER Experiment Name: At_Drought_Reproduction_P Parameter: Age (day) Value: 40
  misc_feature: MA Experiment 20001911 PARAMETER Experiment Name: At_Drought_Reproduction_P Parameter: Organism Value: A. thaliana
  misc_feature: MA Experiment 20001911 PARAMETER Experiment Name: At_Drought_Reproduction_P Parameter: Plant Line Value: WS
  misc_feature: MA Experiment 20001911 PARAMETER Experiment Name: At_Drought_Reproduction_P Parameter: Timepoint (day) Value: 10
  misc_feature: MA Experiment 20001911 PARAMETER Experiment Name: At_Drought_Reproduction_P Parameter: Tissue Value: Flowers
  misc_feature: MA Experiment 20001911 PARAMETER Experiment Name: At_Drought_Reproduction_P Parameter: Treatment Value: Drought vs. No Drought
gggaaagagcagaagaaatttgcagaagagagaaaaacaaaaatggcggttctttgctcgtcttcgacggtgatactctcttcttcttccgtgaaatcctccggaagtgagagaaagtctccgtttttagggttctctttaacggctatctcgaagccgtcggtacgagtcggcatttatgcgaattcgaaaagaggattgcaagtgaagtgtgaagctgagccgacgacgacgacttctcttgttccggcgaatcaacgatggatgttcgacgaagaagaagctaatggccctgacatctggaacacgacatggtatccaaaagcttcagaccatgtgaacacggacaagccctggtttgtggttgatgcaactgacaaaattcttggtagattggcatcgacaattgctaatcacatccgtgggaagaatcttgcctcttacactcctagtgtcgacatgggagcttttgtgattgtggtgaatgctgagaaagttgctgtatctggaaagaagcgtaaccaaaagctgtacaggaggcattcaggacgacctggtggtatgacagtagagacatttgatcaattgcagcagagaattcctgaaagaatcgttgagcatgctgttcgtggaatgcttccaaagggacggcttgggagagctctgttcaatcacctgaaggtgtacaaaggccctgaccatcctcacgaggcccagaaaccgcttgatctgcctatcagggacaagagaatacagctgcaaaaatagaagctccaccactgttccattatcgccaagcgcagagagttttttcttctcaggtttctgtagtttcttcatcccaaaaccagaggaggctttacagattcttgttttcgcttctatcaactctgttatgctacaaaactttctaatttgaaatatttctcgttatttttttttgcc

SEQ ID NO: 22012 - protein, 255 aa, Arabidopsis thaliana
  peptide (1)..(255): Ceres Seq. ID no. 13592239
  misc_feature (119)..(246): Pfam Name: Ribosomal protein L13 Pfam Description: Ribosomal protein L13
  misc_feature (119)..(246): Pfam Name: Ribosomal protein L13 Pfam Description: Ribosomal protein L13
  misc_feature (117)..(247): Homolog of NCBI NO: 23042794 NR Description: hypothetical protein [Trichodesmium erythraeum
  misc_feature (116)..(236): Homolog of NCBI NO: 23124102 NR Description: hypothetical protein [Nostoc punctiforme]
  misc_feature (102)..(246): Homolog of NCBI NO: 33241135 NR Description: Ribosomal protein L13
  misc_feature (114)..(246): Homolog of NCBI NO: 16329914 NR Description: 50S ribosomal protein L13 [Synechocystis sp. PCC
  misc_feature (116)..(246): Homolog of NCBI NO: 33864025 NR Description: 50S ribosomal protein L13 [Prochlorococcus
  misc_feature (117)..(247): Homolog of NCBI NO: 23042794 NR Description: hypothetical protein [Trichodesmium erythraeum
  misc_feature (102)..(246): Homolog of NCBI NO: 33241135 NR Description: Ribosomal protein L13
  misc_feature (116)..(246): Homolog of NCBI NO: 33864025 NR Description: 50S ribosomal protein L13 [Prochlorococcus
  misc_feature (15)..(255): Homolog of NCBI NO: 15218435 NR Description: ribosomal protein L13p family [Arabidopsis
  misc_feature (15)..(255): Homolog of NCBI NO: 132659 NR Description: 50S RIBOSOMAL PROTEIN L13, CHLOROPLAST PRECURSOR
  misc_feature (66)..(252): Homolog of NCBI NO: 34909522 NR Description: putative ribosomal protein L13
  misc_feature (116)..(246): Homolog of NCBI NO: 17231680 NR Description: 50S ribosomal protein L13 [Nostoc sp. PCC 7120]
  misc_feature (119)..(246): Homolog of NCBI NO: 22297652 NR Description: 50S ribosomal protein L13 [Thermosynechococcus
  misc_feature (114)..(246): Homolog of NCBI NO: 16329914 NR Description: 50S ribosomal protein L13 [Synechocystis sp. PCC
  misc_feature (116)..(236): Homolog of NCBI NO: 23124102 NR Description: hypothetical protein [Nostoc punctiforme]
  misc_feature (119)..(246): Homolog of NCBI NO: 22297652 NR Description: 50S ribosomal protein L13 [Thermosynechococcus
  misc_feature (116)..(246): Homolog of NCBI NO: 17231680 NR Description: 50S ribosomal protein L13 [Nostoc sp. PCC 7120]
  misc_feature (66)..(252): Homolog of NCBI NO: 34909522 NR Description: putative ribosomal protein L13
  misc_feature (15)..(255): Homolog of NCBI NO: 132659 NR Description: 50S RIBOSOMAL PROTEIN L13, CHLOROPLAST PRECURSOR
  misc_feature (15)..(255): Homolog of NCBI NO: 15218435 NR Description: ribosomal protein L13p family [Arabidopsis
GKEQKKFAEERKTKMAVLCSSSTVILSSSSVKSSGSERKSPFLGFSLTAISKPSVRVGIYANSKRGLQVKCEAEPTTTTSLVPANQRWMFDEEEANGPDIWNTTWYPKASDHVNTDKPWFVVDATDKILGRLASTIANHIRGKNLASYTPSVDMGAFVIVVNAEKVAVSGKKRNQKLYRRHSGRPGGMTVETFDQLQQRIPERIVEHAVRGMLPKGRLGRALFNHLKVYKGPDHPHEAQKPLDLPIRDKRIQLQK

SEQ ID NO: 22013 - protein, 241 aa, Arabidopsis thaliana
  peptide (1)..(241): Ceres Seq. ID no. 13592240
  misc_feature (105)..(232): Pfam Name: Ribosomal protein L13 Pfam Description: Ribosomal protein L13
  misc_feature (105)..(232): Pfam Name: Ribosomal protein L13 Pfam Description: Ribosomal protein L13
  misc_feature (103)..(233): Homolog of NCBI NO: 23042794 NR Description: hypothetical protein [Trichodesmium erythraeum
  misc_feature (102)..(222): Homolog of NCBI NO: 23124102 NR Description: hypothetical protein [Nostoc punctiforme]
  misc_feature (88)..(232): Homolog of NCBI NO: 33241135 NR Description: Ribosomal protein L13
  misc_feature (100)..(232): Homolog of NCBI NO: 16329914 NR Description: 50S ribosomal protein L13 [Synechocystis sp. PCC
  misc_feature (102)..(232): Homolog of NCBI NO: 33864025 NR Description: 50S ribosomal protein L13 [Prochlorococcus
  misc_feature (103)..(233): Homolog of NCBI NO: 23042794 NR Description: hypothetical protein [Trichodesmium erythraeum
  misc_feature (88)..(232): Homolog of NCBI NO: 33241135 NR Description: Ribosomal protein L13
  misc_feature (102)..(232): Homolog of NCBI NO: 33864025 NR Description: 50S ribosomal protein L13 [Prochlorococcus
  misc_feature (1)..(241): Homolog of NCBI NO: 15218435 NR Description: ribosomal protein L13p family [Arabidopsis
  misc_feature (1)..(241): Homolog of NCBI NO: 132659 NR Description: 50S RIBOSOMAL PROTEIN L13, CHLOROPLAST PRECURSOR
  misc_feature (52)..(238): Homolog of NCBI NO: 34909522 NR Description: putative ribosomal protein L13
  misc_feature (102)..(232): Homolog of NCBI NO: 17231680 NR Description: 50S ribosomal protein L13 [Nostoc sp. PCC 7120]
  misc_feature (105)..(232): Homolog of NCBI NO: 22297652 NR Description: 50S ribosomal protein L13 [Thermosynechococcus
  misc_feature (100)..(232): Homolog of NCBI NO: 16329914 NR Description: 50S ribosomal protein L13 [Synechocystis sp. PCC
  misc_feature (102)..(222): Homolog of NCBI NO: 23124102 NR Description: hypothetical protein [Nostoc punctiforme]
  misc_feature (105)..(232): Homolog of NCBI NO: 22297652 NR Description: 50S ribosomal protein L13 [Thermosynechococcus
  misc_feature (102)..(232): Homolog of NCBI NO: 17231680 NR Description: 50S ribosomal protein L13 [Nostoc sp. PCC 7120]
  misc_feature (52)..(238): Homolog of NCBI NO: 34909522 NR Description: putative ribosomal protein L13
  misc_feature (1)..(241): Homolog of NCBI NO: 132659 NR Description: 50S RIBOSOMAL PROTEIN L13, CHLOROPLAST PRECURSOR
  misc_feature (1)..(241): Homolog of NCBI NO: 15218435 NR Description: ribosomal protein L13p family [Arabidopsis
MAVLCSSSTVILSSSSVKSSGSERKSPFLGFSLTAISKPSVRVGIYANSKRGLQVKCEAEPTTTTSLVPANQRWMFDEEEANGPDIWNTTWYPKASDHVNTDKPWFVVDATDKILGRLASTIANHIRGKNLASYTPSVDMGAFVIVVNAEKVAVSGKKRNQKLYRRHSGRPGGMTVETFDQLQQRIPERIVEHAVRGMLPKGRLGRALFNHLKVYKGPDHPHEAQKPLDLPIRDKRIQLQK

SEQ ID NO: 22014 - protein, 167 aa, Arabidopsis thaliana
  peptide (1)..(167): Ceres Seq. ID no. 13592241
  misc_feature (31)..(158): Pfam Name: Ribosomal protein L13 Pfam Description: Ribosomal protein L13
  misc_feature (31)..(158): Pfam Name: Ribosomal protein L13 Pfam Description: Ribosomal protein L13
  misc_feature (29)..(159): Homolog of NCBI NO: 23042794 NR Description: hypothetical protein [Trichodesmium erythraeum
  misc_feature (28)..(148): Homolog of NCBI NO: 23124102 NR Description: hypothetical protein [Nostoc punctiforme]
  misc_feature (14)..(158): Homolog of NCBI NO: 33241135 NR Description: Ribosomal protein L13
  misc_feature (26)..(158): Homolog of NCBI NO: 16329914 NR Description: 50S ribosomal protein L13 [Synechocystis sp. PCC
  misc_feature (28)..(158): Homolog of NCBI NO: 33864025 NR Description: 50S ribosomal protein L13 [Prochlorococcus
  misc_feature (29)..(159): Homolog of NCBI NO: 23042794 NR Description: hypothetical protein [Trichodesmium erythraeum
  misc_feature (14)..(158): Homolog of NCBI NO: 33241135 NR Description: Ribosomal protein L13
  misc_feature (28)..(158): Homolog of NCBI NO: 33864025 NR Description: 50S ribosomal protein L13 [Prochlorococcus
  misc_feature (1)..(167): Homolog of NCBI NO: 15218435 NR Description: ribosomal protein L13p family [Arabidopsis
  misc_feature (1)..(167): Homolog of NCBI NO: 132659 NR Description: 50S RIBOSOMAL PROTEIN L13, CHLOROPLAST PRECURSOR
  misc_feature (1)..(164): Homolog of NCBI NO: 34909522 NR Description: putative ribosomal protein L13
  misc_feature (28)..(158): Homolog of NCBI NO: 17231680 NR Description: 50S ribosomal protein L13 [Nostoc sp. PCC 7120]
  misc_feature (31)..(158): Homolog of NCBI NO: 22297652 NR Description: 50S ribosomal protein L13 [Thermosynechococcus
  misc_feature (26)..(158): Homolog of NCBI NO: 16329914 NR Description: 50S ribosomal protein L13 [Synechocystis sp. PCC
  misc_feature (28)..(148): Homolog of NCBI NO: 23124102 NR Description: hypothetical protein [Nostoc punctiforme]
  misc_feature (31)..(158): Homolog of NCBI NO: 22297652 NR Description: 50S ribosomal protein L13 [Thermosynechococcus
  misc_feature (28)..(158): Homolog of NCBI NO: 17231680 NR Description: 50S ribosomal protein L13 [Nostoc sp. PCC 7120]
  misc_feature (1)..(164): Homolog of NCBI NO: 34909522 NR Description: putative ribosomal protein L13
  misc_feature (1)..(167): Homolog of NCBI NO: 132659 NR Description: 50S RIBOSOMAL PROTEIN L13, CHLOROPLAST PRECURSOR
  misc_feature (1)..(167): Homolog of NCBI NO: 15218435 NR Description: ribosomal protein L13p family [Arabidopsis
MFDEEEANGPDIWNTTWYPKASDHVNTDKPWFVVDATDKILGRLASTIANHIRGKNLASYTPSVDMGAFVIVVNAEKVAVSGKKRNQKLYRRHSGRPGGMTVETFDQLQQRIPERIVEHAVRGMLPKGRLGRALFNHLKVYKGPDHPHEAQKPLDLPIRDKRIQLQK

SEQ ID NO: 22015 - DNA, 922 bp, Arabidopsis thaliana
  misc_feature (1)..(922): Ceres Seq. ID no. 12333301
  misc_feature: MA Experiment ID: 108434 Result: Up-regulated in Transcription
  misc_feature: MA Experiment 108434 PARAMETER Experiment Name: At_Root_Tips_cDNA_P Parameter: Tissue Value: Root Tips
  misc_feature: MA Experiment ID: 108462 Result: Down-regulated in Transcription
  misc_feature: MA Experiment 108462 PARAMETER Experiment Name: At_Germinating_Seeds_cDNA_P Parameter: Age (day) Value: 2 vs. 0
  misc_feature: MA Experiment 108462 PARAMETER Experiment Name: At_Germinating_Seeds_cDNA_P Parameter: Tissue Value: Germinating Seeds
  misc_feature: MA Experiment ID: 108463 Result: Down-regulated in Transcription
  misc_feature: MA Experiment 108463 PARAMETER Experiment Name: At_Germinating_Seeds_cDNA_P Parameter: Age (day) Value: 3 vs. 0
  misc_feature: MA Experiment 108463 PARAMETER Experiment Name: At_Germinating_Seeds_cDNA_P Parameter: Tissue Value: Germinating Seeds
  misc_feature: MA Experiment ID: 108464 Result: Down-regulated in Transcription
  misc_feature: MA Experiment 108464 PARAMETER Experiment Name: At_Germinating_Seeds_cDNA_P Parameter: Age (day) Value: 4 vs. 0
  misc_feature: MA Experiment 108464 PARAMETER Experiment Name: At_Germinating_Seeds_cDNA_P Parameter: Tissue Value: Germinating Seeds
  misc_feature: MA Experiment ID: 108501 Result: Up-regulated in Transcription
  misc_feature: MA Experiment 108501 PARAMETER Experiment Name: At_ap2_floral_buds_cDNA_P Parameter: Plant Line Value: ap2 (Ler.)
  misc_feature: MA Experiment 108501 PARAMETER Experiment Name: At_ap2_floral_buds_cDNA_P Parameter: Tissue Value: Closed Flower
  misc_feature: MA Experiment ID: 108569 Result: Up-regulated in Transcription
  misc_feature: MA Experiment 108569 PARAMETER Experiment Name: At_0.001%_MeJA__cDNA_P Parameter: Timepoint (hr) Value: 6
  misc_feature: MA Experiment 108569 PARAMETER Experiment Name: At_0.001%_MeJA__cDNA_P Parameter: Tissue Value: Aerial
  misc_feature: MA Experiment 108569 PARAMETER Experiment Name: At_0.001%_MeJA__cDNA_P Parameter: Treatment Value: 0.001% MeJA vs. No Treatment
ctctccaaatttcttcttcttctccggcgaagaaatcgaaaagtcattaccctaagagtcccagagtcgtcagaaggaacagcttttgaaatggacggtgtcacataccaaagattcccaacggtgaagatccgtgagcttaaagatgactacgccaagttcgagcttcgtgaaaccgacgtttcaatggccaacgctctccgtcgcgtaatgatctccgaagtccccaccatggcaatccatctcgtcaaaatcgaggttaattcctctgttctcaacgacgagttcattgctcaacgacttcgtctcatccctctcactagcgagcgtgctatgagcatgcggttctgtcaagattgtgaagattgtaacggagatgaacattgcgagttctgctctgttgagtttccccttagtgctaagtgtgttactgaccaaaccctagatgttactagtagggatctctacagtgctgatcctactgttactcctgttgatttcactagtaactcatctacttctgattcaagcgagcacaagggaattatcattgcgaaactacgcaggggacaagagttgaagcttaaagcattagcgaggaaaggaattgggaaagatcatgcgaaatggtctcctgcagctactgttacgtatatgtatgagcctgacattattatcaatgaagagatgatgaacactttgacagatgaggaaaaaattgacttgattgagagcagtcctaccaaagtgtttggcattaccggacaggttaatttcgatgttctgtaagaataacatctatacaagtttatagctttgagacttcaatatgattgtactactttataggctaccatgctttgaaatatatgtatgtgatgtggtgtatgaattttctttaagtgtttagtgcgtttagccc

SEQ ID NO: 22016 - protein, 262 aa, Arabidopsis thaliana
  peptide (1)..(262): Ceres Seq. ID no. 12333302
  misc_feature (83)..(211): Pfam Name: RNA polymerase Rpb3/RpoA insert domain Pfam Description: RNA polymerase Rpb3/RpoA insert domain
  misc_feature (31)..(257): Homolog of NCBI NO: 15226523 NR Description: DNA-directed RNA polymerase II, third largest
  misc_feature (31)..(257): Homolog of NCBI NO: 15226509 NR Description: DNA-directed RNA polymerase II, third largest
  misc_feature (36)..(223): Homolog of NCBI NO: 34851240 NR Description: similar to Polymerase (RNA) II (DNA directed)
  misc_feature (36)..(223): Homolog of NCBI NO: 12837765 NR Description: unnamed protein product [Mus musculus]
  misc_feature (36)..(223): Homolog of NCBI NO: 28278474 NR Description: Similar to polymerase (RNA) II (DNA directed)
  misc_feature (31)..(257): Homolog of NCBI NO: 21593370 NR Description: DNA-directed RNA polymerase II, third largest
  misc_feature (36)..(223): Homolog of NCBI NO: 38511942 NR Description: Polymerase (RNA) II (DNA directed) polypeptide C
  misc_feature (36)..(223): Homolog of NCBI NO: 29336059 NR Description: polymerase (RNA) II (DNA directed) polypeptide C
  misc_feature (36)..(230): Homolog of NCBI NO: 40645083 NR Description: homologue of DNA-directed RNA polymerase II
  misc_feature (31)..(257): Homolog of NCBI NO: 2129725 NR Description: DNA-directed RNA polymerase (EC 2.7.7.6) II 35.5K
LSKFLLLLRRRNRKVITLRVPESSEGTAFEMDGVTYQRFPTVKIRELKDDYAKFELRETDVSMANALRRVMISEVPTMAIHLVKIEVNSSVLNDEFIAQRLRLIPLTSERAMSMRFCQDCEDCNGDEHCEFCSVEFPLSAKCVTDQTLDVTSRDLYSADPTVTPVDFTSNSSTSDSSEHKGIIIAKLRRGQELKLKALARKGIGKDHAKWSPAATVTYMYEPDIIINEEMMNTLTDEEKIDLIESSPTKVFGITGQVNFDVL

SEQ ID NO: 22017 - protein, 232 aa, Arabidopsis thaliana
  peptide (1)..(232): Ceres Seq. ID no. 12333303
  misc_feature (53)..(181): Pfam Name: RNA polymerase Rpb3/RpoA insert domain Pfam Description: RNA polymerase Rpb3/RpoA insert domain
  misc_feature (6)..(200): Homolog of NCBI NO: 40645083 NR Description: homologue of DNA-directed RNA polymerase II
  misc_feature (6)..(193): Homolog of NCBI NO: 34851240 NR Description: similar to Polymerase (RNA) II (DNA directed)
  misc_feature (6)..(193): Homolog of NCBI NO: 29336059 NR Description: polymerase (RNA) II (DNA directed) polypeptide C
  misc_feature (6)..(193): Homolog of NCBI NO: 12837765 NR Description: unnamed protein product [Mus musculus]
  misc_feature (6)..(193): Homolog of NCBI NO: 38511942 NR Description: Polymerase (RNA) II (DNA directed) polypeptide C
  misc_feature (6)..(193): Homolog of NCBI NO: 28278474 NR Description: Similar to polymerase (RNA) II (DNA directed)
  misc_feature (1)..(227): Homolog of NCBI NO: 21593370 NR Description: DNA-directed RNA polymerase II, third largest
  misc_feature (1)..(227): Homolog of NCBI NO: 15226523 NR Description: DNA-directed RNA polymerase II, third largest
  misc_feature (1)..(227): Homolog of NCBI NO: 15226509 NR Description: DNA-directed RNA polymerase II, third largest
  misc_feature (1)..(227): Homolog of NCBI NO: 2129725 NR Description: DNA-directed RNA polymerase (EC 2.7.7.6) II 35.5K
MDGVTYQRFPTVKIRELKDDYAKFELRETDVSMANALRRVMISEVPTMAIHLVKIEVNSSVLNDEFIAQRLRLIPLTSERAMSMRFCQDCEDCNGDEHCEFCSVEFPLSAKCVTDQTLDVTSRDLYSADPTVTPVDFTSNSSTSDSSEHKGIIIAKLRRGQELKLKALARKGIGKDHAKWSPAATVTYMYEPDIIINEEMMNTLTDEEKIDLIESSPTKVFGITGQVNFDVL

SEQ ID NO: 22018 - protein, 200 aa, Arabidopsis thaliana
  peptide (1)..(200): Ceres Seq. ID no. 12333304
  misc_feature (21)..(149): Pfam Name: RNA polymerase Rpb3/RpoA insert domain Pfam Description: RNA polymerase Rpb3/RpoA insert domain
  misc_feature (1)..(168): Homolog of NCBI NO: 40645083 NR Description: homologue of DNA-directed RNA polymerase II
  misc_feature (1)..(161): Homolog of NCBI NO: 34851240 NR Description: similar to Polymerase (RNA) II (DNA directed)
  misc_feature (1)..(161): Homolog of NCBI NO: 29336059 NR Description: polymerase (RNA) II (DNA directed) polypeptide C
  misc_feature (1)..(161): Homolog of NCBI NO: 12837765 NR Description: unnamed protein product [Mus musculus]
  misc_feature (1)..(161): Homolog of NCBI NO: 38511942 NR Description: Polymerase (RNA) II (DNA directed) polypeptide C
  misc_feature (1)..(161): Homolog of NCBI NO: 28278474 NR Description: Similar to polymerase (RNA) II (DNA directed)
  misc_feature (1)..(195): Homolog of NCBI NO: 21593370 NR Description: DNA-directed RNA polymerase II, third largest
  misc_feature (1)..(195): Homolog of NCBI NO: 15226523 NR Description: DNA-directed RNA polymerase II, third largest
  misc_feature (1)..(195): Homolog of NCBI NO: 15226509 NR Description: DNA-directed RNA polymerase II, third largest
  misc_feature (1)..(195): Homolog of NCBI NO: 2129725 NR Description: DNA-directed RNA polymerase (EC 2.7.7.6) II 35.5K
MANALRRVMISEVPTMAIHLVKIEVNSSVLNDEFIAQRLRLIPLTSERAMSMRFCQDCEDCNGDEHCEFCSVEFPLSAKCVTDQTLDVTSRDLYSADPTVTPVDFTSNSSTSDSSEHKGIIIAKLRRGQELKLKALARKGIGKDHAKWSPAATVTYMYEPDIIINEEMMNTLTDEEKIDLIESSPTKVFGITGQVNFDVL

SEQ ID NO: 22019 - DNA, 1605 bp, Arabidopsis thaliana
  misc_feature (1)..(1605): Ceres Seq. ID no. 13501416
  misc_feature: MA Experiment ID: 108434 Result: Up-regulated in Transcription
  misc_feature: MA Experiment 108434 PARAMETER Experiment Name: At_Root_Tips_cDNA_P Parameter: Tissue Value: Root Tips
  misc_feature: MA Experiment ID: 108463 Result: Down-regulated in Transcription
  misc_feature: MA Experiment 108463 PARAMETER Experiment Name: At_Germinating_Seeds_cDNA_P Parameter: Age (day) Value: 3 vs. 0
  misc_feature: MA Experiment 108463 PARAMETER Experiment Name: At_Germinating_Seeds_cDNA_P Parameter: Tissue Value: Germinating Seeds
  misc_feature: MA Experiment ID: 108464 Result: Down-regulated in Transcription
  misc_feature: MA Experiment 108464 PARAMETER Experiment Name: At_Germinating_Seeds_cDNA_P Parameter: Age (day) Value: 4 vs. 0
  misc_feature: MA Experiment 108464 PARAMETER Experiment Name: At_Germinating_Seeds_cDNA_P Parameter: Tissue Value: Germinating Seeds
  misc_feature: MA Experiment ID: 108488 Result: Up-regulated in Transcription
  misc_feature: MA Experiment ID: 108489 Result: Up-regulated in Transcription
  misc_feature: MA Experiment ID: 108595 Result: Down-regulated in Transcription
  misc_feature: MA Experiment 108595 PARAMETER Experiment Name: At_Ler-pi_Ovule_cDNA_P Parameter: Plant Line Value: null
  misc_feature: MA Experiment ID: 20000794 Result: Down-regulated in Transcription
  misc_feature: MA Experiment 20000794 PARAMETER Experiment Name: At_Petals_P Parameter: Age (day) Value: 23-25 days
  misc_feature: MA Experiment 20000794 PARAMETER Experiment Name: At_Petals_P Parameter: Plant Line Value: WS
  misc_feature: MA Experiment 20000794 PARAMETER Experiment Name: At_Petals_P Parameter: Tissue Value: Petals vs. Whole plant
  misc_feature: MA Experiment ID: 20001451 Result: Down-regulated in Transcription
  misc_feature: MA Experiment 20001451 PARAMETER Experiment Name: At_Far-red-induction_P Parameter: Age (day) Value: 7
  misc_feature: MA Experiment 20001451 PARAMETER Experiment Name: At_Far-red-induction_P Parameter: Light Value: Far-red vs. White
  misc_feature: MA Experiment 20001451 PARAMETER Experiment Name: At_Far-red-induction_P Parameter: Organism Value: A. thaliana
  misc_feature: MA Experiment 20001451 PARAMETER Experiment Name: At_Far-red-induction_P Parameter: Plant Line Value: Columbia
  misc_feature: MA Experiment 20001451 PARAMETER Experiment Name: At_Far-red-induction_P Parameter: Timepoint (hr) Value: 24
  misc_feature: MA Experiment 20001451 PARAMETER Experiment Name: At_Far-red-induction_P Parameter: Tissue Value: Whole Plant
  misc_feature: MA Experiment ID: 20001557 Result: Up-regulated in Transcription
  misc_feature: MA Experiment 20001557 PARAMETER Experiment Name: At_Drought_Soil_Dry_P Parameter: Age (day) Value: 27
  misc_feature: MA Experiment 20001557 PARAMETER Experiment Name: At_Drought_Soil_Dry_P Parameter: Organism Value: A. thaliana
  misc_feature: MA Experiment 20001557 PARAMETER Experiment Name: At_Drought_Soil_Dry_P Parameter: Plant Line Value: WS
  misc_feature: MA Experiment 20001557 PARAMETER Experiment Name: At_Drought_Soil_Dry_P Parameter: Post Timepoint (hr) Value: 3
  misc_feature: MA Experiment 20001557 PARAMETER Experiment Name: At_Drought_Soil_Dry_P Parameter: Post-Treatment Value: Re-Water vs. No Drought
  misc_feature: MA Experiment 20001557 PARAMETER Experiment Name: At_Drought_Soil_Dry_P Parameter: Timepoint (day) Value: 13
  misc_feature: MA Experiment 20001557 PARAMETER Experiment Name: At_Drought_Soil_Dry_P Parameter: Treatment Value: Drought vs. No Drought
  misc_feature: MA Experiment ID: 20001560 Result: Up-regulated in Transcription
  misc_feature: MA Experiment 20001560 PARAMETER Experiment Name: At_Drought_Soil_Dry_P Parameter: Age (day) Value: 28
  misc_feature: MA Experiment 20001560 PARAMETER Experiment Name: At_Drought_Soil_Dry_P Parameter: Organism Value: A. thaliana
  misc_feature: MA Experiment 20001560 PARAMETER Experiment Name: At_Drought_Soil_Dry_P Parameter: Plant Line Value: WS
  misc_feature: MA Experiment 20001560 PARAMETER Experiment Name: At_Drought_Soil_Dry_P Parameter: Post Timepoint (hr) Value: None
  misc_feature: MA Experiment 20001560 PARAMETER Experiment Name: At_Drought_Soil_Dry_P Parameter: Post-Treatment Value: None
  misc_feature: MA Experiment 20001560 PARAMETER Experiment Name: At_Drought_Soil_Dry_P Parameter: Timepoint (day) Value: 14
  misc_feature: MA Experiment 20001560 PARAMETER Experiment Name: At_Drought_Soil_Dry_P Parameter: Treatment Value: Drought vs. No Drought
  misc_feature: MA Experiment ID: 20001757 Result: Up-regulated in Transcription
  misc_feature: MA Experiment 20001757 PARAMETER Experiment Name: At_50mM_NH4NO3_L-to-H_P Parameter: Timepoint (hr) Value: 6
  misc_feature: MA Experiment 20001757 PARAMETER Experiment Name: At_50mM_NH4NO3_L-to-H_P Parameter: Tissue Value: Leaf
  misc_feature: MA Experiment 20001757 PARAMETER Experiment Name: At_50mM_NH4NO3_L-to-H_P Parameter: Treatment Value: 50mM NH4NO3 vs 100mM Mannitol
acgagacaaccaaacacagatctgcttccttcttcacctttttttttttttttttgtaattttggtttccctttttttttattaaataagatttattcctccatcgttacctaatccccttcttcgtcttcttcagcttcactgagtcttacgaacatagcaaaatccaaatcaaattcctgaagaaacctctttcgctctcgtcttcgttttcagatcaacaagaaatggcaacagcaacatcagcttctctgttttcaactgtttcttcatcttactccaaagctagctccataccacattcaagactccaatctgtgaaatttaactcagtccctagcttcaccggtctcaaatcaacctctctcatctccggatctgattcctcttccttaaccaagactctccgcggttccgtaacgaatgcacaaacatctgacaagaagccttacggattcaaaatcaacgcttcgtacaaagtagctgttcttggtgctgctggtggtataggtcagcctttatcacttctcatcaagatgtctccgttagtctctacgcttcatctttacgatatcgccaatgttaaaggagttgctgctgatctaagtcattgtaacactccttctcaagttcgtgatttcactggtccttctgagttagctgattgtttgaaagatgttaacgttgttgtcatccctgctggtgtgccgaggaaacccggtatgactcgtgacgatcttttcaacatcaatgccaatattgtcaagactcttgttgaagctgttgctgagaattgccctaatgctttcattcatattattagtaacccggttaactctacggtacctattgctgctgaagtgttgaagaagaaaggtgtttatgatcctaagaagctgtttggtgtcactactttggatgttgtgagggctaacacttttgtttctcagaagaagaatcttaagcttattgatgttgatgttccggttattggtggacatgctggaatcaccattttgcctctcctctcgaagacaaaaccgtctgttaactttactgatgaagagatccaagagctcactgttaggattcagaacgctggtactgaggttgttgatgctaaggcaggtgcaggttcagctactttgtcaatggcttatgctgctgctagatttgtggagtcatctcttcgtgctcttgatggagacggagatgtctacgagtgctcgtttgtggagtcgactctgactgatcttcctttctttgcatcacgggttaagatagggaagaacggtcttgaagctgtgattgagtcagaccttcagggattgactgagtatgagcagaaagcactagaagctcttaaggtagaattgaaagctagcattgacaagggtgtcgcatttgcaaacaaaccagctgctgcagcagctaactagatcgcaagctgataacatttttcttctgatcatttcgagttttgttttatttttcatatttgttgcatcggcgagacattttcgtgttgtagaataaagaatgtatttgcttcagtttgaagattttggaacatggcattgaagcagaatttataaatcatcaccg

SEQ ID NO: 22020 - protein, 403 aa, Arabidopsis thaliana
  peptide (1)..(403): Ceres Seq. ID no. 13501417
  misc_feature (228)..(394): Pfam Name: lactate/malate dehydrogenase, alpha/beta Pfam Description: lactate/malate dehydrogenase, alpha/beta
  misc_feature (4)..(400): Homolog of NCBI NO: 5123836 NR Description: NAD-malate dehydrogenase [Nicotiana tabacum]
  misc_feature (1)..(403): Homolog of NCBI NO: 15232820 NR Description: malate dehydrogenase
  misc_feature (1)..(403): Homolog of NCBI NO: 25283601 NR Description: malate dehydrogenase (EC 1.1.1.37), chloroplast
MATATSASLFSTVSSSYSKASSIPHSRLQSVKFNSVPSFTGLKSTSLISGSDSSSLTKTLRGSVTNAQTSDKKPYGFKINASYKVAVLGAAGGIGQPLSLLIKMSPLVSTLHLYDIANVKGVAADLSHCNTPSQVRDFTGPSELADCLKDVNVVVIPAGVPRKPGMTRDDLFNINANIVKTLVEAVAENCPNAFIHIISNPVNSTVPIAAEVLKKKGVYDPKKLFGVTTLDVVRANTFVSQKKNLKLIDVDVPVIGGHAGITILPLLSKTKPSVNFTDEEIQELTVRIQNAGTEVVDAKAGAGSATLSMAYAAARFVESSLRALDGDGDVYECSFVESTLTDLPFFASRVKIGKNGLEAVIESDLQGLTEYEQKALEALKVELKASIDKGVAFANKPAAAAAN

SEQ ID NO: 22021 - protein, 300 aa, Arabidopsis thaliana
  peptide (1)..(300): Ceres Seq. ID no. 13501418
  misc_feature (125)..(291): Pfam Name: lactate/malate dehydrogenase, alpha/beta Pfam Description: lactate/malate dehydrogenase, alpha/beta
  misc_feature (1)..(297): Homolog of NCBI NO: 5123836 NR Description: NAD-malate dehydrogenase [Nicotiana tabacum]
  misc_feature (1)..(300): Homolog of NCBI NO: 15232820 NR Description: malate dehydrogenase
  misc_feature (1)..(300): Homolog of NCBI NO: 25283601 NR Description: malate dehydrogenase (EC 1.1.1.37), chloroplast
MSPLVSTLHLYDIANVKGVAADLSHCNTPSQVRDFTGPSELADCLKDVNVVVIPAGVPRKPGMTRDDLFNINANIVKTLVEAVAENCPNAFIHIISNPVNSTVPIAAEVLKKKGVYDPKKLFGVTTLDVVRANTFVSQKKNLKLIDVDVPVIGGHAGITILPLLSKTKPSVNFTDEEIQELTVRIQNAGTEVVDAKAGAGSATLSMAYAAARFVESSLRALDGDGDVYECSFVESTLTDLPFFASRVKIGKNGLEAVIESDLQGLTEYEQKALEALKVELKASIDKGVAFANKPAAAAAN

SEQ ID NO: 22022 - protein, 238 aa, Arabidopsis thaliana
  peptide (1)..(238): Ceres Seq. ID no. 13501419
  misc_feature (63)..(229): Pfam Name: lactate/malate dehydrogenase, alpha/beta Pfam Description: lactate/malate dehydrogenase, alpha/beta
  misc_feature (1)..(235): Homolog of NCBI NO: 5123836 NR Description: NAD-malate dehydrogenase [Nicotiana tabacum]
  misc_feature (1)..(238): Homolog of NCBI NO: 15232820 NR Description: malate dehydrogenase
  misc_feature (1)..(238): Homolog of NCBI NO: 25283601 NR Description: malate dehydrogenase (EC 1.1.1.37), chloroplast
MTRDDLFNINANIVKTLVEAVAENCPNAFIHIISNPVNSTVPIAAEVLKKKGVYDPKKLFGVTTLDVVRANTFVSQKKNLKLIDVDVPVIGGHAGITILPLLSKTKPSVNFTDEEIQELTVRIQNAGTEVVDAKAGAGSATLSMAYAAARFVESSLRALDGDGDVYECSFVESTLTDLPFFASRVKIGKNGLEAVIESDLQGLTEYEQKALEALKVELKASIDKGVAFANKPAAAAAN

SEQ ID NO: 22023 - DNA, 1625 bp, Arabidopsis thaliana
  misc_feature (1)..(1625): Ceres Seq. ID no. 13490326
  misc_feature: MA Experiment ID: 108434 Result: Down-regulated in Transcription
  misc_feature: MA Experiment 108434 PARAMETER Experiment Name: At_Root_Tips_cDNA_P Parameter: Tissue Value: Root Tips
  misc_feature: MA Experiment ID: 108461 Result: Down-regulated in Transcription
  misc_feature: MA Experiment 108461 PARAMETER Experiment Name: At_Germinating_Seeds_cDNA_P Parameter: Age (day) Value: 1 vs. 0
  misc_feature: MA Experiment 108461 PARAMETER Experiment Name: At_Germinating_Seeds_cDNA_P Parameter: Tissue Value: Germinating Seeds
  misc_feature: MA Experiment ID: 108462 Result: Down-regulated in Transcription
  misc_feature: MA Experiment 108462 PARAMETER Experiment Name: At_Germinating_Seeds_cDNA_P Parameter: Age (day) Value: 2 vs. 0
  misc_feature: MA Experiment 108462 PARAMETER Experiment Name: At_Germinating_Seeds_cDNA_P Parameter: Tissue Value: Germinating Seeds
  misc_feature: MA Experiment ID: 108463 Result: Down-regulated in Transcription
  misc_feature: MA Experiment 108463 PARAMETER Experiment Name: At_Germinating_Seeds_cDNA_P Parameter: Age (day) Value: 3 vs. 0
  misc_feature: MA Experiment 108463 PARAMETER Experiment Name: At_Germinating_Seeds_cDNA_P Parameter: Tissue Value: Germinating Seeds
  misc_feature: MA Experiment ID: 108569 Result: Up-regulated in Transcription
  misc_feature: MA Experiment 108569 PARAMETER Experiment Name: At_0.001%_MeJA__cDNA_P Parameter: Timepoint (hr) Value: 6
  misc_feature: MA Experiment 108569 PARAMETER Experiment Name: At_0.001%_MeJA__cDNA_P Parameter: Tissue Value: Aerial
  misc_feature: MA Experiment 108569 PARAMETER Experiment Name: At_0.001%_MeJA__cDNA_P Parameter: Treatment Value: 0.001% MeJA vs. No Treatment
  misc_feature: MA Experiment ID: 108572 Result: Up-regulated in Transcription
  misc_feature: MA Experiment 108572 PARAMETER Experiment Name: At_Drought_cDNA_P Parameter: Timepoint (hr) Value: 1
  misc_feature: MA Experiment 108572 PARAMETER Experiment Name: At_Drought_cDNA_P Parameter: Tissue Value: Aerial
  misc_feature: MA Experiment 108572 PARAMETER Experiment Name: At_Drought_cDNA_P Parameter: Treatment Value: Drought vs. No Drought
  misc_feature: MA Experiment ID: 108585 Result: Up-regulated in Transcription
  misc_feature: MA Experiment 108585 PARAMETER Experiment Name: At_5mM_NaNP_cDNA_P Parameter: Timepoint (hr) Value: 6
  misc_feature: MA Experiment 108585 PARAMETER Experiment Name: At_5mM_NaNP_cDNA_P Parameter: Tissue Value: Aerial
  misc_feature: MA Experiment 108585 PARAMETER Experiment Name: At_5mM_NaNP_cDNA_P Parameter: Treatment Value: null
  misc_feature: MA Experiment ID: 20000069 Result: Up-regulated in Transcription
  misc_feature: MA Experiment 20000069 PARAMETER Experiment Name: At_100uM_ABA_Mutants_cDNA_P Parameter: Plant Line Value: CS23
  misc_feature: MA Experiment 20000069 PARAMETER Experiment Name: At_100uM_ABA_Mutants_cDNA_P Parameter: Timepoint (hr) Value: 6
  misc_feature: MA Experiment 20000069 PARAMETER Experiment Name: At_100uM_ABA_Mutants_cDNA_P Parameter: Tissue Value: Aerial
  misc_feature: MA Experiment 20000069 PARAMETER Experiment Name: At_100uM_ABA_Mutants_cDNA_P Parameter: Treatment Value: 100uM ABA vs. No Treatment
  misc_feature: MA Experiment ID: 20000070 Result: Up-regulated in Transcription
  misc_feature: MA Experiment 20000070 PARAMETER Experiment Name: At_100uM_ABA_Mutants_cDNA_P Parameter: Plant Line Value: CS24
  misc_feature: MA Experiment 20000070 PARAMETER Experiment Name: At_100uM_ABA_Mutants_cDNA_P Parameter: Timepoint (hr) Value: 6
  misc_feature: MA Experiment 20000070 PARAMETER Experiment Name: At_100uM_ABA_Mutants_cDNA_P Parameter: Tissue Value: Aerial
  misc_feature: MA Experiment 20000070 PARAMETER Experiment Name: At_100uM_ABA_Mutants_cDNA_P Parameter: Treatment Value: 100uM ABA vs. No Treatment
  misc_feature: MA Experiment ID: 20000071 Result: Up-regulated in Transcription
  misc_feature: MA Experiment 20000071 PARAMETER Experiment Name: At_100uM_ABA_Mutants_cDNA_P Parameter: Plant Line Value: CS8104
  misc_feature: MA Experiment 20000071 PARAMETER Experiment Name: At_100uM_ABA_Mutants_cDNA_P Parameter: Timepoint (hr) Value: 6
  misc_feature: MA Experiment 20000071 PARAMETER Experiment Name: At_100uM_ABA_Mutants_cDNA_P Parameter: Tissue Value: Aerial
  misc_feature: MA Experiment 20000071 PARAMETER Experiment Name: At_100uM_ABA_Mutants_cDNA_P Parameter: Treatment Value: 100uM ABA vs. No Treatment
  misc_feature: MA Experiment ID: 20000072 Result: Up-regulated in Transcription
  misc_feature: MA Experiment 20000072 PARAMETER Experiment Name: At_100uM_ABA_Mutants_cDNA_P Parameter: Plant Line Value: CS8105
  misc_feature: MA Experiment 20000072 PARAMETER Experiment Name: At_100uM_ABA_Mutants_cDNA_P Parameter: Timepoint (hr) Value: 6
  misc_feature: MA Experiment 20000072 PARAMETER Experiment Name: At_100uM_ABA_Mutants_cDNA_P Parameter: Tissue Value: Aerial
  misc_feature: MA Experiment 20000072 PARAMETER Experiment Name: At_100uM_ABA_Mutants_cDNA_P Parameter: Treatment Value: 100uM ABA vs. No Treatment
  misc_feature: MA Experiment ID: 20000086 Result: Up-regulated in Transcription
  misc_feature: MA Experiment 20000086 PARAMETER Experiment Name: At_100uM_ABA_Mutants_cDNA_P Parameter: Plant Line Value: CS22
  misc_feature: MA Experiment 20000086 PARAMETER Experiment Name: At_100uM_ABA_Mutants_cDNA_P Parameter: Timepoint (hr) Value: 6
  misc_feature: MA Experiment 20000086 PARAMETER Experiment Name: At_100uM_ABA_Mutants_cDNA_P Parameter: Tissue Value: Aerial
  misc_feature: MA Experiment 20000086 PARAMETER Experiment Name: At_100uM_ABA_Mutants_cDNA_P Parameter: Treatment Value: 100uM ABA vs. No Treatment
  misc_feature: MA Experiment ID: 20000087 Result: Up-regulated in Transcription
  misc_feature: MA Experiment 20000087 PARAMETER Experiment Name: At_100uM_ABA_Mutants_cDNA_P Parameter: Plant Line Value: WS
  misc_feature: MA Experiment 20000087 PARAMETER Experiment Name: At_100uM_ABA_Mutants_cDNA_P Parameter: Timepoint (hr) Value: 6
  misc_feature: MA Experiment 20000087 PARAMETER Experiment Name: At_100uM_ABA_Mutants_cDNA_P Parameter: Tissue Value: Aerial
  misc_feature: MA Experiment 20000087 PARAMETER Experiment Name: At_100uM_ABA_Mutants_cDNA_P Parameter: Treatment Value: 100uM ABA vs. No Treatment
  misc_feature: MA Experiment ID: 20000088 Result: Up-regulated in Transcription
  misc_feature: MA Experiment 20000088 PARAMETER Experiment Name: At_100uM_ABA_Mutants_cDNA_P Parameter: Plant Line Value: Landsberg
  misc_feature: MA Experiment 20000088 PARAMETER Experiment Name: At_100uM_ABA_Mutants_cDNA_P Parameter: Timepoint (hr) Value: 6
  misc_feature: MA Experiment 20000088 PARAMETER Experiment Name: At_100uM_ABA_Mutants_cDNA_P Parameter: Tissue Value: Aerial
  misc_feature: MA Experiment 20000088 PARAMETER Experiment Name: At_100uM_ABA_Mutants_cDNA_P Parameter: Treatment Value: 100uM ABA vs. No Treatment
  misc_feature: MA Experiment ID: 20000224 Result: Up-regulated in Transcription
  misc_feature: MA Experiment ID: 20000306 Result: Down-regulated in Transcription
  misc_feature: MA Experiment 20000306 PARAMETER Experiment Name: At_Germinating_Seeds_Sub_P Parameter: Age (hr) Value: 6 vs. 0
  misc_feature: MA Experiment 20000306 PARAMETER Experiment Name: At_Germinating_Seeds_Sub_P Parameter: Organism Value: A. thaliana
  misc_feature: MA Experiment 20000306 PARAMETER Experiment Name: At_Germinating_Seeds_Sub_P Parameter: Plant Line Value: WS
  misc_feature: MA Experiment 20000306 PARAMETER Experiment Name: At_Germinating_Seeds_Sub_P Parameter: Tissue Value: Germinating Seeds
  misc_feature: MA Experiment ID: 20000307 Result: Down-regulated in Transcription
  misc_feature: MA Experiment 20000307 PARAMETER Experiment Name: At_Germinating_Seeds_Sub_P Parameter: Age (hr) Value: 24 vs. 0
  misc_feature: MA Experiment 20000307 PARAMETER Experiment Name: At_Germinating_Seeds_Sub_P Parameter: Organism Value: A. thaliana
  misc_feature: MA Experiment 20000307 PARAMETER Experiment Name: At_Germinating_Seeds_Sub_P Parameter: Plant Line Value: WS
  misc_feature: MA Experiment 20000307 PARAMETER Experiment Name: At_Germinating_Seeds_Sub_P Parameter: Tissue Value: Germinating Seeds
  misc_feature: MA Experiment ID: 20000315 Result: Down-regulated in Transcription
  misc_feature: MA Experiment 20000315 PARAMETER Experiment Name: At_14day_Shoots-Roots_Sub_P Parameter: Age (day) Value: 14
  misc_feature: MA Experiment 20000315 PARAMETER Experiment Name: At_14day_Shoots-Roots_Sub_P Parameter: Organism Value: A. thaliana
  misc_feature: MA Experiment 20000315 PARAMETER Experiment Name: At_14day_Shoots-Roots_Sub_P Parameter: Plant Line Value: WS
  misc_feature: MA Experiment 20000315 PARAMETER Experiment Name: At_14day_Shoots-Roots_Sub_P Parameter: Tissue Value: Shoots vs. Whole Plant
  misc_feature: MA Experiment ID: 20000355 Result: Down-regulated in Transcription
  misc_feature: MA Experiment 20000355 PARAMETER Experiment Name: At_Siliques_Sub_P Parameter: Age (day) Value: 21
  misc_feature: MA Experiment 20000355 PARAMETER Experiment Name: At_Siliques_Sub_P Parameter: Organism Value: A. thaliana
  misc_feature: MA Experiment 20000355 PARAMETER Experiment Name: At_Siliques_Sub_P Parameter: Plant Line Value: WS
  misc_feature: MA Experiment 20000355 PARAMETER Experiment Name: At_Siliques_Sub_P Parameter: Tissue Value: Less Than 5mm Siliques vs. Whole Plant
  misc_feature: MA Experiment ID: 20000440 Result: Down-regulated in Transcription
  misc_feature: MA Experiment 20000440 PARAMETER Experiment Name: At_Closed-Flower__Sub_P Parameter: Tissue Value: Closed Flower vs. Whole Plant
aaagattggatatgatctaaaaaatcagaggcaaatcaatcaagattaagaagacgacaatggaagagccatttcttccgagagacgagcagttagtctcttgtaaatccacatggcaaagtggtcaggtcaccgtcgagctgaagaaagtgagccgcttggccgctcctatggccaccgtaaccatagctcagtacttattgcctgtcatctcagtcatggtcgccggccacatcggcgagttggagctcgccggtgtcgcgcttgccacgtctttcacaaacgtttccggcttcagcataatgtttgggttagttggtgcattggaaactctttgtggccaagcctatggagcagaacaatacgaaaaaatcggaacctatacatactctgcaatggcttccaacataccaatttgtttcatcatatcaattctatggatttacatcgaaaagctcttgatcactctcgggcaagagcctgacatctctagagtcgctggctcctactcattgtggctcgtaccggctttgtttgcccatgctattttcttaccactgactcggtttctgctagcacaagggttggttatttccctgctatactctgccatgaccacccttttgttccatattgcggtttgctggactttggttttcgcgcttggtcttggaagcaatggagctgctattgctattagtttgtctttctggttttacgctgtgatactctcatgtcatgtgagatttttcagctcttgcgagaagactcgcggatttgtatcaaatgattttatgtctagtatcaagcagtacttccagtacggagtcccatccgctggattgatttgcttagaatggtggctgtttgagctactcatactctgctcaggtcttctcccaaacccaaaactcgagacatctgttctttcgatttgtcttacaataggaactttacactatgtgattccatctggagtcgcggcggctgtgagcacacgagtgtcaaacaaattgggagctggaaatcctcaagttgctagggtttccgtattggcagggctttgtctctggcttgtagagtcagctttctttagcacacttctcttcacctgccgaaacatcataggctacacattcagcaacagcaaagaagttgttgactatgttgctgacatatctcctttgctctgtctctccttcatcctcgacggattaacggcagttctaaatggagtggctaggggatgtgggtggcaacacattggagctttgatcaacgtggtggcttattatcttgtaggagctcctgttggagtttacttagctttcagtcgtgagtggaatggaaaaggactctggtgcggtgttatggttggatccgcggtgcaagccactttactggctatcgtcacagcctccatgaactggaaggaacaggctgagaaagcaaggaagagaataatctctactgaaaatggattggtttaaataaaggttgttcctaagagctatctcaaagtatttgcaagtcatgtgcaaaaaaacatgtaatgttattttgatgggttataatatttttttgtaaaacttttatccaggatttatacattttttcttgagttg

SEQ ID NO: 22024 - protein, 476 aa, Arabidopsis thaliana
  peptide (1)..(476): Ceres Seq. ID no. 13490327
  misc_feature (18)..(468): Homolog of NCBI NO: 15218070 NR Description: MATE efflux protein family [Arabidopsis thaliana]
  misc_feature (27)..(472): Homolog of NCBI NO: 15223961 NR Description: MATE efflux protein family [Arabidopsis thaliana]
  misc_feature (1)..(460): Homolog of NCBI NO: 25411056 NR Description: hypothetical protein At2g04100 [imported] -
  misc_feature (1)..(468): Homolog of NCBI NO: 15228085 NR Description: MATE efflux protein family [Arabidopsis thaliana]
  misc_feature (1)..(475): Homolog of NCBI NO: 22325453 NR Description: MATE efflux protein family [Arabidopsis thaliana]
  misc_feature (1)..(460): Homolog of NCBI NO: 15228081 NR Description: MATE efflux protein family [Arabidopsis thaliana]
  misc_feature (1)..(475): Homolog of NCBI NO: 15228071 NR Description: MATE efflux protein family [Arabidopsis thaliana]
  misc_feature (1)..(475): Homolog of NCBI NO: 15228073 NR Description: MATE efflux protein family [Arabidopsis thaliana]
  misc_feature (1)..(460): Homolog of NCBI NO: 25411053 NR Description: hypothetical protein At2g04080 [imported] -
  misc_feature (1)..(476): Homolog of NCBI NO: 30678096 NR Description: MATE efflux protein - related [Arabidopsis
MEEPFLPRDEQLVSCKSTWQSGQVTVELKKVSRLAAPMATVTIAQYLLPVISVMVAGHIGELELAGVALATSFTNVSGFSIMFGLVGALETLCGQAYGAEQYEKIGTYTYSAMASNIPICFIISILWIYIEKLLITLGQEPDISRVAGSYSLWLVPALFAHAIFLPLTRFLLAQGLVISLLYSAMTTLLFHIAVCWTLVFALGLGSNGAAIAISLSFWFYAVILSCHVRFFSSCEKTRGFVSNDFMSSIKQYFQYGVPSAGLICLEWWLFELLILCSGLLPNPKLETSVLSICLTIGTLHYVIPSGVAAAVSTRVSNKLGAGNPQVARVSVLAGLCLWLVESAFFSTLLFTCRNIIGYTFSNSKEVVDYVADISPLLCLSFILDGLTAVLNGVARGCGWQHIGALINVVAYYLVGAPVGVYLAFSREWNGKGLWCGVMVGSAVQATLLAIVTASMNWKEQAEKARKRIISTENGLV

SEQ ID NO: 22025 - protein, 439 aa, Arabidopsis thaliana
  peptide (1)..(439): Ceres Seq. ID no. 13490328
  misc_feature (1)..(431): Homolog of NCBI NO: 15218070 NR Description: MATE efflux protein family [Arabidopsis thaliana]
  misc_feature (1)..(435): Homolog of NCBI NO: 15223961 NR Description: MATE efflux protein family [Arabidopsis thaliana]
  misc_feature (1)..(423): Homolog of NCBI NO: 25411056 NR Description: hypothetical protein At2g04100 [imported] -
  misc_feature (1)..(431): Homolog of NCBI NO: 15228085 NR Description: MATE efflux protein family [Arabidopsis thaliana]
  misc_feature (1)..(438): Homolog of NCBI NO: 22325453 NR Description: MATE efflux protein family [Arabidopsis thaliana]
  misc_feature (1)..(423): Homolog of NCBI NO: 15228081 NR Description: MATE efflux protein family [Arabidopsis thaliana]
  misc_feature (1)..(438): Homolog of NCBI NO: 15228071 NR Description: MATE efflux protein family [Arabidopsis thaliana]
  misc_feature (1)..(438): Homolog of NCBI NO: 15228073 NR Description: MATE efflux protein family [Arabidopsis thaliana]
  misc_feature (1)..(423): Homolog of NCBI NO: 25411053 NR Description: hypothetical protein At2g04080 [imported] -
  misc_feature (1)..(439): Homolog of NCBI NO: 30678096 NR Description: MATE efflux protein - related [Arabidopsis
MATVTIAQYLLPVISVMVAGHIGELELAGVALATSFTNVSGFSIMFGLVGALETLCGQAYGAEQYEKIGTYTYSAMASNIPICFIISILWIYIEKLLITLGQEPDISRVAGSYSLWLVPALFAHAIFLPLTRFLLAQGLVISLLYSAMTTLLFHIAVCWTLVFALGLGSNGAAIAISLSFWFYAVILSCHVRFFSSCEKTRGFVSNDFMSSIKQYFQYGVPSAGLICLEWWLFELLILCSGLLPNPKLETSVLSICLTIGTLHYVIPSGVAAAVSTRVSNKLGAGNPQVARVSVLAGLCLWLVESAFFSTLLFTCRNIIGYTFSNSKEVVDYVADISPLLCLSFILDGLTAVLNGVARGCGWQHIGALINVVAYYLVGAPVGVYLAFSREWNGKGLWCGVMVGSAVQATLLAIVTASMNWKEQAEKARKRIISTENGLV

SEQ ID NO: 22026 - protein, 423 aa, Arabidopsis thaliana
  peptide (1)..(423): Ceres Seq. ID no. 13490329
  misc_feature (1)..(415): Homolog of NCBI NO: 15218070 NR Description: MATE efflux protein family [Arabidopsis thaliana]
  misc_feature (1)..(419): Homolog of NCBI NO: 15223961 NR Description: MATE efflux protein family [Arabidopsis thaliana]
  misc_feature (1)..(407): Homolog of NCBI NO: 25411056 NR Description: hypothetical protein At2g04100 [imported] -
  misc_feature (1)..(415): Homolog of NCBI NO: 15228085 NR Description: MATE efflux protein family [Arabidopsis thaliana]
  misc_feature (1)..(422): Homolog of NCBI NO: 22325453 NR Description: MATE efflux protein family [Arabidopsis thaliana]
  misc_feature (1)..(407): Homolog of NCBI NO: 15228081 NR Description: MATE efflux protein family [Arabidopsis thaliana]
  misc_feature (1)..(422): Homolog of NCBI NO: 15228071 NR Description: MATE efflux protein family [Arabidopsis thaliana]
  misc_feature (1)..(422): Homolog of NCBI NO: 15228073 NR Description: MATE efflux protein family [Arabidopsis thaliana]
  misc_feature (1)..(407): Homolog of NCBI NO: 25411053 NR Description: hypothetical protein At2g04080 [imported] -
  misc_feature (1)..(423): Homolog of NCBI NO: 30678096 NR Description: MATE efflux protein - related [Arabidopsis
MVAGHIGELELAGVALATSFTNVSGFSIMFGLVGALETLCGQAYGAEQYEKIGTYTYSAMASNIPICFIISILWIYIEKLLITLGQEPDISRVAGSYSLWLVPALFAHAIFLPLTRFLLAQGLVISLLYSAMTTLLFHIAVCWTLVFALGLGSNGAAIAISLSFWFYAVILSCHVRFFSSCEKTRGFVSNDFMSSIKQYFQYGVPSAGLICLEWWLFELLILCSGLLPNPKLETSVLSICLTIGTLHYVIPSGVAAAVSTRVSNKLGAGNPQVARVSVLAGLCLWLVESAFFSTLLFTCRNIIGYTFSNSKEVVDYVADISPLLCLSFILDGLTAVLNGVARGCGWQHIGALINVVAYYLVGAPVGVYLAFSREWNGKGLWCGVMVGSAVQATLLAIVTASMNWKEQAEKARKRIISTENGLV

SEQ ID NO: 22027 - DNA, 808 bp, Arabidopsis thaliana
  misc_feature (1)..(808): Ceres Seq. ID no. 13592444
  misc_feature: MA Experiment ID: 108488 Result: Up-regulated in Transcription
  misc_feature: MA Experiment ID: 108595 Result: Down-regulated in Transcription
  misc_feature: MA Experiment 108595 PARAMETER Experiment Name: At_Ler-pi_Ovule_cDNA_P Parameter: Plant Line Value: null
  misc_feature: MA Experiment ID: 20000070 Result: Down-regulated in Transcription
  misc_feature: MA Experiment 20000070 PARAMETER Experiment Name: At_100uM_ABA_Mutants_cDNA_P Parameter: Plant Line Value: CS24
  misc_feature: MA Experiment 20000070 PARAMETER Experiment Name: At_100uM_ABA_Mutants_cDNA_P Parameter: Timepoint (hr) Value: 6
  misc_feature: MA Experiment 20000070 PARAMETER Experiment Name: At_100uM_ABA_Mutants_cDNA_P Parameter: Tissue Value: Aerial
  misc_feature: MA Experiment 20000070 PARAMETER Experiment Name: At_100uM_ABA_Mutants_cDNA_P Parameter: Treatment Value: 100uM ABA vs. No Treatment
  misc_feature: MA Experiment ID: 20000071 Result: Down-regulated in Transcription
  misc_feature: MA Experiment 20000071 PARAMETER Experiment Name: At_100uM_ABA_Mutants_cDNA_P Parameter: Plant Line Value: CS8104
  misc_feature: MA Experiment 20000071 PARAMETER Experiment Name: At_100uM_ABA_Mutants_cDNA_P Parameter: Timepoint (hr) Value: 6
  misc_feature: MA Experiment 20000071 PARAMETER Experiment Name: At_100uM_ABA_Mutants_cDNA_P Parameter: Tissue Value: Aerial
  misc_feature: MA Experiment 20000071 PARAMETER Experiment Name: At_100uM_ABA_Mutants_cDNA_P Parameter: Treatment Value: 100uM ABA vs. No Treatment
  misc_feature: MA Experiment ID: 20000072 Result: Down-regulated in Transcription
  misc_feature: MA Experiment 20000072 PARAMETER Experiment Name: At_100uM_ABA_Mutants_cDNA_P Parameter: Plant Line Value: CS8105
  misc_feature: MA Experiment 20000072 PARAMETER Experiment Name: At_100uM_ABA_Mutants_cDNA_P Parameter: Timepoint (hr) Value: 6
  misc_feature: MA Experiment 20000072 PARAMETER Experiment Name: At_100uM_ABA_Mutants_cDNA_P Parameter: Tissue Value: Aerial
  misc_feature: MA Experiment 20000072 PARAMETER Experiment Name: At_100uM_ABA_Mutants_cDNA_P Parameter: Treatment Value: 100uM ABA vs. No Treatment
  misc_feature: MA Experiment ID: 20000086 Result: Down-regulated in Transcription
  misc_feature: MA Experiment 20000086 PARAMETER Experiment Name: At_100uM_ABA_Mutants_cDNA_P Parameter: Plant Line Value: CS22
  misc_feature: MA Experiment 20000086 PARAMETER Experiment Name: At_100uM_ABA_Mutants_cDNA_P Parameter: Timepoint (hr) Value: 6
  misc_feature: MA Experiment 20000086 PARAMETER Experiment Name: At_100uM_ABA_Mutants_cDNA_P Parameter: Tissue Value: Aerial
  misc_feature: MA Experiment 20000086 PARAMETER Experiment Name: At_100uM_ABA_Mutants_cDNA_P Parameter: Treatment Value: 100uM ABA vs. No Treatment
  misc_feature: MA Experiment ID: 20000117 Result: Down-regulated in Transcription
  misc_feature: MA Experiment 20000117 PARAMETER Experiment Name: At_100uM_ABA_Mutants_cDNA_P Parameter: Plant Line Value: Columbia
  misc_feature: MA Experiment 20000117 PARAMETER Experiment Name: At_100uM_ABA_Mutants_cDNA_P Parameter: Timepoint (hr) Value: 6
  misc_feature: MA Experiment 20000117 PARAMETER Experiment Name: At_100uM_ABA_Mutants_cDNA_P Parameter: Tissue Value: Aerial
  misc_feature: MA Experiment 20000117 PARAMETER Experiment Name: At_100uM_ABA_Mutants_cDNA_P Parameter: Treatment Value: 100uM ABA vs. No Treatment
  misc_feature: MA Experiment ID: 20000307 Result: Up-regulated in Transcription
  misc_feature: MA Experiment 20000307 PARAMETER Experiment Name: At_Germinating_Seeds_Sub_P Parameter: Age (hr) Value: 24 vs. 0
  misc_feature: MA Experiment 20000307 PARAMETER Experiment Name: At_Germinating_Seeds_Sub_P Parameter: Organism Value: A. thaliana
  misc_feature: MA Experiment 20000307 PARAMETER Experiment Name: At_Germinating_Seeds_Sub_P Parameter: Plant Line Value: WS
  misc_feature: MA Experiment 20000307 PARAMETER Experiment Name: At_Germinating_Seeds_Sub_P Parameter: Tissue Value: Germinating Seeds
  misc_feature: MA Experiment ID: 20000314 Result: Down-regulated in Transcription
  misc_feature: MA Experiment 20000314 PARAMETER Experiment Name: At_14day_Shoots-Roots_Sub_P Parameter: Age (day) Value: 14
  misc_feature: MA Experiment 20000314 PARAMETER Experiment Name: At_14day_Shoots-Roots_Sub_P Parameter: Organism Value: A. thaliana
  misc_feature: MA Experiment 20000314 PARAMETER Experiment Name: At_14day_Shoots-Roots_Sub_P Parameter: Plant Line Value: WS
  misc_feature: MA Experiment 20000314 PARAMETER Experiment Name: At_14day_Shoots-Roots_Sub_P Parameter: Tissue Value: Roots vs. Whole Plant
  misc_feature: MA Experiment ID: 20000355 Result: Up-regulated in Transcription
  misc_feature: MA Experiment 20000355 PARAMETER Experiment Name: At_Siliques_Sub_P Parameter: Age (day) Value: 21
  misc_feature: MA Experiment 20000355 PARAMETER Experiment Name: At_Siliques_Sub_P Parameter: Organism Value: A. thaliana
  misc_feature: MA Experiment 20000355 PARAMETER Experiment Name: At_Siliques_Sub_P Parameter: Plant Line Value: WS
  misc_feature: MA Experiment 20000355 PARAMETER Experiment Name: At_Siliques_Sub_P Parameter: Tissue Value: Less Than 5mm Siliques vs. Whole Plant
  misc_feature: MA Experiment ID: 20001807 Result: Up-regulated in Transcription
  misc_feature: MA Experiment 20001807 PARAMETER Experiment Name: At_50mM_NH4NO3_L-to-H_Sub_P Parameter: Timepoint (hr) Value: 6
  misc_feature: MA Experiment 20001807 PARAMETER Experiment Name: At_50mM_NH4NO3_L-to-H_Sub_P Parameter: Tissue Value: Leaf
  misc_feature: MA Experiment 20001807 PARAMETER Experiment Name: At_50mM_NH4NO3_L-to-H_Sub_P Parameter: Treatment Value: 50mM NH4NO3 vs 100mM Mannitol
actcacagagacacacaaaacaaatcccaaagcttcagaggaagaagaagaagagagtgagaaacaatggcgtcgacgactctctcaatcgcaacaacaatccgttcctcttctcctctcacttccgcttccactcatcacttcctttccaaacccaccgcaatcgaattcccatttcgtctcagctcttcttctagccaccgtgcaatcaacctccgtcctatctccgccgtcgaagctccggagaaaatcgagaagatcggatccgaaatctcatccctaaccctcgaagaagctcgtatcctcgtcgactatctccaagacaaattcggtgtctccccactctctttagcccccgcagcagcggcggttgctgctccagccgacggtggcgcggcggctgtagtggaggagcaaacaaagttcgatgtggttatcaatgaagttcccagcagttcccgtattgcagtgattaaagctgttagggctttaactagcttggcgttgaaggaagctaaggagctaatcgaaggattaccaaagaagtttaaagaaggtatcactaaagatgaagctgaagaagctaagaagactcttgaagaagctggtgctaaagtctccattgcttaagtttcttcaacaatcggaaaaaaaaaaatgtgatcttttcggaatttatgagtctttttgttgtttagtatagtttgtgtttgagttgttgattcagcttttgagaaattgttgtactttgaatcaatttggtttcgtattacagttttagtcttcaacaagttcttcctctagatgc

SEQ ID NO: 22028 - protein, 187 aa, Arabidopsis thaliana
  peptide (1)..(187): Ceres Seq. ID no. 15221104
  misc_feature (119)..(187): Pfam Name: Ribosomal protein L7/L12 C-terminal domain Pfam Description: Ribosomal protein L7/L12 C-terminal domain
  misc_feature (119)..(187): Pfam Name: Ribosomal protein L7/L12 C-terminal domain Pfam Description: Ribosomal protein L7/L12 C-terminal domain
  misc_feature (1)..(186): Homolog of NCBI NO: 133085 NR Description: 50S RIBOSOMAL PROTEIN L12, CHLOROPLAST PRECURSOR
  misc_feature (1)..(187): Homolog of NCBI NO: 548746 NR Description: 50S RIBOSOMAL PROTEIN L12, CHLOROPLAST PRECURSOR
  misc_feature (1)..(187): Homolog of NCBI NO: 133088 NR Description: 50S RIBOSOMAL PROTEIN L12, CHLOROPLAST PRECURSOR
  misc_feature (1)..(187): Homolog of NCBI NO: 20020 NR Description: ribosomal protein L12-1a [Nicotiana tabacum]
  misc_feature (1)..(186): Homolog of NCBI NO: 541896 NR Description: ribosomal protein L12.B precursor, chloroplast -
  misc_feature (1)..(187): Homolog of NCBI NO: 15232274 NR Description: 50S ribosomal protein L12-1, chloroplast
  misc_feature (1)..(187): Homolog of NCBI NO: 15232276 NR Description: 50S ribosomal protein L12-3, chloroplast
  misc_feature (1)..(186): Homolog of NCBI NO: 15232275 NR Description: 50S ribosomal protein L12-2, chloroplast
  misc_feature (1)..(186): Homolog of NCBI NO: 541896 NR Description: ribosomal protein L12.B precursor, chloroplast -
  misc_feature (1)..(187): Homolog of NCBI NO: 20020 NR Description: ribosomal protein L12-1a [Nicotiana tabacum]
  misc_feature (1)..(187): Homolog of NCBI NO: 133088 NR Description: 50S RIBOSOMAL PROTEIN L12, CHLOROPLAST PRECURSOR
  misc_feature (1)..(187): Homolog of NCBI NO: 548746 NR Description: 50S RIBOSOMAL PROTEIN L12, CHLOROPLAST PRECURSOR
  misc_feature (1)..(186): Homolog of NCBI NO: 133085 NR Description: 50S RIBOSOMAL PROTEIN L12, CHLOROPLAST PRECURSOR
  misc_feature (1)..(187): Homolog of NCBI NO: 21592776 NR Description: 50S ribosomal protein L12-C [Arabidopsis thaliana]
  misc_feature (1)..(187): Homolog of NCBI NO: 541897 NR Description: ribosomal protein L12.C precursor, chloroplast -
  misc_feature (1)..(186): Homolog of NCBI NO: 15232275 NR Description: 50S ribosomal protein L12-2, chloroplast
  misc_feature (1)..(187): Homolog of NCBI NO: 15232274 NR Description: 50S ribosomal protein L12-1, chloroplast
  misc_feature (1)..(187): Homolog of NCBI NO: 541897 NR Description: ribosomal protein L12.C precursor, chloroplast -
  misc_feature (1)..(187): Homolog of NCBI NO: 15232276 NR Description: 50S ribosomal protein L12-3, chloroplast
  misc_feature (1)..(187): Homolog of NCBI NO: 21592776 NR Description: 50S ribosomal protein L12-C [Arabidopsis thaliana]
MASTTLSIATTIRSSSPLTSASTHHFLSKPTAIEFPFRLSSSSSHRAINLRPISAVEAPEKIEKIGSEISSLTLEEARILVDYLQDKFGVSPLSLAPAAAAVAAPADGGAAAVVEEQTKFDVVINEVPSSSRIAVIKAVRALTSLALKEAKELIEGLPKKFKEGITKDEAEEAKKTLEEAGAKVSIA

SEQ ID NO: 22029 - protein, 93 aa, Arabidopsis thaliana
  peptide (1)..(93): Ceres Seq. ID no. 15221105
LTETHKTNPKASEEEEEESEKQWRRRLSQSQQQSVPLLLSLPLPLITSFPNPPQSNSHFVSALLLATVQSTSVLSPPSKLRRKSRRSDPKSHP

SEQ ID NO: 22030 - DNA, 1243 bp, Arabidopsis thaliana
  misc_feature (1)..(1243): Ceres Seq. ID no. 12562371
  misc_feature: MA Experiment ID: 20000179 Result: Down-regulated in Transcription
  misc_feature: MA Experiment 20000179 PARAMETER Experiment Name: At_Germinating_Seeds_P Parameter: Age (hr) Value: 6 vs. 0
  misc_feature: MA Experiment 20000179 PARAMETER Experiment Name: At_Germinating_Seeds_P Parameter: Tissue Value: Germinating Seeds
  misc_feature: MA Experiment ID: 20000180 Result: Down-regulated in Transcription
  misc_feature: MA Experiment 20000180 PARAMETER Experiment Name: At_Germinating_Seeds_P Parameter: Age (hr) Value: 24 vs. 0
  misc_feature: MA Experiment 20000180 PARAMETER Experiment Name: At_Germinating_Seeds_P Parameter: Tissue Value: Germinating Seeds
  misc_feature: MA Experiment ID: 20000437 Result: Up-regulated in Transcription
  misc_feature: MA Experiment 20000437 PARAMETER Experiment Name: At_Drought_P Parameter: Age (day) Value: 8
  misc_feature: MA Experiment 20000437 PARAMETER Experiment Name: At_Drought_P Parameter: Organism Value: A. thaliana
  misc_feature: MA Experiment 20000437 PARAMETER Experiment Name: At_Drought_P Parameter: Plant Line Value: WS
  misc_feature: MA Experiment 20000437 PARAMETER Experiment Name: At_Drought_P Parameter: Timepoint (hr) Value: 24
  misc_feature: MA Experiment 20000437 PARAMETER Experiment Name: At_Drought_P Parameter: Tissue Value: Whole Plant
  misc_feature: MA Experiment 20000437 PARAMETER Experiment Name: At_Drought_P Parameter: Treatment Value: Drought vs. No Drought
  misc_feature: MA Experiment ID: 20001450 Result: Up-regulated in Transcription
  misc_feature: MA Experiment 20001450 PARAMETER Experiment Name: At_Far-red-induction_P Parameter: Age (day) Value: 7
  misc_feature: MA Experiment 20001450 PARAMETER Experiment Name: At_Far-red-induction_P Parameter: Light Value: Far-red vs. White
  misc_feature: MA Experiment 20001450 PARAMETER Experiment Name: At_Far-red-induction_P Parameter: Organism Value: A. thaliana
  misc_feature: MA Experiment 20001450 PARAMETER Experiment Name: At_Far-red-induction_P Parameter: Plant Line Value: Columbia
  misc_feature: MA Experiment 20001450 PARAMETER Experiment Name: At_Far-red-induction_P Parameter: Timepoint (hr) Value: 8
  misc_feature: MA Experiment 20001450 PARAMETER Experiment Name: At_Far-red-induction_P Parameter: Tissue Value: Whole Plant
  misc_feature: MA Experiment ID: 20001451 Result: Up-regulated in Transcription
  misc_feature: MA Experiment 20001451 PARAMETER Experiment Name: At_Far-red-induction_P Parameter: Age (day) Value: 7
  misc_feature: MA Experiment 20001451 PARAMETER Experiment Name: At_Far-red-induction_P Parameter: Light Value: Far-red vs. White
  misc_feature: MA Experiment 20001451 PARAMETER Experiment Name: At_Far-red-induction_P Parameter: Organism Value: A. thaliana
  misc_feature: MA Experiment 20001451 PARAMETER Experiment Name: At_Far-red-induction_P Parameter: Plant Line Value: Columbia
  misc_feature: MA Experiment 20001451 PARAMETER Experiment Name: At_Far-red-induction_P Parameter: Timepoint (hr) Value: 24
  misc_feature: MA Experiment 20001451 PARAMETER Experiment Name: At_Far-red-induction_P Parameter: Tissue Value: Whole Plant
  misc_feature: Phenotype: ROSETTE LEAVES Shape-Serrate
  misc_feature: Phenotype: ROSETTE LEAVES Shape-Serrate
  misc_feature: Phenotype: WHOLE PLANT Other
  misc_feature: Phenotype: INFLORESCENCE Flowering Time-Late Flowering
  misc_feature: Phenotype: INFLORESCENCE Height-Short
  misc_feature: Phenotype: ROSETTE LEAVES Shape-Serrate
  misc_feature: Phenotype: WHOLE PLANT Other
  misc_feature: Phenotype: ROSETTE LEAVES Shape-Serrate
  misc_feature: Phenotype: ROSETTE LEAVES Other
  misc_feature: Phenotype: WHOLE PLANT Size-Small
  misc_feature: Phenotype: WHOLE PLANT Size-Small
  misc_feature: Phenotype: WHOLE PLANT Other
  misc_feature: Phenotype: INFLORESCENCE Flowering Time-Late Flowering
  misc_feature: Phenotype: INFLORESCENCE Height-Short
  misc_feature: Phenotype: INFLORESCENCE Strength-Weak
  misc_feature: Phenotype: ROSETTE LEAVES Shape-Serrate
  misc_feature: Phenotype: WHOLE PLANT Size-Small
  misc_feature: Phenotype: WHOLE PLANT Other
  misc_feature: Phenotype: WHOLE PLANT Color-Yellow-Green Viable 2
  misc_feature: Phenotype: WHOLE PLANT Size-Small
  misc_feature: Phenotype: ROSETTE LEAVES Shape-Serrate
  misc_feature: Phenotype: WHOLE PLANT Color-Yellow-Green Viable 2
  misc_feature: Phenotype: WHOLE PLANT Size-Small
  misc_feature: Phenotype: WHOLE PLANT Size-Small
  misc_feature: Phenotype: WHOLE PLANT Color-Yellow-Green Viable 3
  misc_feature: Phenotype: WHOLE PLANT Size-Small
attgtaacttgtaaccagtgtcggctaatttcgacttttgtagatctttttctgctctttctctctctctctctctctctctctctctctctctcttgtattatttctatctcccccgccgtcgaaagagaaacgtcgatcggagaacctttgaaatgtcgactggattagatatgtctctcgacgacatgatcgccaagaaccgtaagtctcgtggtggagccggccccgctcgtggaaccggatccggatccggaccgggtccgactcgccgcaacaaccctaatcggaaatcaacccgatctgctccataccaatcagccaaggcgccggagtccacctggggtcacgacatgttctccgatagatctgaagatcaccgatcgggacgttcctccgccggaatcgaaactggaaccaagctctacatttccaatttggattacggtgtcatgaacgaagacatcaaggaactgtttgctgaagttggagaacttaaacgctacacagttcattttgatagaagtggaagatcaaagggaactgctgaagtagtgtattctcggcgtggcgatgcactcgcagctgtgaagaagtataatgatgttcagctggatggaaaacccatgaagatagagattgtgggcactaatcttcaaactgctgcagccccgtctggtagacctgcgaatggaaactccaatggtgctccatggagaggaggacaagggagaggaggtcaacaacgaggtggtggacgaggaggcggtggccgaggtggtggtggtcgtggtaggcgtcctggtaagggccctgcagagaagatttctgcggaagatcttgatgcggatcttgataagtaccattctggagatatggagacaaactaaggaacgtgactgatcttctcaaaccggtaggggttttaggaggaagagaatcgagaaaatgtttgccagaggctttaccacttagcgcctttttggctgtgttgttcatttgtttcattagaatgactttacagaattgagaatatgtgttatttaaagttgttgtctatcttaataccctcaagtgaaaggcagaggaaggaataccaatttcgtttacagatcatatgcaggcaaaagagttttcagaaatcaggtttagttacttgtattgtgtctcttatccaagccatgccttgtggtattatgagcgcagaattttgattgaatattgttcatttgcattaaagtat

SEQ ID NO: 22031 - protein, 244 aa, Arabidopsis thaliana; identical to SEQ ID NO: 20888
  peptide (1)..(244): Ceres Seq. ID no. 12562372
  misc_feature (90)..(160): Pfam Name: RNA recognition motif. (a.k.a. RRM, RBD, or RNP domain) Pfam Description: RNA recognition motif. (a.k.a. RRM, RBD, or RNP
  misc_feature (90)..(160): Pfam Name: RNA recognition motif. (a.k.a. RRM, RBD, or RNP domain) Pfam Description: RNA recognition motif. (a.k.a. RRM, RBD, or RNP
  misc_feature (90)..(160): Pfam Name: RNA recognition motif. (a.k.a. RRM, RBD, or RNP domain) Pfam Description: RNA recognition motif. (a.k.a. RRM, RBD, or RNP
  misc_feature (90)..(160): Pfam Name: RNA recognition motif. (a.k.a. RRM, RBD, or RNP domain) Pfam Description: RNA recognition motif. (a.k.a. RRM, RBD, or RNP
  misc_feature (18)..(219): Homolog of NCBI NO: 30679669 NR Description: RNA and export factor binding protein, putative
  misc_feature (18)..(219): Homolog of NCBI NO: 11358209 NR Description: hypothetical protein T22P11.120 - Arabidopsis
  misc_feature (1)..(36): Homolog of NCBI NO: 30411083 NR Description: Similar to THO complex 4 [Homo sapiens]
  misc_feature (18)..(244): Homolog of NCBI NO: 30411083 NR Description: Similar to THO complex 4 [Homo sapiens]
  misc_feature (1)..(36): Homolog of NCBI NO: 6755763 NR Description: RNA and export factor binding protein 1
  misc_feature (18)..(219): Homolog of NCBI NO: 30679669 NR Description: RNA and export factor binding protein, putative
  misc_feature (1)..(36): Homolog of NCBI NO: 30411083 NR Description: Similar to THO complex 4 [Homo sapiens]
  misc_feature (1)..(36): Homolog of NCBI NO: 6755763 NR Description: RNA and export factor binding protein 1
  misc_feature (18)..(244): Homolog of NCBI NO: 30411083 NR Description: Similar to THO complex 4 [Homo sapiens]
  misc_feature (1)..(36): Homolog of NCBI NO: 30411083 NR Description: Similar to THO complex 4 [Homo sapiens]
  misc_feature (18)..(219): Homolog of NCBI NO: 11358209 NR Description: hypothetical protein T22P11.120 - Arabidopsis
  misc_feature (18)..(219): Homolog of NCBI NO: 30679669 NR Description: RNA and export factor binding protein, putative
  misc_feature (1)..(244): Homolog of NCBI NO: 30697310 NR Description: RNA and export factor binding protein, putative
  misc_feature (1)..(244): Homolog of NCBI NO: 30697313 NR Description: RNA and export factor binding protein, putative
  misc_feature (1)..(244): Homolog of NCBI NO: 21555029 NR Description: transcriptional coactivator-like protein
  misc_feature (1)..(244): Homolog of NCBI NO: 9757916 NR Description: RNA and export factor binding protein 2-I-like
  misc_feature (14)..(244): Homolog of NCBI NO: 6755763 NR Description: RNA and export factor binding protein 1
  misc_feature (1)..(244): Homolog of NCBI NO: 30697310 NR Description: RNA and export factor binding protein, putative
  misc_feature (1)..(244): Homolog of NCBI NO: 30697313 NR Description: RNA and export factor binding protein, putative
  misc_feature (1)..(244): Homolog of NCBI NO: 21555029 NR Description: transcriptional coactivator-like protein
  misc_feature (1)..(244): Homolog of NCBI NO: 9757916 NR Description: RNA and export factor binding protein 2-I-like
  misc_feature (14)..(244): Homolog of NCBI NO: 6755763 NR Description: RNA and export factor binding protein 1
  misc_feature (1)..(36): Homolog of NCBI NO: 6755763 NR Description: RNA and export factor binding protein 1
  misc_feature (18)..(244): Homolog of NCBI NO: 30411083 NR Description: Similar to THO complex 4 [Homo sapiens]
  misc_feature (1)..(36): Homolog of NCBI NO: 30411083 NR Description: Similar to THO complex 4 [Homo sapiens]
  misc_feature (18)..(219): Homolog of NCBI NO: 11358209 NR Description: hypothetical protein T22P11.120 - Arabidopsis
  misc_feature (18)..(219): Homolog of NCBI NO: 30679669 NR Description: RNA and export factor binding protein, putative
  misc_feature (1)..(244): Homolog of NCBI NO: 30697310 NR Description: RNA and export factor binding protein, putative
  misc_feature (1)..(244): Homolog of NCBI NO: 30697313 NR Description: RNA and export factor binding protein, putative
  misc_feature (1)..(244): Homolog of NCBI NO: 21555029 NR Description: transcriptional coactivator-like protein
  misc_feature (1)..(244): Homolog of NCBI NO: 9757916 NR Description: RNA and export factor binding protein 2-I-like
  misc_feature (14)..(244): Homolog of NCBI NO: 6755763 NR Description: RNA and export factor binding protein 1
  misc_feature (1)..(36): Homolog of NCBI NO: 6755763 NR Description: RNA and export factor binding protein 1
  misc_feature (18)..(244): Homolog of NCBI NO: 30411083 NR Description: Similar to THO complex 4 [Homo sapiens]
  misc_feature (18)..(219): Homolog of NCBI NO: 11358209 NR Description: hypothetical protein T22P11.120 - Arabidopsis
  misc_feature (14)..(244): Homolog of NCBI NO: 6755763 NR Description: RNA and export factor binding protein 1
  misc_feature (1)..(244): Homolog of NCBI NO: 9757916 NR Description: RNA and export factor binding protein 2-I-like
  misc_feature (1)..(244): Homolog of NCBI NO: 21555029 NR Description: transcriptional coactivator-like protein
  misc_feature (1)..(244): Homolog of NCBI NO: 30697313 NR Description: RNA and export factor binding protein, putative
  misc_feature (1)..(244): Homolog of NCBI NO: 30697310 NR Description: RNA and export factor binding protein, putative

SEQ ID NO: 22032 - protein, 238 aa, Arabidopsis thaliana; identical to SEQ ID NO: 20889
  peptide (1)..(238): Ceres Seq. ID no. 12562373
  misc_feature (84)..(154): Pfam Name: RNA recognition motif. (a.k.a. RRM, RBD, or RNP domain) Pfam Description: RNA recognition motif. (a.k.a. RRM, RBD, or RNP
  misc_feature (84)..(154): Pfam Name: RNA recognition motif. (a.k.a. RRM, RBD, or RNP domain) Pfam Description: RNA recognition motif. (a.k.a. RRM, RBD, or RNP
  misc_feature (84)..(154): Pfam Name: RNA recognition motif. (a.k.a. RRM, RBD, or RNP domain) Pfam Description: RNA recognition motif. (a.k.a. RRM, RBD, or RNP
  misc_feature (84)..(154): Pfam Name: RNA recognition motif. (a.k.a. RRM, RBD, or RNP domain) Pfam Description: RNA recognition motif. (a.k.a. RRM, RBD, or RNP
  misc_feature (12)..(213): Homolog of NCBI NO: 30679669 NR Description: RNA and export factor binding protein, putative
  misc_feature (12)..(213): Homolog of NCBI NO: 11358209 NR Description: hypothetical protein T22P11.120 - Arabidopsis
  misc_feature (1)..(30): Homolog of NCBI NO: 30411083 NR Description: Similar to THO complex 4 [Homo sapiens]
  misc_feature (12)..(238): Homolog of NCBI NO: 30411083 NR Description: Similar to THO complex 4 [Homo sapiens]
  misc_feature (1)..(30): Homolog of NCBI NO: 6755763 NR Description: RNA and export factor binding protein 1
  misc_feature (12)..(213): Homolog of NCBI NO: 30679669 NR Description: RNA and export factor binding protein, putative
  misc_feature (1)..(30): Homolog of NCBI NO: 30411083 NR Description: Similar to THO complex 4 [Homo sapiens]
  misc_feature (1)..(30): Homolog of NCBI NO: 6755763 NR Description: RNA and export factor binding protein 1
  misc_feature (12)..(238): Homolog of NCBI NO: 30411083 NR Description: Similar to THO complex 4 [Homo sapiens]
  misc_feature (1)..(30): Homolog of NCBI NO: 30411083 NR Description: Similar to THO complex 4 [Homo sapiens]
  misc_feature (12)..(213): Homolog of NCBI NO: 11358209 NR Description: hypothetical protein T22P11.120 - Arabidopsis
  misc_feature (12)..(213): Homolog of NCBI NO: 30679669 NR Description: RNA and export factor binding protein, putative
  misc_feature (1)..(238): Homolog of NCBI NO: 30697310 NR Description: RNA and export factor binding protein, putative
  misc_feature (1)..(238): Homolog of NCBI NO: 30697313 NR Description: RNA and export factor binding protein, putative
  misc_feature (1)..(238): Homolog of NCBI NO: 21555029 NR Description: transcriptional coactivator-like protein
  misc_feature (1)..(238): Homolog of NCBI NO: 9757916 NR Description: RNA and export factor binding protein 2-I-like
  misc_feature (8)..(238): Homolog of NCBI NO: 6755763 NR Description: RNA and export factor binding protein 1
  misc_feature (1)..(238): Homolog of NCBI NO: 30697310 NR Description: RNA and export factor binding protein, putative
  misc_feature (1)..(238): Homolog of NCBI NO: 30697313 NR Description: RNA and export factor binding protein, putative
  misc_feature (1)..(238): Homolog of NCBI NO: 21555029 NR Description: transcriptional coactivator-like protein
  misc_feature (1)..(238): Homolog of NCBI NO: 9757916 NR Description: RNA and export factor binding protein 2-I-like
  misc_feature (8)..(238): Homolog of NCBI NO: 6755763 NR Description: RNA and export factor binding protein 1
  misc_feature (1)..(30): Homolog of NCBI NO: 6755763 NR Description: RNA and export factor binding protein 1
  misc_feature (12)..(238): Homolog of NCBI NO: 30411083 NR Description: Similar to THO complex 4 [Homo sapiens]
  misc_feature (1)..(30): Homolog of NCBI NO: 30411083 NR Description: Similar to THO complex 4 [Homo sapiens]
  misc_feature (12)..(213): Homolog of NCBI NO: 11358209 NR Description: hypothetical protein T22P11.120 - Arabidopsis
  misc_feature (12)..(213): Homolog of NCBI NO: 30679669 NR Description: RNA and export factor binding protein, putative
  misc_feature (1)..(238): Homolog of NCBI NO: 30697310 NR Description: RNA and export factor binding protein, putative
  misc_feature (1)..(238): Homolog of NCBI NO: 30697313 NR Description: RNA and export factor binding protein, putative
  misc_feature (1)..(238): Homolog of NCBI NO: 21555029 NR Description: transcriptional coactivator-like protein
  misc_feature (1)..(238): Homolog of NCBI NO: 9757916 NR Description: RNA and export factor binding protein 2-I-like
  misc_feature (8)..(238): Homolog of NCBI NO: 6755763 NR Description: RNA and export factor binding protein 1
  misc_feature (1)..(30): Homolog of NCBI NO: 6755763 NR Description: RNA and export factor binding protein 1
  misc_feature (12)..(238): Homolog of NCBI NO: 30411083 NR Description: Similar to THO complex 4 [Homo sapiens]
  misc_feature (12)..(213): Homolog of NCBI NO: 11358209 NR Description: hypothetical protein T22P11.120 - Arabidopsis
  misc_feature (8)..(238): Homolog of NCBI NO: 6755763 NR Description: RNA and export factor binding protein 1
  misc_feature (1)..(238): Homolog of NCBI NO: 9757916 NR Description: RNA and export factor binding protein 2-I-like
  misc_feature (1)..(238): Homolog of NCBI NO: 21555029 NR Description: transcriptional coactivator-like protein
  misc_feature (1)..(238): Homolog of NCBI NO: 30697313 NR Description: RNA and export factor binding protein, putative
  misc_feature (1)..(238): Homolog of NCBI NO: 30697310 NR Description: RNA and export factor binding protein, putative

SEQ ID NO: 22033 - protein, 233 aa, Arabidopsis thaliana
  peptide (1)..(233): Ceres Seq. ID no. 12562374
  misc_feature (79)..(149): Pfam Name: RNA recognition motif. (a.k.a. RRM, RBD, or RNP domain) Pfam Description: RNA recognition motif. (a.k.a. RRM, RBD, or RNP
  misc_feature (79)..(149): Pfam Name: RNA recognition motif. (a.k.a. RRM, RBD, or RNP domain) Pfam Description: RNA recognition motif. (a.k.a. RRM, RBD, or RNP
  misc_feature (79)..(149): Pfam Name: RNA recognition motif. (a.k.a. RRM, RBD, or RNP domain) Pfam Description: RNA recognition motif. (a.k.a. RRM, RBD, or RNP
  misc_feature (79)..(149): Pfam Name: RNA recognition motif. (a.k.a. RRM, RBD, or RNP domain) Pfam Description: RNA recognition motif. (a.k.a. RRM, RBD, or RNP
  misc_feature (7)..(208): Homolog of NCBI NO: 30679669 NR Description: RNA and export factor binding protein, putative
  misc_feature (7)..(208): Homolog of NCBI NO: 11358209 NR Description: hypothetical protein T22P11.120 - Arabidopsis
  misc_feature (1)..(25): Homolog of NCBI NO: 30411083 NR Description: Similar to THO complex 4 [Homo sapiens]
  misc_feature (7)..(233): Homolog of NCBI NO: 30411083 NR Description: Similar to THO complex 4 [Homo sapiens]
  misc_feature (1)..(25): Homolog of NCBI NO: 6755763 NR Description: RNA and export factor binding protein 1
  misc_feature (7)..(208): Homolog of NCBI NO: 30679669 NR Description: RNA and export factor binding protein, putative
  misc_feature (1)..(25): Homolog of NCBI NO: 30411083 NR Description: Similar to THO complex 4 [Homo sapiens]
  misc_feature (1)..(25): Homolog of NCBI NO: 6755763 NR Description: RNA and export factor binding protein 1
  misc_feature (7)..(233): Homolog of NCBI NO: 30411083 NR Description: Similar to THO complex 4 [Homo sapiens]
  misc_feature (1)..(25): Homolog of NCBI NO: 30411083 NR Description: Similar to THO complex 4 [Homo sapiens]
  misc_feature (7)..(208): Homolog of NCBI NO: 11358209 NR Description: hypothetical protein T22P11.120 - Arabidopsis
  misc_feature (7)..(208): Homolog of NCBI NO: 30679669 NR Description: RNA and export factor binding protein, putative
  misc_feature (1)..(233): Homolog of NCBI NO: 30697310 NR Description: RNA and export factor binding protein, putative
  misc_feature (1)..(233): Homolog of NCBI NO: 30697313 NR Description: RNA and export factor binding protein, putative
  misc_feature (1)..(233): Homolog of NCBI NO: 21555029 NR Description: transcriptional coactivator-like protein
  misc_feature (1)..(233): Homolog of NCBI NO: 9757916 NR Description: RNA and export factor binding protein 2-I-like
  misc_feature (3)..(233): Homolog of NCBI NO: 6755763 NR Description: RNA and export factor binding protein 1
  misc_feature (1)..(233): Homolog of NCBI NO: 30697310 NR Description: RNA and export factor binding protein, putative
  misc_feature (1)..(233): Homolog of NCBI NO: 30697313 NR Description: RNA and export factor binding protein, putative
  misc_feature (1)..(233): Homolog of NCBI NO: 21555029 NR Description: transcriptional coactivator-like protein
  misc_feature (1)..(233): Homolog of NCBI NO: 9757916 NR Description: RNA and export factor binding protein 2-I-like
  misc_feature (3)..(233): Homolog of NCBI NO: 6755763 NR Description: RNA and export factor binding protein 1
  misc_feature (1)..(25): Homolog of NCBI NO: 6755763 NR Description: RNA and export factor binding protein 1
  misc_feature (7)..(233): Homolog of NCBI NO: 30411083 NR Description: Similar to THO complex 4 [Homo sapiens]
  misc_feature (1)..(25): Homolog of NCBI NO: 30411083 NR Description: Similar to THO complex 4 [Homo sapiens]
  misc_feature (7)..(208): Homolog of NCBI NO: 11358209 NR Description: hypothetical protein T22P11.120 - Arabidopsis
  misc_feature (7)..(208): Homolog of NCBI NO: 30679669 NR Description: RNA and export factor binding protein, putative
  misc_feature (1)..(233): Homolog of NCBI NO: 30697310 NR Description: RNA and export factor binding protein, putative
  misc_feature (1)..(233): Homolog of NCBI NO: 30697313 NR Description: RNA and export factor binding protein, putative
  misc_feature (1)..(233): Homolog of NCBI NO: 21555029 NR Description: transcriptional coactivator-like protein
  misc_feature (1)..(233): Homolog of NCBI NO: 9757916 NR Description: RNA and export factor binding protein 2-I-like
  misc_feature (3)..(233): Homolog of NCBI NO: 6755763 NR Description: RNA and export factor binding protein 1
  misc_feature (1)..(25): Homolog of NCBI NO: 6755763 NR Description: RNA and export factor binding protein 1
  misc_feature (7)..(233): Homolog of NCBI NO: 30411083 NR Description: Similar to THO complex 4 [Homo sapiens]
  misc_feature (7)..(208): Homolog of NCBI NO: 11358209 NR Description: hypothetical protein T22P11.120 - Arabidopsis
  misc_feature (3)..(233): Homolog of NCBI NO: 6755763 NR Description: RNA and export factor binding protein 1
  misc_feature (1)..(233): Homolog of NCBI NO: 9757916 NR Description: RNA and export factor binding protein 2-I-like
  misc_feature (1)..(233): Homolog of NCBI NO: 21555029 NR Description: transcriptional coactivator-like protein
  misc_feature (1)..(233): Homolog of NCBI NO: 30697313 NR Description: RNA and export factor binding protein, putative
  misc_feature (1)..(233): Homolog of NCBI NO: 30697310 NR Description: RNA and export factor binding protein, putative
MIAKNRKSRGGAGPARGTGSGSGPGPTRRNNPNRKSTRSAPYQSAKAPESTWGHDMFSDRSEDHRSGRSSAGIETGTKLYISNLDYGVMNEDIKELFAEVGELKRYTVHFDRSGRSKGTAEVVYSRRGDALAAVKKYNDVQLDGKPMKIEIVGTNLQTAAAPSGRPANGNSNGAPWRGGQGRGGQQRGGGRGGGGRGGGGRGRRPGKGPAEKISAEDLDADLDKYHSGDMETN

SEQ ID NO: 22034 - DNA, 1146 bp, Arabidopsis thaliana
  misc_feature (1)..(1146): Ceres Seq. ID no. 12325970
  misc_feature: MA Experiment ID: 108579 Result: Down-regulated in Transcription
  misc_feature: MA Experiment 108579 PARAMETER Experiment Name: At_4deg_Cold_cDNA_P Parameter: Temperature (deg C) Value: 4 vs. 22
  misc_feature: MA Experiment 108579 PARAMETER Experiment Name: At_4deg_Cold_cDNA_P Parameter: Timepoint (hr) Value: 6
  misc_feature: MA Experiment 108579 PARAMETER Experiment Name: At_4deg_Cold_cDNA_P Parameter: Tissue Value: Aerial
ctttttctctttcacatcgttctttctctcgcaaacccaaattctctcagcgccggtcaaatacttgtctctctctctctctctctttcactcttgtcttgtctccttcgaagctgtttgttctgtaagaaagatggaagcaggtggcgcgtacaatccacgcactgttgaagaggtgtttagggattttaagggtcgtagagctggcatgattaaggctttaaccactgatgttcaggagtttttccgactttgtgatcccgaaaaggagaacctttgcctttacggacatccaaatgagcactgggaagtgaatttgccagctgaagaggttcctcctgagctcccagagcctgtcttgggtatcaattttgccagagacgggatggcggaaaaggattggttgtcccttgttgctgtccacagtgatgcttggcttcttgctgttgctttcttttttggagccaggtttggatttgacaaagctgataggaagaggcttttcaatatggtgaatgacctcccaacaatctttgaggttgtagctggcactgctaagaaacaaggaaaagataagtcctctgtttccaacaacagcagcaacagatccaaatcaagctccaagcgaggatctgaatcccgtgccaagttctcaaagccggagccgaaagatgatgaggaggaggaagaggaaggtgtggaagaggaggatgaggatgagcaaggtgaaacacagtgtggagcatgtggtgagagctatgcagctgatgagttctggatttgctgtgacctctgtgagatgtggtttcatggaaagtgtgttaagataacaccagcaagagctgagcacatcaagcaatacaagtgcccttcttgcagcaacaaaagggctcgttcctaaatttgttgaccgctcgcttctgtgtatctacctttgcatatgatgatgaacagcttaactgtttggtttagatcagatttgtcatatggatttggtaattttaggaagacattttagttttttcattgttacattttggcgattgaagggataactctttgtttaggggtaatgatcttttgctctgttttatgtttgtttattaacattcttcaaactcaatcaaaagtattttggttagtctt

SEQ ID NO: 22035 - protein, 299 aa, Arabidopsis thaliana
  peptide (1)..(299): Ceres Seq. ID no. 12325971
  misc_feature (245)..(295): Pfam Name: PHD-finger Pfam Description: PHD-finger
  misc_feature (245)..(295): Pfam Name: PHD-finger Pfam Description: PHD-finger
  misc_feature (48)..(299): Homolog of NCBI NO: 4091080 NR Description: nucleic acid binding protein [Oryza sativa]
  misc_feature (48)..(299): Homolog of NCBI NO: 34907474 NR Description: nucleic acid binding protein
  misc_feature (53)..(298): Homolog of NCBI NO: 21593407 NR Description: putative PHD-type zinc finger protein
  misc_feature (53)..(298): Homolog of NCBI NO: 15226967 NR Description: putative PHD-type zinc finger protein
  misc_feature (51)..(293): Homolog of NCBI NO: 34394182 NR Description: putative nucleic acid binding protein
  misc_feature (48)..(299): Homolog of NCBI NO: 4091080 NR Description: nucleic acid binding protein [Oryza sativa]
  misc_feature (53)..(298): Homolog of NCBI NO: 21593407 NR Description: putative PHD-type zinc finger protein
  misc_feature (51)..(293): Homolog of NCBI NO: 34394182 NR Description: putative nucleic acid binding protein
  misc_feature (45)..(299): Homolog of NCBI NO: 15239624 NR Description: nucleic acid binding protein - like
  misc_feature (45)..(299): Homolog of NCBI NO: 7486722 NR Description: hypothetical protein F9D12.13 - Arabidopsis
  misc_feature (45)..(298): Homolog of NCBI NO: 30687843 NR Description: zinc finger protein - like [Arabidopsis thaliana]
  misc_feature (45)..(299): Homolog of NCBI NO: 15229157 NR Description: nucleic acid binding protein-like
  misc_feature (51)..(293): Homolog of NCBI NO: 14192880 NR Description: Putative nucleic acid binding protein [Oryza
  misc_feature (53)..(298): Homolog of NCBI NO: 15226967 NR Description: putative PHD-type zinc finger protein
  misc_feature (48)..(299): Homolog of NCBI NO: 34907474 NR Description: nucleic acid binding protein
  misc_feature (51)..(293): Homolog of NCBI NO: 14192880 NR Description: Putative nucleic acid binding protein [Oryza
  misc_feature (45)..(299): Homolog of NCBI NO: 15229157 NR Description: nucleic acid binding protein-like
  misc_feature (45)..(298): Homolog of NCBI NO: 30687843 NR Description: zinc finger protein - like [Arabidopsis thaliana]
  misc_feature (45)..(299): Homolog of NCBI NO: 7486722 NR Description: hypothetical protein F9D12.13 - Arabidopsis
  misc_feature (45)..(299): Homolog of NCBI NO: 15239624 NR Description: nucleic acid binding protein - like
FFSFTSFFLSQTQILSAPVKYLSLSLSLFHSCLVSFEAVCSVRKMEAGGAYNPRTVEEVFRDFKGRRAGMIKALTTDVQEFFRLCDPEKENLCLYGHPNEHWEVNLPAEEVPPELPEPVLGINFARDGMAEKDWLSLVAVHSDAWLLAVAFFFGARFGFDKADRKRLFNMVNDLPTIFEVVAGTAKKQGKDKSSVSNNSSNRSKSSSKRGSESRAKFSKPEPKDDEEEEEEGVEEEDEDEQGETQCGACGESYAADEFWICCDLCEMWFHGKCVKITPARAEHIKQYKCPSCSNKRARS

SEQ ID NO: 22036 - protein, 255 aa, Arabidopsis thaliana
  peptide (1)..(255): Ceres Seq. ID no. 12325972
  misc_feature (201)..(251): Pfam Name: PHD-finger Pfam Description: PHD-finger
  misc_feature (201)..(251): Pfam Name: PHD-finger Pfam Description: PHD-finger
  misc_feature (4)..(255): Homolog of NCBI NO: 4091080 NR Description: nucleic acid binding protein [Oryza sativa]
  misc_feature (4)..(255): Homolog of NCBI NO: 34907474 NR Description: nucleic acid binding protein
  misc_feature (9)..(254): Homolog of NCBI NO: 21593407 NR Description: putative PHD-type zinc finger protein
  misc_feature (9)..(254): Homolog of NCBI NO: 15226967 NR Description: putative PHD-type zinc finger protein
  misc_feature (7)..(249): Homolog of NCBI NO: 34394182 NR Description: putative nucleic acid binding protein
  misc_feature (4)..(255): Homolog of NCBI NO: 4091080 NR Description: nucleic acid binding protein [Oryza sativa]
  misc_feature (9)..(254): Homolog of NCBI NO: 21593407 NR Description: putative PHD-type zinc finger protein
  misc_feature (7)..(249): Homolog of NCBI NO: 34394182 NR Description: putative nucleic acid binding protein
  misc_feature (1)..(255): Homolog of NCBI NO: 15239624 NR Description: nucleic acid binding protein - like
  misc_feature (1)..(255): Homolog of NCBI NO: 7486722 NR Description: hypothetical protein F9D12.13 - Arabidopsis
  misc_feature (1)..(254): Homolog of NCBI NO: 30687843 NR Description: zinc finger protein - like [Arabidopsis thaliana]
  misc_feature (1)..(255): Homolog of NCBI NO: 15229157 NR Description: nucleic acid binding protein-like
  misc_feature (7)..(249): Homolog of NCBI NO: 14192880 NR Description: Putative nucleic acid binding protein [Oryza
  misc_feature (9)..(254): Homolog of NCBI NO: 15226967 NR Description: putative PHD-type zinc finger protein
  misc_feature (4)..(255): Homolog of NCBI NO: 34907474 NR Description: nucleic acid binding protein
  misc_feature (7)..(249): Homolog of NCBI NO: 14192880 NR Description: Putative nucleic acid binding protein [Oryza
  misc_feature (1)..(255): Homolog of NCBI NO: 15229157 NR Description: nucleic acid binding protein-like
  misc_feature (1)..(254): Homolog of NCBI NO: 30687843 NR Description: zinc finger protein - like [Arabidopsis thaliana]
  misc_feature (1)..(255): Homolog of NCBI NO: 7486722 NR Description: hypothetical protein F9D12.13 - Arabidopsis
  misc_feature (1)..(255): Homolog of NCBI NO: 15239624 NR Description: nucleic acid binding protein - like
MEAGGAYNPRTVEEVFRDFKGRRAGMIKALTTDVQEFFRLCDPEKENLCLYGHPNEHWEVNLPAEEVPPELPEPVLGINFARDGMAEKDWLSLVAVHSDAWLLAVAFFFGARFGFDKADRKRLFNMVNDLPTIFEVVAGTAKKQGKDKSSVSNNSSNRSKSSSKRGSESRAKFSKPEPKDDEEEEEEGVEEEDEDEQGETQCGACGESYAADEFWICCDLCEMWFHGKCVKITPARAEHIKQYKCPSCSNKRARS

SEQ ID NO: 22037 - protein, 230 aa, Arabidopsis thaliana
  peptide (1)..(230): Ceres Seq. ID no. 12325973
  misc_feature (176)..(226): Pfam Name: PHD-finger Pfam Description: PHD-finger
  misc_feature (176)..(226): Pfam Name: PHD-finger Pfam Description: PHD-finger
  misc_feature (1)..(230): Homolog of NCBI NO: 4091080 NR Description: nucleic acid binding protein [Oryza sativa]
  misc_feature (1)..(230): Homolog of NCBI NO: 34907474 NR Description: nucleic acid binding protein
  misc_feature (1)..(229): Homolog of NCBI NO: 21593407 NR Description: putative PHD-type zinc finger protein
  misc_feature (1)..(229): Homolog of NCBI NO: 15226967 NR Description: putative PHD-type zinc finger protein
  misc_feature (1)..(224): Homolog of NCBI NO: 34394182 NR Description: putative nucleic acid binding protein
  misc_feature (1)..(230): Homolog of NCBI NO: 4091080 NR Description: nucleic acid binding protein [Oryza sativa]
  misc_feature (1)..(229): Homolog of NCBI NO: 21593407 NR Description: putative PHD-type zinc finger protein
  misc_feature (1)..(224): Homolog of NCBI NO: 34394182 NR Description: putative nucleic acid binding protein
  misc_feature (1)..(230): Homolog of NCBI NO: 15239624 NR Description: nucleic acid binding protein - like
  misc_feature (1)..(230): Homolog of NCBI NO: 7486722 NR Description: hypothetical protein F9D12.13 - Arabidopsis
  misc_feature (1)..(229): Homolog of NCBI NO: 30687843 NR Description: zinc finger protein - like [Arabidopsis thaliana]
  misc_feature (1)..(230): Homolog of NCBI NO: 15229157 NR Description: nucleic acid binding protein-like
  misc_feature (1)..(224): Homolog of NCBI NO: 14192880 NR Description: Putative nucleic acid binding protein [Oryza
  misc_feature (1)..(229): Homolog of NCBI NO: 15226967 NR Description: putative PHD-type zinc finger protein
  misc_feature (1)..(230): Homolog of NCBI NO: 34907474 NR Description: nucleic acid binding protein
  misc_feature (1)..(224): Homolog of NCBI NO: 14192880 NR Description: Putative nucleic acid binding protein [Oryza
  misc_feature (1)..(230): Homolog of NCBI NO: 15229157 NR Description: nucleic acid binding protein-like
  misc_feature (1)..(229): Homolog of NCBI NO: 30687843 NR Description: zinc finger protein - like [Arabidopsis thaliana]
  misc_feature (1)..(230): Homolog of NCBI NO: 7486722 NR Description: hypothetical protein F9D12.13 - Arabidopsis
  misc_feature (1)..(230): Homolog of NCBI NO: 15239624 NR Description: nucleic acid binding protein - like
MIKALTTDVQEFFRLCDPEKENLCLYGHPNEHWEVNLPAEEVPPELPEPVLGINFARDGMAEKDWLSLVAVHSDAWLLAVAFFFGARFGFDKADRKRLFNMVNDLPTIFEVVAGTAKKQGKDKSSVSNNSSNRSKSSSKRGSESRAKFSKPEPKDDEEEEEEGVEEEDEDEQGETQCGACGESYAADEFWICCDLCEMWFHGKCVKITPARAEHIKQYKCPSCSNKRARS

SEQ ID NO: 22038 - DNA, 2256 bp, Arabidopsis thaliana
  misc_feature (1)..(2256): Ceres Seq. ID no. 13646318
  misc_feature: MA Experiment ID: 108434 Result: Up-regulated in Transcription
  misc_feature: MA Experiment 108434 PARAMETER Experiment Name: At_Root_Tips_cDNA_P Parameter: Tissue Value: Root Tips
  misc_feature: MA Experiment ID: 108462 Result: Down-regulated in Transcription
  misc_feature: MA Experiment 108462 PARAMETER Experiment Name: At_Germinating_Seeds_cDNA_P Parameter: Age (day) Value: 2 vs. 0
  misc_feature: MA Experiment 108462 PARAMETER Experiment Name: At_Germinating_Seeds_cDNA_P Parameter: Tissue Value: Germinating Seeds
  misc_feature: MA Experiment ID: 108463 Result: Down-regulated in Transcription
  misc_feature: MA Experiment 108463 PARAMETER Experiment Name: At_Germinating_Seeds_cDNA_P Parameter: Age (day) Value: 3 vs. 0
  misc_feature: MA Experiment 108463 PARAMETER Experiment Name: At_Germinating_Seeds_cDNA_P Parameter: Tissue Value: Germinating Seeds
  misc_feature: MA Experiment ID: 108464 Result: Down-regulated in Transcription
  misc_feature: MA Experiment 108464 PARAMETER Experiment Name: At_Germinating_Seeds_cDNA_P Parameter: Age (day) Value: 4 vs. 0
  misc_feature: MA Experiment 108464 PARAMETER Experiment Name: At_Germinating_Seeds_cDNA_P Parameter: Tissue Value: Germinating Seeds
  misc_feature: MA Experiment ID: 108501 Result: Up-regulated in Transcription
  misc_feature: MA Experiment 108501 PARAMETER Experiment Name: At_ap2_floral_buds_cDNA_P Parameter: Plant Line Value: ap2 (Ler.)
  misc_feature: MA Experiment 108501 PARAMETER Experiment Name: At_ap2_floral_buds_cDNA_P Parameter: Tissue Value: Closed Flower
  misc_feature: MA Experiment ID: 108573 Result: Up-regulated in Transcription
  misc_feature: MA Experiment 108573 PARAMETER Experiment Name: At_Drought_cDNA_P Parameter: Timepoint (hr) Value: 6
  misc_feature: MA Experiment 108573 PARAMETER Experiment Name: At_Drought_cDNA_P Parameter: Tissue Value: Aerial
  misc_feature: MA Experiment 108573 PARAMETER Experiment Name: At_Drought_cDNA_P Parameter: Treatment Value: Drought vs. No Drought
  misc_feature: MA Experiment ID: 108576 Result: Up-regulated in Transcription
  misc_feature: MA Experiment 108576 PARAMETER Experiment Name: At_42deg_Heat_cDNA_P Parameter: Temperature (deg C) Value: 42 vs. 22
  misc_feature: MA Experiment 108576 PARAMETER Experiment Name: At_42deg_Heat_cDNA_P Parameter: Timepoint (hr) Value: 1
  misc_feature: MA Experiment 108576 PARAMETER Experiment Name: At_42deg_Heat_cDNA_P Parameter: Tissue Value: Aerial
  misc_feature: MA Experiment ID: 108577 Result: Up-regulated in Transcription
  misc_feature: MA Experiment 108577 PARAMETER Experiment Name: At_42deg_Heat_cDNA_P Parameter: Temperature (deg C) Value: 42 vs. 22
  misc_feature: MA Experiment 108577 PARAMETER Experiment Name: At_42deg_Heat_cDNA_P Parameter: Timepoint (hr) Value: 6
  misc_feature: MA Experiment 108577 PARAMETER Experiment Name: At_42deg_Heat_cDNA_P Parameter: Tissue Value: Aerial
  misc_feature: MA Experiment ID: 108585 Result: Up-regulated in Transcription
  misc_feature: MA Experiment 108585 PARAMETER Experiment Name: At_5mM_NaNP_cDNA_P Parameter: Timepoint (hr) Value: 6
  misc_feature: MA Experiment 108585 PARAMETER Experiment Name: At_5mM_NaNP_cDNA_P Parameter: Tissue Value: Aerial
  misc_feature: MA Experiment 108585 PARAMETER Experiment Name: At_5mM_NaNP_cDNA_P Parameter: Treatment Value: null
  misc_feature: MA Experiment ID: 108595 Result: Down-regulated in Transcription
  misc_feature: MA Experiment 108595 PARAMETER Experiment Name: At_Ler-pi_Ovule_cDNA_P Parameter: Plant Line Value: null
  misc_feature: MA Experiment ID: 20000069 Result: Down-regulated in Transcription
  misc_feature: MA Experiment 20000069 PARAMETER Experiment Name: At_100uM_ABA_Mutants_cDNA_P Parameter: Plant Line Value: CS23
  misc_feature: MA Experiment 20000069 PARAMETER Experiment Name: At_100uM_ABA_Mutants_cDNA_P Parameter: Timepoint (hr) Value: 6
  misc_feature: MA Experiment 20000069 PARAMETER Experiment Name: At_100uM_ABA_Mutants_cDNA_P Parameter: Tissue Value: Aerial
  misc_feature: MA Experiment 20000069 PARAMETER Experiment Name: At_100uM_ABA_Mutants_cDNA_P Parameter: Treatment Value: 100uM ABA vs. No Treatment
  misc_feature: MA Experiment ID: 20000087 Result: Down-regulated in Transcription
  misc_feature: MA Experiment 20000087 PARAMETER Experiment Name: At_100uM_ABA_Mutants_cDNA_P Parameter: Plant Line Value: WS
  misc_feature: MA Experiment 20000087 PARAMETER Experiment Name: At_100uM_ABA_Mutants_cDNA_P Parameter: Timepoint (hr) Value: 6
  misc_feature: MA Experiment 20000087 PARAMETER Experiment Name: At_100uM_ABA_Mutants_cDNA_P Parameter: Tissue Value: Aerial
  misc_feature: MA Experiment 20000087 PARAMETER Experiment Name: At_100uM_ABA_Mutants_cDNA_P Parameter: Treatment Value: 100uM ABA vs. No Treatment
  misc_feature: MA Experiment ID: 20000111 Result: Up-regulated in Transcription
  misc_feature: MA Experiment 20000111 PARAMETER Experiment Name: At_42deg_Heat_cDNA_P Parameter: Temperature (deg C) Value: 42 vs. 22
  misc_feature: MA Experiment 20000111 PARAMETER Experiment Name: At_42deg_Heat_cDNA_P Parameter: Timepoint (hr) Value: 6
  misc_feature: MA Experiment 20000111 PARAMETER Experiment Name: At_42deg_Heat_cDNA_P Parameter: Tissue Value: Aerial
  misc_feature: MA Experiment ID: 20000112 Result: Up-regulated in Transcription
  misc_feature: MA Experiment 20000112 PARAMETER Experiment Name: At_42deg_Heat_cDNA_P Parameter: Temperature (deg C) Value: 42 vs. 22
  misc_feature: MA Experiment 20000112 PARAMETER Experiment Name: At_42deg_Heat_cDNA_P Parameter: Timepoint (hr) Value: 2
  misc_feature: MA Experiment 20000112 PARAMETER Experiment Name: At_42deg_Heat_cDNA_P Parameter: Tissue Value: Aerial
  misc_feature: MA Experiment ID: 20000113 Result: Up-regulated in Transcription
  misc_feature: MA Experiment 20000113 PARAMETER Experiment Name: At_42deg_Heat_cDNA_P Parameter: Temperature (deg C) Value: 42 vs. 22
  misc_feature: MA Experiment 20000113 PARAMETER Experiment Name: At_42deg_Heat_cDNA_P Parameter: Timepoint (hr) Value: 8
  misc_feature: MA Experiment 20000113 PARAMETER Experiment Name: At_42deg_Heat_cDNA_P Parameter: Tissue Value: Aerial
  misc_feature: MA Experiment ID: 20000144 Result: Up-regulated in Transcription
  misc_feature: MA Experiment 20000144 PARAMETER Experiment Name: At_42deg_Heat_cDNA_P Parameter: Temperature (deg C) Value: 42 vs. 22
  misc_feature: MA Experiment 20000144 PARAMETER Experiment Name: At_42deg_Heat_cDNA_P Parameter: Timepoint (hr) Value: 1
  misc_feature: MA Experiment 20000144 PARAMETER Experiment Name: At_42deg_Heat_cDNA_P Parameter: Tissue Value: Aerial
  misc_feature: MA Experiment ID: 20000314 Result: Down-regulated in Transcription
  misc_feature: MA Experiment 20000314 PARAMETER Experiment Name: At_14day_Shoots-Roots_Sub_P Parameter: Age (day) Value: 14
  misc_feature: MA Experiment 20000314 PARAMETER Experiment Name: At_14day_Shoots-Roots_Sub_P Parameter: Organism Value: A. thaliana
  misc_feature: MA Experiment 20000314 PARAMETER Experiment Name: At_14day_Shoots-Roots_Sub_P Parameter: Plant Line Value: WS
  misc_feature: MA Experiment 20000314 PARAMETER Experiment Name: At_14day_Shoots-Roots_Sub_P Parameter: Tissue Value: Roots vs. Whole Plant
  misc_feature: MA Experiment ID: 20000327 Result: Up-regulated in Transcription
  misc_feature: MA Experiment 20000327 PARAMETER Experiment Name: At_42deg_Heat_Sub_P Parameter: Age (day) Value: 14
  misc_feature: MA Experiment 20000327 PARAMETER Experiment Name: At_42deg_Heat_Sub_P Parameter: Organism Value: A. thaliana
  misc_feature: MA Experiment 20000327 PARAMETER Experiment Name: At_42deg_Heat_Sub_P Parameter: Plant Line Value: WS
  misc_feature: MA Experiment 20000327 PARAMETER Experiment Name: At_42deg_Heat_Sub_P Parameter: Temperature (deg C) Value: 42 vs. 22
  misc_feature: MA Experiment 20000327 PARAMETER Experiment Name: At_42deg_Heat_Sub_P Parameter: Timepoint (hr) Value: 1
  misc_feature: MA Experiment 20000327 PARAMETER Experiment Name: At_42deg_Heat_Sub_P Parameter: Tissue Value: Aerial
  misc_feature: MA Experiment ID: 20000328 Result: Up-regulated in Transcription
  misc_feature: MA Experiment 20000328 PARAMETER Experiment Name: At_42deg_Heat_Sub_P Parameter: Age (day) Value: 14
  misc_feature: MA Experiment 20000328 PARAMETER Experiment Name: At_42deg_Heat_Sub_P Parameter: Organism Value: A. thaliana
  misc_feature: MA Experiment 20000328 PARAMETER Experiment Name: At_42deg_Heat_Sub_P Parameter: Plant Line Value: WS
  misc_feature: MA Experiment 20000328 PARAMETER Experiment Name: At_42deg_Heat_Sub_P Parameter: Temperature (deg C) Value: 42 vs. 22
  misc_feature: MA Experiment 20000328 PARAMETER Experiment Name: At_42deg_Heat_Sub_P Parameter: Timepoint (hr) Value: 6
  misc_feature: MA Experiment 20000328 PARAMETER Experiment Name: At_42deg_Heat_Sub_P Parameter: Tissue Value: Aerial
  misc_feature: MA Experiment ID: 20000355 Result: Down-regulated in Transcription
  misc_feature: MA Experiment 20000355 PARAMETER Experiment Name: At_Siliques_Sub_P Parameter: Age (day) Value: 21
  misc_feature: MA Experiment 20000355 PARAMETER Experiment Name: At_Siliques_Sub_P Parameter: Organism Value: A. thaliana
  misc_feature: MA Experiment 20000355 PARAMETER Experiment Name: At_Siliques_Sub_P Parameter: Plant Line Value: WS
  misc_feature: MA Experiment 20000355 PARAMETER Experiment Name: At_Siliques_Sub_P Parameter: Tissue Value: Less Than 5mm Siliques vs. Whole Plant
  misc_feature: MA Experiment ID: 20001807 Result: Up-regulated in Transcription
  misc_feature: MA Experiment 20001807 PARAMETER Experiment Name: At_50mM_NH4NO3_L-to-H_Sub_P Parameter: Timepoint (hr) Value: 6
  misc_feature: MA Experiment 20001807 PARAMETER Experiment Name: At_50mM_NH4NO3_L-to-H_Sub_P Parameter: Tissue Value: Leaf
  misc_feature: MA Experiment 20001807 PARAMETER Experiment Name: At_50mM_NH4NO3_L-to-H_Sub_P Parameter: Treatment Value: 50mM NH4NO3 vs 100mM Mannitol
gaccaaatacaaaccctagccgccttattcgtcttcttcgttctctagttttttcctcagtctctgttcttagatcccttgtagtttccaaatcttccgataaaaatgtcgggtaaaggagaaggaccagctatcggtatcgatcttggtaccacttactcttgcgtcggagtatggcaacacgaccgtgttgagatcattgctaatgatcaaggaaacagaaccacgccatcttacgttgctttcaccgactccgagaggttgatcggtgacgcagctaagaatcaggtcgccatgaaccccgttaacaccgttttcgacgctaagaggttgatcggtcgtcgtttctctgacagctctgttcagagtgacatgaaattgtggccattcaagattcaagccggacctgccgataagccaatgatctacgtcgaatacaagggtgaagagaaagagttcgcagctgaggagatttcttccatggttcttattaagatgcgtgagattgctgaggcttaccttggtgtcacaatcaagaacgccgttgttaccgttccagcttacttcaacgactctcagcgtcaggctacaaaggatgctggtgtcatcgctggtttgaacgttatgcgaatcatcaacgagcctacagccgccgctattgcctacggtcttgacaaaaaggctaccagcgttggagagaagaatgttcttatcttcgatcttggtggtggcacttttgatgtctctcttcttaccattgaagagggtatctttgaggtgaaggcaactgctggtgacacccatcttggtggggaagattttgacaacagaatggttaaccactttgtccaagagttcaagaggaagagtaagaaggatatcaccggtaacccaagagctcttaggaggttgagaacttcctgtgagagagcgaagaggactctttcttccactgctcagaccaccatcgagattgactctctatacgagggtatcgacttctactccaccatcacccgtgctagatttgaggagctcaacatggatctcttcaggaagtgtatggagccagttgagaagtgtcttcgtgatgctaagatggacaagagcactgttcatgatgttgtccttgttggtggttctacccgtatccctaaggttcagcaattgctccaggacttcttcaacggcaaagagctttgcaagtctattaaccctgatgaggctgttgcctacggtgctgctgtccagggagctattctcagcggtgaaggaaacgagaaggttcaagatcttctattgctcgatgtcactcctctctcccttggtttggaaactgccggtggtgtcatgaccactttgatcccaaggaacacaaccatcccaaccaagaaggaacaagtcttctccacctactcagacaaccaacccggtgtgttgatccaggtgtacgaaggagagagagccagaaccaaggacaacaaccttcttggtaaatttgagctctccggaattcctccagctcctcgtggtgtcccccagatcacagtctgctttgacattgatgccaatggtatcctcaatgtctctgctgaggacaagaccaccggacagaagaacaagatcaccatcaccaatgacaagggtcgtctctccaaggatgagattgagaagatggttcaagaggctgagaagtacaagtccgaagacgaggagcacaagaagaaggttgaagccaagaacgctctcgagaactacgcttacaacatgaggaacaccatccaagacgagaagattggtgagaagctcccggctgcagacaagaagaagatcgaggattctattgagcaggcgattcaatggctcgagggtaaccagttggctgaggctgatgagttcgaagacaagatgaaggaattggagagcatctgcaacccaatcattgccaagatgtaccaaggagctggtggtgaagccggtggtccaggtgcctctggtatggacgatgatgctccccctgcttcaggcggtgctggacctaagatcgaggaggtcgactaatttgttggacaatgacctctctctttctcctatctctatctcttttacttgcttttttttgatctgttaagactttttatgttgggcttttttaaagaagcccattttgtggtgttttttggttagtacttttttgaacaatggttggttctataccagtttagctacgatgacggataaaattaaaagtttgcc

SEQ ID NO: 22039 - protein, 651 aa, Arabidopsis thaliana
  peptide (1)..(651): Ceres Seq. ID no. 13646319
  misc_feature (124)..(646): Homolog of NCBI NO: 4164594 NR Description: heat shock protein 70 [Paracoccidioides
  misc_feature (1)..(635): Homolog of NCBI NO: 23480384 NR Description: heat shock protein [Plasmodium yoelii yoelii]
  misc_feature (3)..(635): Homolog of NCBI NO: 29539338 NR Description: Heat shock 70 kDa protein [Cyanidioschyzon
  misc_feature (1)..(626): Homolog of NCBI NO: 481576 NR Description: dnaK-type molecular chaperone GRP78/BiP -
  misc_feature (3)..(635): Homolog of NCBI NO: 1037176 NR Description: immunoglobulin heavy chain binding protein
  misc_feature (1)..(635): Homolog of NCBI NO: 6016151 NR Description: Luminal binding protein 3 precursor (BiP3)
  misc_feature (8)..(651): Homolog of NCBI NO: 14423732 NR Description: Heat shock 70 kDa protein
  misc_feature (6)..(626): Homolog of NCBI NO: 21263753 NR Description: Heat shock cognate 71 kDa protein (Hsc70.1)
  misc_feature (124)..(646): Homolog of NCBI NO: 4164594 NR Description: heat shock protein 70 [Paracoccidioides
  misc_feature (1)..(635): Homolog of NCBI NO: 23480384 NR Description: heat shock protein [Plasmodium yoelii yoelii]
  misc_feature (3)..(635): Homolog of NCBI NO: 29539338 NR Description: Heat shock 70 kDa protein [Cyanidioschyzon
  misc_feature (1)..(626): Homolog of NCBI NO: 481576 NR Description: dnaK-type molecular chaperone GRP78/BiP -
  misc_feature (3)..(635): Homolog of NCBI NO: 1037176 NR Description: immunoglobulin heavy chain binding protein
  misc_feature (1)..(635): Homolog of NCBI NO: 6016151 NR Description: Luminal binding protein 3 precursor (BiP3)
  misc_feature (8)..(651): Homolog of NCBI NO: 14423732 NR Description: Heat shock 70 kDa protein
  misc_feature (6)..(626): Homolog of NCBI NO: 21263753 NR Description: Heat shock cognate 71 kDa protein (Hsc70.1)
  misc_feature (124)..(646): Homolog of NCBI NO: 4164594 NR Description: heat shock protein 70 [Paracoccidioides
  misc_feature (1)..(635): Homolog of NCBI NO: 23480384 NR Description: heat shock protein [Plasmodium yoelii yoelii]
  misc_feature (3)..(635): Homolog of NCBI NO: 29539338 NR Description: Heat shock 70 kDa protein [Cyanidioschyzon
  misc_feature (1)..(626): Homolog of NCBI NO: 481576 NR Description: dnaK-type molecular chaperone GRP78/BiP -
  misc_feature (3)..(635): Homolog of NCBI NO: 1037176 NR Description: immunoglobulin heavy chain binding protein
  misc_feature (1)..(635): Homolog of NCBI NO: 6016151 NR Description: Luminal binding protein 3 precursor (BiP3)
  misc_feature (8)..(651): Homolog of NCBI NO: 14423732 NR Description: Heat shock 70 kDa protein
  misc_feature (6)..(626): Homolog of NCBI NO: 21263753 NR Description: Heat shock cognate 71 kDa protein (Hsc70.1)
  misc_feature (124)..(646): Homolog of NCBI NO: 4164594 NR Description: heat shock protein 70 [Paracoccidioides
  misc_feature (1)..(635): Homolog of NCBI NO: 23480384 NR Description: heat shock protein [Plasmodium yoelii yoelii]
  misc_feature (3)..(635): Homolog of NCBI NO: 29539338 NR Description: Heat shock 70 kDa protein [Cyanidioschyzon
  misc_feature (1)..(626): Homolog of NCBI NO: 481576 NR Description: dnaK-type molecular chaperone GRP78/BiP -
  misc_feature (3)..(635): Homolog of NCBI NO: 1037176 NR Description: immunoglobulin heavy chain binding protein
  misc_feature (1)..(635): Homolog of NCBI NO: 6016151 NR Description: Luminal binding protein 3 precursor (BiP3)
  misc_feature (8)..(651): Homolog of NCBI NO: 14423732 NR Description: Heat shock 70 kDa protein
  misc_feature (6)..(626): Homolog of NCBI NO: 21263753 NR Description: Heat shock cognate 71 kDa protein (Hsc70.1)
  misc_feature (124)..(646): Homolog of NCBI NO: 4164594 NR Description: heat shock protein 70 [Paracoccidioides
  misc_feature (1)..(635): Homolog of NCBI NO: 23480384 NR Description: heat shock protein [Plasmodium yoelii yoelii]
  misc_feature (3)..(635): Homolog of NCBI NO: 29539338 NR Description: Heat shock 70 kDa protein [Cyanidioschyzon
  misc_feature (1)..(626): Homolog of NCBI NO: 481576 NR Description: dnaK-type molecular chaperone GRP78/BiP -
  misc_feature (3)..(635): Homolog of NCBI NO: 1037176 NR Description: immunoglobulin heavy chain binding protein
  misc_feature (1)..(635): Homolog of NCBI NO: 6016151 NR Description: Luminal binding protein 3 precursor (BiP3)
  misc_feature (8)..(651): Homolog of NCBI NO: 14423732 NR Description: Heat shock 70 kDa protein
  misc_feature (6)..(626): Homolog of NCBI NO: 21263753 NR Description: Heat shock cognate 71 kDa protein (Hsc70.1)
  misc_feature (124)..(646): Homolog of NCBI NO: 4164594 NR Description: heat shock protein 70 [Paracoccidioides
  misc_feature (1)..(635): Homolog of NCBI NO: 23480384 NR Description: heat shock protein [Plasmodium yoelii yoelii]
  misc_feature (3)..(635): Homolog of NCBI NO: 29539338 NR Description: Heat shock 70 kDa protein [Cyanidioschyzon
  misc_feature (1)..(626): Homolog of NCBI NO: 481576 NR Description: dnaK-type molecular chaperone GRP78/BiP -
  misc_feature (3)..(635): Homolog of NCBI NO: 1037176 NR Description: immunoglobulin heavy chain binding protein
  misc_feature (1)..(635): Homolog of NCBI NO: 6016151 NR Description: Luminal binding protein 3 precursor (BiP3)
  misc_feature (8)..(651): Homolog of NCBI NO: 14423732 NR Description: Heat shock 70 kDa protein
  misc_feature (6)..(626): Homolog of NCBI NO: 21263753 NR Description: Heat shock cognate 71 kDa protein (Hsc70.1)
  misc_feature (124)..(646): Homolog of NCBI NO: 4164594 NR Description: heat shock protein 70 [Paracoccidioides
  misc_feature (1)..(635): Homolog of NCBI NO: 23480384 NR Description: heat shock protein [Plasmodium yoelii yoelii]
  misc_feature (3)..(635): Homolog of NCBI NO: 29539338 NR Description: Heat shock 70 kDa protein [Cyanidioschyzon
  misc_feature (1)..(626): Homolog of NCBI NO: 481576 NR Description: dnaK-type molecular chaperone GRP78/BiP -
  misc_feature (3)..(635): Homolog of NCBI NO: 1037176 NR Description: immunoglobulin heavy chain binding protein
  misc_feature (1)..(635): Homolog of NCBI NO: 6016151 NR Description: Luminal binding protein 3 precursor (BiP3)
  misc_feature (8)..(651): Homolog of NCBI NO: 14423732 NR Description: Heat shock 70 kDa protein
  misc_feature (6)..(626): Homolog of NCBI NO: 21263753 NR Description: Heat shock cognate 71 kDa protein (Hsc70.1)
MSGKGEGPAIGIDLGTTYSCVGVWQHDRVEIIANDQGNRTTPSYVAFTDSERLIGDAAKNQVAMNPVNTVFDAKRLIGRRFSDSSVQSDMKLWPFKIQAGPADKPMIYVEYKGEEKEFAAEEISSMVLIKMREIAEAYLGVTIKNAVVTVPAYFNDSQRQATKDAGVIAGLNVMRIINEPTAAAIAYGLDKKATSVGEKNVLIFDLGGGTFDVSLLTIEEGIFEVKATAGDTHLGGEDFDNRMVNHFVQEFKRKSKKDITGNPRALRRLRTSCERAKRTLSSTAQTTIEIDSLYEGIDFYSTITRARFEELNMDLFRKCMEPVEKCLRDAKMDKSTVHDVVLVGGSTRIPKVQQLLQDFFNGKELCKSINPDEAVAYGAAVQGAILSGEGNEKVQDLLLLDVTPLSLGLETAGGVMTTLIPRNTTIPTKKEQVFSTYSDNQPGVLIQVYEGERARTKDNNLLGKFELSGIPPAPRGVPQITVCFDIDANGILNVSAEDKTTGQKNKITITNDKGRLSKDEIEKMVQEAEKYKSEDEEHKKKVEAKNALENYAYNMRNTIQDEKIGEKLPAADKKKIEDSIEQAIQWLEGNQLAEADEFEDKMKELESICNPIIAKMYQGAGGEAGGPGASGMDDDAPPASGGAGPKIEEVD

SEQ ID NO: 22040 - protein, 588 aa, Arabidopsis thaliana
  peptide (1)..(588): Ceres Seq. ID no. 13646320
  misc_feature (61)..(583): Homolog of NCBI NO: 4164594 NR Description: heat shock protein 70 [Paracoccidioides
  misc_feature (1)..(572): Homolog of NCBI NO: 23480384 NR Description: heat shock protein [Plasmodium yoelii yoelii]
  misc_feature (1)..(572): Homolog of NCBI NO: 29539338 NR Description: Heat shock 70 kDa protein [Cyanidioschyzon
  misc_feature (1)..(563): Homolog of NCBI NO: 481576 NR Description: dnaK-type molecular chaperone GRP78/BiP -
  misc_feature (1)..(572): Homolog of NCBI NO: 1037176 NR Description: immunoglobulin heavy chain binding protein
  misc_feature (1)..(572): Homolog of NCBI NO: 6016151 NR Description: Luminal binding protein 3 precursor (BiP3)
  misc_feature (1)..(588): Homolog of NCBI NO: 14423732 NR Description: Heat shock 70 kDa protein
  misc_feature (1)..(563): Homolog of NCBI NO: 21263753 NR Description: Heat shock cognate 71 kDa protein (Hsc70.1)
  misc_feature (61)..(583): Homolog of NCBI NO: 4164594 NR Description: heat shock protein 70 [Paracoccidioides
  misc_feature (1)..(572): Homolog of NCBI NO: 23480384 NR Description: heat shock protein [Plasmodium yoelii yoelii]
  misc_feature (1)..(572): Homolog of NCBI NO: 29539338 NR Description: Heat shock 70 kDa protein [Cyanidioschyzon
  misc_feature (1)..(563): Homolog of NCBI NO: 481576 NR Description: dnaK-type molecular chaperone GRP78/BiP -
  misc_feature (1)..(572): Homolog of NCBI NO: 1037176 NR Description: immunoglobulin heavy chain binding protein
  misc_feature (1)..(572): Homolog of NCBI NO: 6016151 NR Description: Luminal binding protein 3 precursor (BiP3)
  misc_feature (1)..(588): Homolog of NCBI NO: 14423732 NR Description: Heat shock 70 kDa protein
  misc_feature (1)..(563): Homolog of NCBI NO: 21263753 NR Description: Heat shock cognate 71 kDa protein (Hsc70.1)
  misc_feature (61)..(583): Homolog of NCBI NO: 4164594 NR Description: heat shock protein 70 [Paracoccidioides
  misc_feature (1)..(572): Homolog of NCBI NO: 23480384 NR Description: heat shock protein [Plasmodium yoelii yoelii]
  misc_feature (1)..(572): Homolog of NCBI NO: 29539338 NR Description: Heat shock 70 kDa protein [Cyanidioschyzon
  misc_feature (1)..(563): Homolog of NCBI NO: 481576 NR Description: dnaK-type molecular chaperone GRP78/BiP -
  misc_feature (1)..(572): Homolog of NCBI NO: 1037176 NR Description: immunoglobulin heavy chain binding protein
  misc_feature (1)..(572): Homolog of NCBI NO: 6016151 NR Description: Luminal binding protein 3 precursor (BiP3)
  misc_feature (1)..(588): Homolog of NCBI NO: 14423732 NR Description: Heat shock 70 kDa protein
  misc_feature (1)..(563): Homolog of NCBI NO: 21263753 NR Description: Heat shock cognate 71 kDa protein (Hsc70.1)
  misc_feature (61)..(583): Homolog of NCBI NO: 4164594 NR Description: heat shock protein 70 [Paracoccidioides
  misc_feature (1)..(572): Homolog of NCBI NO: 23480384 NR Description: heat shock protein [Plasmodium yoelii yoelii]
  misc_feature (1)..(572): Homolog of NCBI NO: 29539338 NR Description: Heat shock 70 kDa protein [Cyanidioschyzon
  misc_feature (1)..(563): Homolog of NCBI NO: 481576 NR Description: dnaK-type molecular chaperone GRP78/BiP -
  misc_feature (1)..(572): Homolog of NCBI NO: 1037176 NR Description: immunoglobulin heavy chain binding protein
  misc_feature (1)..(572): Homolog of NCBI NO: 6016151 NR Description: Luminal binding protein 3 precursor (BiP3)
  misc_feature (1)..(588): Homolog of NCBI NO: 14423732 NR Description: Heat shock 70 kDa protein
  misc_feature (1)..(563): Homolog of NCBI NO: 21263753 NR Description: Heat shock cognate 71 kDa protein (Hsc70.1)
  misc_feature (61)..(583): Homolog of NCBI NO: 4164594 NR Description: heat shock protein 70 [Paracoccidioides
  misc_feature (1)..(572): Homolog of NCBI NO: 23480384 NR Description: heat shock protein [Plasmodium yoelii yoelii]
  misc_feature (1)..(572): Homolog of NCBI NO: 29539338 NR Description: Heat shock 70 kDa protein [Cyanidioschyzon
  misc_feature (1)..(563): Homolog of NCBI NO: 481576 NR Description: dnaK-type molecular chaperone GRP78/BiP -
  misc_feature (1)..(572): Homolog of NCBI NO: 1037176 NR Description: immunoglobulin heavy chain binding protein
  misc_feature (1)..(572): Homolog of NCBI NO: 6016151 NR Description: Luminal binding protein 3 precursor (BiP3)
  misc_feature (1)..(588): Homolog of NCBI NO: 14423732 NR Description: Heat shock 70 kDa protein
  misc_feature (1)..(563): Homolog of NCBI NO: 21263753 NR Description: Heat shock cognate 71 kDa protein (Hsc70.1)
  misc_feature (61)..(583): Homolog of NCBI NO: 4164594 NR Description: heat shock protein 70 [Paracoccidioides
  misc_feature (1)..(572): Homolog of NCBI NO: 23480384 NR Description: heat shock protein [Plasmodium yoelii yoelii]
  misc_feature (1)..(572): Homolog of NCBI NO: 29539338 NR Description: Heat shock 70 kDa protein [Cyanidioschyzon
  misc_feature (1)..(563): Homolog of NCBI NO: 481576 NR Description: dnaK-type molecular chaperone GRP78/BiP -
  misc_feature (1)..(572): Homolog of NCBI NO: 1037176 NR Description: immunoglobulin heavy chain binding protein
  misc_feature (1)..(572): Homolog of NCBI NO: 6016151 NR Description: Luminal binding protein 3 precursor (BiP3)
  misc_feature (1)..(588): Homolog of NCBI NO: 14423732 NR Description: Heat shock 70 kDa protein
  misc_feature (1)..(563): Homolog of NCBI NO: 21263753 NR Description: Heat shock cognate 71 kDa protein (Hsc70.1)
  misc_feature (61)..(583): Homolog of NCBI NO: 4164594 NR Description: heat shock protein 70 [Paracoccidioides
  misc_feature (1)..(572): Homolog of NCBI NO: 23480384 NR Description: heat shock protein [Plasmodium yoelii yoelii]
  misc_feature (1)..(572): Homolog of NCBI NO: 29539338 NR Description: Heat shock 70 kDa protein [Cyanidioschyzon
  misc_feature (1)..(563): Homolog of NCBI NO: 481576 NR Description: dnaK-type molecular chaperone GRP78/BiP -
  misc_feature (1)..(572): Homolog of NCBI NO: 1037176 NR Description: immunoglobulin heavy chain binding protein
  misc_feature (1)..(572): Homolog of NCBI NO: 6016151 NR Description: Luminal binding protein 3 precursor (BiP3)
  misc_feature (1)..(588): Homolog of NCBI NO: 14423732 NR Description: Heat shock 70 kDa protein
  misc_feature (1)..(563): Homolog of NCBI NO: 21263753 NR Description: Heat shock cognate 71 kDa protein (Hsc70.1)
MNPVNTVFDAKRLIGRRFSDSSVQSDMKLWPFKIQAGPADKPMIYVEYKGEEKEFAAEEISSMVLIKMREIAEAYLGVTIKNAVVTVPAYFNDSQRQATKDAGVIAGLNVMRIINEPTAAAIAYGLDKKATSVGEKNVLIFDLGGGTFDVSLLTIEEGIFEVKATAGDTHLGGEDFDNRMVNHFVQEFKRKSKKDITGNPRALRRLRTSCERAKRTLSSTAQTTIEIDSLYEGIDFYSTITRARFEELNMDLFRKCMEPVEKCLRDAKMDKSTVHDVVLVGGSTRIPKVQQLLQDFFNGKELCKSINPDEAVAYGAAVQGAILSGEGNEKVQDLLLLDVTPLSLGLETAGGVMTTLIPRNTTIPTKKEQVFSTYSDNQPGVLIQVYEGERARTKDNNLLGKFELSGIPPAPRGVPQITVCFDIDANGILNVSAEDKTTGQKNKITITNDKGRLSKDEIEKMVQEAEKYKSEDEEHKKKVEAKNALENYAYNMRNTIQDEKIGEKLPAADKKKIEDSIEQAIQWLEGNQLAEADEFEDKMKELESICNPIIAKMYQGAGGEAGGPGASGMDDDAPPASGGAGPKIEEVD

SEQ ID NO: 22041 - protein, 562 aa, Arabidopsis thaliana
  peptide (1)..(562): Ceres Seq. ID no. 13646321
  misc_feature (35)..(557): Homolog of NCBI NO: 4164594 NR Description: heat shock protein 70 [Paracoccidioides
  misc_feature (1)..(546): Homolog of NCBI NO: 23480384 NR Description: heat shock protein [Plasmodium yoelii yoelii]
  misc_feature (1)..(546): Homolog of NCBI NO: 29539338 NR Description: Heat shock 70 kDa protein [Cyanidioschyzon
  misc_feature (1)..(537): Homolog of NCBI NO: 481576 NR Description: dnaK-type molecular chaperone GRP78/BiP -
  misc_feature (1)..(546): Homolog of NCBI NO: 1037176 NR Description: immunoglobulin heavy chain binding protein
  misc_feature (1)..(546): Homolog of NCBI NO: 6016151 NR Description: Luminal binding protein 3 precursor (BiP3)
  misc_feature (1)..(562): Homolog of NCBI NO: 14423732 NR Description: Heat shock 70 kDa protein
  misc_feature (1)..(537): Homolog of NCBI NO: 21263753 NR Description: Heat shock cognate 71 kDa protein (Hsc70.1)
  misc_feature (35)..(557): Homolog of NCBI NO: 4164594 NR Description: heat shock protein 70 [Paracoccidioides
  misc_feature (1)..(546): Homolog of NCBI NO: 23480384 NR Description: heat shock protein [Plasmodium yoelii yoelii]
  misc_feature (1)..(546): Homolog of NCBI NO: 29539338 NR Description: Heat shock 70 kDa protein [Cyanidioschyzon
  misc_feature (1)..(537): Homolog of NCBI NO: 481576 NR Description: dnaK-type molecular chaperone GRP78/BiP -
  misc_feature (1)..(546): Homolog of NCBI NO: 1037176 NR Description: immunoglobulin heavy chain binding protein
  misc_feature (1)..(546): Homolog of NCBI NO: 6016151 NR Description: Luminal binding protein 3 precursor (BiP3)
  misc_feature (1)..(562): Homolog of NCBI NO: 14423732 NR Description: Heat shock 70 kDa protein
  misc_feature (1)..(537): Homolog of NCBI NO: 21263753 NR Description: Heat shock cognate 71 kDa protein (Hsc70.1)
  misc_feature (35)..(557): Homolog of NCBI NO: 4164594 NR Description: heat shock protein 70 [Paracoccidioides
  misc_feature (1)..(546): Homolog of NCBI NO: 23480384 NR Description: heat shock protein [Plasmodium yoelii yoelii]
  misc_feature (1)..(546): Homolog of NCBI NO: 29539338 NR Description: Heat shock 70 kDa protein [Cyanidioschyzon
  misc_feature (1)..(537): Homolog of NCBI NO: 481576 NR Description: dnaK-type molecular chaperone GRP78/BiP -
  misc_feature (1)..(546): Homolog of NCBI NO: 1037176 NR Description: immunoglobulin heavy chain binding protein
  misc_feature (1)..(546): Homolog of NCBI NO: 6016151 NR Description: Luminal binding protein 3 precursor (BiP3)
  misc_feature (1)..(562): Homolog of NCBI NO: 14423732 NR Description: Heat shock 70 kDa protein
  misc_feature (1)..(537): Homolog of NCBI NO: 21263753 NR Description: Heat shock cognate 71 kDa protein (Hsc70.1)
  misc_feature (35)..(557): Homolog of NCBI NO: 4164594 NR Description: heat shock protein 70 [Paracoccidioides
  misc_feature (1)..(546): Homolog of NCBI NO: 23480384 NR Description: heat shock protein [Plasmodium yoelii yoelii]
  misc_feature (1)..(546): Homolog of NCBI NO: 29539338 NR Description: Heat shock 70 kDa protein [Cyanidioschyzon
  misc_feature (1)..(537): Homolog of NCBI NO: 481576 NR Description: dnaK-type molecular chaperone GRP78/BiP -
  misc_feature (1)..(546): Homolog of NCBI NO: 1037176 NR Description: immunoglobulin heavy chain binding protein
  misc_feature (1)..(546): Homolog of NCBI NO: 6016151 NR Description: Luminal binding protein 3 precursor (BiP3)
  misc_feature (1)..(562): Homolog of NCBI NO: 14423732 NR Description: Heat shock 70 kDa protein
  misc_feature (1)..(537): Homolog of NCBI NO: 21263753 NR Description: Heat shock cognate 71 kDa protein (Hsc70.1)
  misc_feature (35)..(557): Homolog of NCBI NO: 4164594 NR Description: heat shock protein 70 [Paracoccidioides
  misc_feature (1)..(546): Homolog of NCBI NO: 23480384 NR Description: heat shock protein [Plasmodium yoelii yoelii]
  misc_feature (1)..(546): Homolog of NCBI NO: 29539338 NR Description: Heat shock 70 kDa protein [Cyanidioschyzon
  misc_feature (1)..(537): Homolog of NCBI NO: 481576 NR Description: dnaK-type molecular chaperone GRP78/BiP -
  misc_feature (1)..(546): Homolog of NCBI NO: 1037176 NR Description: immunoglobulin heavy chain binding protein
  misc_feature (1)..(546): Homolog of NCBI NO: 6016151 NR Description: Luminal binding protein 3 precursor (BiP3)
  misc_feature (1)..(562): Homolog of NCBI NO: 14423732 NR Description: Heat shock 70 kDa protein
  misc_feature (1)..(537): Homolog of NCBI NO: 21263753 NR Description: Heat shock cognate 71 kDa protein (Hsc70.1)
  misc_feature (1)..(546): Homolog of NCBI NO: 29539338 NR Description: Heat shock 70 kDa protein [Cyanidioschyzon
  misc_feature (1)..(537): Homolog of NCBI NO: 481576 NR Description: dnaK-type molecular chaperone GRP78/BiP -
  misc_feature (1)..(546): Homolog of NCBI NO: 1037176 NR Description: immunoglobulin heavy chain binding protein
  misc_feature (1)..(546): Homolog of NCBI NO: 6016151 NR Description: Luminal binding protein 3 precursor (BiP3)
  misc_feature (1)..(562): Homolog of NCBI NO: 14423732 NR Description: Heat shock 70 kDa protein
  misc_feature (1)..(537): Homolog of NCBI NO: 21263753 NR Description: Heat shock cognate 71 kDa protein (Hsc70.1)
  misc_feature (35)..(557): Homolog of NCBI NO: 4164594 NR Description: heat shock protein 70 [Paracoccidioides
  misc_feature (1)..(546): Homolog of NCBI NO: 23480384 NR Description: heat shock protein [Plasmodium yoelii yoelii]
  misc_feature (35)..(557): Homolog of NCBI NO: 4164594 NR Description: heat shock protein 70 [Paracoccidioides
  misc_feature (1)..(546): Homolog of NCBI NO: 23480384 NR Description: heat shock protein [Plasmodium yoelii yoelii]
  misc_feature (1)..(546): Homolog of NCBI NO: 29539338 NR Description: Heat shock 70 kDa protein [Cyanidioschyzon
  misc_feature (1)..(537): Homolog of NCBI NO: 481576 NR Description: dnaK-type molecular chaperone GRP78/BiP -
  misc_feature (1)..(546): Homolog of NCBI NO: 1037176 NR Description: immunoglobulin heavy chain binding protein
  misc_feature (1)..(546): Homolog of NCBI NO: 6016151 NR Description: Luminal binding protein 3 precursor (BiP3)
  misc_feature (1)..(562): Homolog of NCBI NO: 14423732 NR Description: Heat shock 70 kDa protein
  misc_feature (1)..(537): Homolog of NCBI NO: 21263753 NR Description: Heat shock cognate 71 kDa protein (Hsc70.1)
MKLWPFKIQAGPADKPMIYVEYKGEEKEFAAEEISSMVLIKMREIAEAYLGVTIKNAVVTVPAYFNDSQRQATKDAGVIAGLNVMRIINEPTAAAIAYGLDKKATSVGEKNVLIFDLGGGTFDVSLLTIEEGIFEVKATAGDTHLGGEDFDNRMVNHFVQEFKRKSKKDITGNPRALRRLRTSCERAKRTLSSTAQTTIEIDSLYEGIDFYSTITRARFEELNMDLFRKCMEPVEKCLRDAKMDKSTVHDVVLVGGSTRIPKVQQLLQDFFNGKELCKSINPDEAVAYGAAVQGAILSGEGNEKVQDLLLLDVTPLSLGLETAGGVMTTLIPRNTTIPTKKEQVFSTYSDNQPGVLIQVYEGERARTKDNNLLGKFELSGIPPAPRGVPQITVCFDIDANGILNVSAEDKTTGQKNKITITNDKGRLSKDEIEKMVQEAEKYKSEDEEHKKKVEAKNALENYAYNMRNTIQDEKIGEKLPAADKKKIEDSIEQAIQWLEGNQLAEADEFEDKMKELESICNPIIAKMYQGAGGEAGGPGASGMDDDAPPASGGAGPKIEEVD

SEQ ID NO: 22042 - DNA, 1430 bp, Arabidopsis thaliana
  misc_feature (1)..(1430): Ceres Seq. ID no. 12482890
  misc_feature: MA Experiment ID: 20000173 Result: Down-regulated in Transcription
  misc_feature: MA Experiment 20000173 PARAMETER Experiment Name: At_42deg_Heat_P Parameter: Age (day) Value: 14
  misc_feature: MA Experiment 20000173 PARAMETER Experiment Name: At_42deg_Heat_P Parameter: Organism Value: A. thaliana
  misc_feature: MA Experiment 20000173 PARAMETER Experiment Name: At_42deg_Heat_P Parameter: Plant Line Value: WS
  misc_feature: MA Experiment 20000173 PARAMETER Experiment Name: At_42deg_Heat_P Parameter: Temperature (deg C) Value: 42 vs. 22
  misc_feature: MA Experiment 20000173 PARAMETER Experiment Name: At_42deg_Heat_P Parameter: Timepoint (hr) Value: 6
  misc_feature: MA Experiment 20000173 PARAMETER Experiment Name: At_42deg_Heat_P Parameter: Tissue Value: Aerial
  misc_feature: MA Experiment ID: 20000182 Result: Up-regulated in Transcription
  misc_feature: MA Experiment 20000182 PARAMETER Experiment Name: At_2mM_SA_P Parameter: Age (day) Value: 14
  misc_feature: MA Experiment 20000182 PARAMETER Experiment Name: At_2mM_SA_P Parameter: Organism Value: A. thaliana
  misc_feature: MA Experiment 20000182 PARAMETER Experiment Name: At_2mM_SA_P Parameter: Plant Line Value: WS
  misc_feature: MA Experiment 20000182 PARAMETER Experiment Name: At_2mM_SA_P Parameter: Timepoint (hr) Value: 6
  misc_feature: MA Experiment 20000182 PARAMETER Experiment Name: At_2mM_SA_P Parameter: Tissue Value: Aerial
  misc_feature: MA Experiment 20000182 PARAMETER Experiment Name: At_2mM_SA_P Parameter: Treatment Value: 2mM SA vs. No Treatment
  misc_feature: MA Experiment ID: 20000184 Result: Down-regulated in Transcription
  misc_feature: MA Experiment 20000184 PARAMETER Experiment Name: At_Shoots__P Parameter: Age (day) Value: 7
  misc_feature: MA Experiment 20000184 PARAMETER Experiment Name: At_Shoots__P Parameter: Tissue Value: Shoots vs. Whole Plant
  misc_feature: MA Experiment ID: 20000185 Result: Down-regulated in Transcription
  misc_feature: MA Experiment 20000185 PARAMETER Experiment Name: At_Roots__P Parameter: Age (day) Value: 7 vs. 21
  misc_feature: MA Experiment 20000185 PARAMETER Experiment Name: At_Roots__P Parameter: Organism Value: A. thaliana
  misc_feature: MA Experiment 20000185 PARAMETER Experiment Name: At_Roots__P Parameter: Tissue Value: Roots vs. Whole Plant
  misc_feature: MA Experiment ID: 20000213 Result: Up-regulated in Transcription
  misc_feature: MA Experiment 20000213 PARAMETER Experiment Name: At_4deg_Cold_P Parameter: Timepoint (hr) Value: 2
  misc_feature: MA Experiment ID: 20000234 Result: Down-regulated in Transcription
  misc_feature: MA Experiment 20000234 PARAMETER Experiment Name: At_Siliques_P Parameter: Age (day) Value: 21
  misc_feature: MA Experiment 20000234 PARAMETER Experiment Name: At_Siliques_P Parameter: Organism Value: A. thaliana
  misc_feature: MA Experiment 20000234 PARAMETER Experiment Name: At_Siliques_P Parameter: Plant Line Value: WS
  misc_feature: MA Experiment 20000234 PARAMETER Experiment Name: At_Siliques_P Parameter: Tissue Value: Less Than 5mm Siliques vs. Whole Plant
  misc_feature: MA Experiment ID: 20000264 Result: Down-regulated in Transcription
  misc_feature: MA Experiment 20000264 PARAMETER Experiment Name: At_Open_Flower_P Parameter: Age (day) Value: 21
  misc_feature: MA Experiment 20000264 PARAMETER Experiment Name: At_Open_Flower_P Parameter: Plant Line Value: WS
  misc_feature: MA Experiment 20000264 PARAMETER Experiment Name: At_Open_Flower_P Parameter: Tissue Value: Open Flower vs. Whole Plant
  misc_feature: MA Experiment ID: 20000265 Result: Down-regulated in Transcription
  misc_feature: MA Experiment 20000265 PARAMETER Experiment Name: At_Open_Flower_P Parameter: Age (day) Value: 21
  misc_feature: MA Experiment 20000265 PARAMETER Experiment Name: At_Open_Flower_P Parameter: Plant Line Value: WS
  misc_feature: MA Experiment 20000265 PARAMETER Experiment Name: At_Open_Flower_P Parameter: Tissue Value: Closed Flower vs. Whole Plant
  misc_feature: MA Experiment ID: 20000286 Result: Down-regulated in Transcription
  misc_feature: MA Experiment 20000286 PARAMETER Experiment Name: At_Open_Flower_P Parameter: Age (day) Value: 21
  misc_feature: MA Experiment 20000286 PARAMETER Experiment Name: At_Open_Flower_P Parameter: Plant Line Value: WS
  misc_feature: MA Experiment 20000286 PARAMETER Experiment Name: At_Open_Flower_P Parameter: Tissue Value: Half Open vs. Whole Plant
  misc_feature: MA Experiment ID: 20000438 Result: Down-regulated in Transcription
  misc_feature: MA Experiment 20000438 PARAMETER Experiment Name: At_Shoots__P Parameter: Age (day) Value: 14
  misc_feature: MA Experiment 20000438 PARAMETER Experiment Name: At_Shoots__P Parameter: Tissue Value: Shoots vs. Whole Plant
  misc_feature: MA Experiment ID: 20000439 Result: Down-regulated in Transcription
  misc_feature: MA Experiment 20000439 PARAMETER Experiment Name: At_Roots__P Parameter: Age (day) Value: 14 vs. 21
  misc_feature: MA Experiment 20000439 PARAMETER Experiment Name: At_Roots__P Parameter: Organism Value: A. thaliana
  misc_feature: MA Experiment 20000439 PARAMETER Experiment Name: At_Roots__P Parameter: Tissue Value: Roots vs. Whole Plant
  misc_feature: MA Experiment ID: 20000495 Result: Down-regulated in Transcription
  misc_feature: MA Experiment 20000495 PARAMETER Experiment Name: At_Guard_Cells_P Parameter: Harvest Date Value: 8/2/2002
  misc_feature: MA Experiment 20000495 PARAMETER Experiment Name: At_Guard_Cells_P Parameter: Organism Value: A. thaliana
  misc_feature: MA Experiment 20000495 PARAMETER Experiment Name: At_Guard_Cells_P Parameter: Tissue Value: Guard Cells vs. Leaves
  misc_feature: MA Experiment ID: 20000576 Result: Down-regulated in Transcription
  misc_feature: MA Experiment 20000576 PARAMETER Experiment Name: At_100uM_ABA_Mutants__P Parameter: Organism Value: A. thaliana
  misc_feature: MA Experiment 20000576 PARAMETER Experiment Name: At_100uM_ABA_Mutants__P Parameter: Plant Line Value: CS23
  misc_feature: MA Experiment 20000576 PARAMETER Experiment Name: At_100uM_ABA_Mutants__P Parameter: Timepoint (hr) Value: 6
  misc_feature: MA Experiment 20000576 PARAMETER Experiment Name: At_100uM_ABA_Mutants__P Parameter: Tissue Value: Whole Plant
  misc_feature: MA Experiment 20000576 PARAMETER Experiment Name: At_100uM_ABA_Mutants__P Parameter: Treatment Value: 1uM ABA vs. No Treatment
  misc_feature: MA Experiment ID: 20000709 Result: Up-regulated in Transcription
  misc_feature: MA Experiment 20000709 PARAMETER Experiment Name: At_15mM_NH4NO3_L-to-H_P Parameter: Age (hr) Value: 14
  misc_feature: MA Experiment 20000709 PARAMETER Experiment Name: At_15mM_NH4NO3_L-to-H_P Parameter: Organism Value: A. thaliana
  misc_feature: MA Experiment 20000709 PARAMETER Experiment Name: At_15mM_NH4NO3_L-to-H_P Parameter: Plant Line Value: WS
  misc_feature: MA Experiment 20000709 PARAMETER Experiment Name: At_15mM_NH4NO3_L-to-H_P Parameter: Timepoint (hr) Value: 4
  misc_feature: MA Experiment 20000709 PARAMETER Experiment Name: At_15mM_NH4NO3_L-to-H_P Parameter: Tissue Value: Aerial
  misc_feature: MA Experiment 20000709 PARAMETER Experiment Name: At_15mM_NH4NO3_L-to-H_P Parameter: Treatment Value: 15mM NH4NO3 vs. 30mM Mannitol
  misc_feature: MA Experiment ID: 20000794 Result: Down-regulated in Transcription
  misc_feature: MA Experiment 20000794 PARAMETER Experiment Name: At_Petals_P Parameter: Age (day) Value: 23-25 days
  misc_feature: MA Experiment 20000794 PARAMETER Experiment Name: At_Petals_P Parameter: Plant Line Value: WS
  misc_feature: MA Experiment 20000794 PARAMETER Experiment Name: At_Petals_P Parameter: Tissue Value: Petals vs. Whole plant
  misc_feature: MA Experiment ID: 20001247 Result: Down-regulated in Transcription
  misc_feature: MA Experiment 20001247 PARAMETER Experiment Name: At_Far-red-induction_P Parameter: Age (day) Value: 7
  misc_feature: MA Experiment 20001247 PARAMETER Experiment Name: At_Far-red-induction_P Parameter: Light Value: Far-red vs. White
  misc_feature: MA Experiment 20001247 PARAMETER Experiment Name: At_Far-red-induction_P Parameter: Organism Value: A. thaliana
  misc_feature: MA Experiment 20001247 PARAMETER Experiment Name: At_Far-red-induction_P Parameter: Plant Line Value: Columbia
  misc_feature: MA Experiment 20001247 PARAMETER Experiment Name: At_Far-red-induction_P Parameter: Timepoint (hr) Value: 1
  misc_feature: MA Experiment 20001247 PARAMETER Experiment Name: At_Far-red-induction_P Parameter: Tissue Value: Whole Plant
  misc_feature: MA Experiment ID: 20001450 Result: Down-regulated in Transcription
  misc_feature: MA Experiment 20001450 PARAMETER Experiment Name: At_Far-red-induction_P Parameter: Age (day) Value: 7
  misc_feature: MA Experiment 20001450 PARAMETER Experiment Name: At_Far-red-induction_P Parameter: Light Value: Far-red vs. White
  misc_feature: MA Experiment 20001450 PARAMETER Experiment Name: At_Far-red-induction_P Parameter: Organism Value: A. thaliana
  misc_feature: MA Experiment 20001450 PARAMETER Experiment Name: At_Far-red-induction_P Parameter: Plant Line Value: Columbia
  misc_feature: MA Experiment 20001450 PARAMETER Experiment Name: At_Far-red-induction_P Parameter: Timepoint (hr) Value: 8
  misc_feature: MA Experiment 20001450 PARAMETER Experiment Name: At_Far-red-induction_P Parameter: Tissue Value: Whole Plant
  misc_feature: MA Experiment ID: 20001451 Result: Down-regulated in Transcription
  misc_feature: MA Experiment 20001451 PARAMETER Experiment Name: At_Far-red-induction_P Parameter: Age (day) Value: 7
  misc_feature: MA Experiment 20001451 PARAMETER Experiment Name: At_Far-red-induction_P Parameter: Light Value: Far-red vs. White
  misc_feature: MA Experiment 20001451 PARAMETER Experiment Name: At_Far-red-induction_P Parameter: Organism Value: A. thaliana
  misc_feature: MA Experiment 20001451 PARAMETER Experiment Name: At_Far-red-induction_P Parameter: Plant Line Value: Columbia
  misc_feature: MA Experiment 20001451 PARAMETER Experiment Name: At_Far-red-induction_P Parameter: Timepoint (hr) Value: 24
  misc_feature: MA Experiment 20001451 PARAMETER Experiment Name: At_Far-red-induction_P Parameter: Tissue Value: Whole Plant
  misc_feature: MA Experiment ID: 20001555 Result: Down-regulated in Transcription
  misc_feature: MA Experiment 20001555 PARAMETER Experiment Name: At_Drought_Soil_Dry_P Parameter: Age (day) Value: 24
  misc_feature: MA Experiment 20001555 PARAMETER Experiment Name: At_Drought_Soil_Dry_P Parameter: Organism Value: A. thaliana
  misc_feature: MA Experiment 20001555 PARAMETER Experiment Name: At_Drought_Soil_Dry_P Parameter: Plant Line Value: WS
  misc_feature: MA Experiment 20001555 PARAMETER Experiment Name: At_Drought_Soil_Dry_P Parameter: Post Timepoint (hr) Value: None
  misc_feature: MA Experiment 20001555 PARAMETER Experiment Name: At_Drought_Soil_Dry_P Parameter: Post-Treatment Value: None
  misc_feature: MA Experiment 20001555 PARAMETER Experiment Name: At_Drought_Soil_Dry_P Parameter: Timepoint (day) Value: 10
  misc_feature: MA Experiment 20001555 PARAMETER Experiment Name: At_Drought_Soil_Dry_P Parameter: Treatment Value: Drought vs. No Drought
  misc_feature: MA Experiment ID: 20001907 Result: Down-regulated in Transcription
  misc_feature: MA Experiment 20001907 PARAMETER Experiment Name: At_Drought_Reproduction_P Parameter: Age (day) Value: 37
  misc_feature: MA Experiment 20001907 PARAMETER Experiment Name: At_Drought_Reproduction_P Parameter: Organism Value: A. thaliana
  misc_feature: MA Experiment 20001907 PARAMETER Experiment Name: At_Drought_Reproduction_P Parameter: Plant Line Value: WS
  misc_feature: MA Experiment 20001907 PARAMETER Experiment Name: At_Drought_Reproduction_P Parameter: Timepoint (day) Value: 7
  misc_feature: MA Experiment 20001907 PARAMETER Experiment Name: At_Drought_Reproduction_P Parameter: Tissue Value: Siliques
  misc_feature: MA Experiment 20001907 PARAMETER Experiment Name: At_Drought_Reproduction_P Parameter: Treatment Value: Drought vs. No Drought
aaatatcttcgaaaccccattactctcaaatccaaccaacctttcaaaacagaacacgaagacatggaccgaacacaatctccaaagacagctctgttcgccgtgttggcaacactccttgtcttaaccgtgaacggccagtcactttgtaacacacacaggttcaccaataacctcgccttcgcagattgctctgacctctcggccttaggctctttccttcactggacctacaatgaacaaaacggtaccgtctcaatcgcctatcgccaccctggaacctctgcttcttcttgggttgcttggggacttaacccaagtagtactcagatggttgggacgcaagctctcgtagccttcacaaacacaacaactaaccaattccaggcctatacctcttccgtgagttcctatggtacgcggcttgaacgtagtagcctaagtttcggtgtgagtggcctctccgcgactctggtcagtggcgaggttacgatctttgcaactcttgagttgtctccgaatctgatcacggccaaccagctttggcaggtgggacctgttgtcaacggtgttcctgcgagtcatcaaacctcaggagataatatgagatcgagtggtaggattgatttccggactggtcaggcatcagctggtggtggtggttccggtgacaggctgaggaagagaaacacgcatggagtactaaatgcggtcagctggggagtactaatgccaatgggagcaatgatggctcggtacatgaaagtcttcgccgatccaacatggttctatctccacattgcctttcaagtgtcgggttacgtcatcggggtagccggttgggccaccggaatcaagcttggtaacgactcaccaggcacatcttactcaacccatcgtaaccttggaatagcactcttcacatttgccacacttcaagtatttgctctgcttgtaaggccaaagccagaccacaaatatcgaacgtactggaacgtgtaccatcacaccgttggatacacaaccatcatcctctctattgtcaacattttcaaaggattcgacattttggacccggaggataaatggcgatgggcttacattgggatcctcatctttcttggtgcttgtgtccttattctcgagccactcacttggttcattgttcttcgccgtaagagccgtggaggtaacacagtcgctgcaccaacttcgagcaagtactctaacggcgtcaatggtaccaccaccactggaccacatcaccaggacgcctagtttcactttttgtttctacacttgttcttgtttgttctacttctactcgattttggattcttttttgatttgatattttgtaggctcatgtatgtattatgtatacaattttattcattgtgttatagatatatcgatttatggagtcaaat

SEQ ID NO: 22043 - protein, 425 aa, Arabidopsis thaliana
  peptide (1)..(425): Ceres Seq. ID no. 12482891
  misc_feature (111)..(239): Pfam Name: Protein of unknown function (DUF568) Pfam Description: Protein of unknown function (DUF568)
  misc_feature (111)..(239): Pfam Name: Protein of unknown function (DUF568) Pfam Description: Protein of unknown function (DUF568)
  misc_feature (22)..(394): Homolog of NCBI NO: 15235545 NR Description: putative protein
  misc_feature (32)..(411): Homolog of NCBI NO: 24414270 NR Description: Putative membrane protein [Oryza sativa (japonica
  misc_feature (50)..(410): Homolog of NCBI NO: 15238124 NR Description: putative protein; protein id: At5g47530.1
  misc_feature (34)..(399): Homolog of NCBI NO: 18086563 NR Description: AT4g17280/dl4675c [Arabidopsis thaliana]
  misc_feature (30)..(423): Homolog of NCBI NO: 13785213 NR Description: putative membrane protein [Solanum tuberosum]
  misc_feature (22)..(394): Homolog of NCBI NO: 15235545 NR Description: putative protein
  misc_feature (50)..(410): Homolog of NCBI NO: 15238124 NR Description: putative protein; protein id: At5g47530.1
  misc_feature (30)..(423): Homolog of NCBI NO: 13785213 NR Description: putative membrane protein [Solanum tuberosum]
  misc_feature (22)..(425): Homolog of NCBI NO: 18421491 NR Description: Expressed protein
  misc_feature (22)..(425): Homolog of NCBI NO: 21592781 NR Description: putative membrane protein [Arabidopsis thaliana]
  misc_feature (32)..(425): Homolog of NCBI NO: 13785209 NR Description: putative membrane protein [Solanum tuberosum]
  misc_feature (30)..(423): Homolog of NCBI NO: 13785211 NR Description: putative membrane protein [Solanum tuberosum]
  misc_feature (30)..(423): Homolog of NCBI NO: 13785207 NR Description: putative membrane protein [Solanum tuberosum]
  misc_feature (34)..(399): Homolog of NCBI NO: 18086563 NR Description: AT4g17280/dl4675c [Arabidopsis thaliana]
  misc_feature (32)..(411): Homolog of NCBI NO: 24414270 NR Description: Putative membrane protein [Oryza sativa (japonica
  misc_feature (30)..(423): Homolog of NCBI NO: 13785207 NR Description: putative membrane protein [Solanum tuberosum]
  misc_feature (30)..(423): Homolog of NCBI NO: 13785211 NR Description: putative membrane protein [Solanum tuberosum]
  misc_feature (32)..(425): Homolog of NCBI NO: 13785209 NR Description: putative membrane protein [Solanum tuberosum]
  misc_feature (22)..(425): Homolog of NCBI NO: 21592781 NR Description: putative membrane protein [Arabidopsis thaliana]
  misc_feature (22)..(425): Homolog of NCBI NO: 18421491 NR Description: Expressed protein
KYLRNPITLKSNQPFKTEHEDMDRTQSPKTALFAVLATLLVLTVNGQSLCNTHRFTNNLAFADCSDLSALGSFLHWTYNEQNGTVSIAYRHPGTSASSWVAWGLNPSSTQMVGTQALVAFTNTTTNQFQAYTSSVSSYGTRLERSSLSFGVSGLSATLVSGEVTIFATLELSPNLITANQLWQVGPVVNGVPASHQTSGDNMRSSGRIDFRTGQASAGGGGSGDRLRKRNTHGVLNAVSWGVLMPMGAMMARYMKVFADPTWFYLHIAFQVSGYVIGVAGWATGIKLGNDSPGTSYSTHRNLGIALFTFATLQVFALLVRPKPDHKYRTYWNVYHHTVGYTTIILSIVNIFKGFDILDPEDKWRWAYIGILIFLGACVLILEPLTWFIVLRRKSRGGNTVAAPTSSKYSNGVNGTTTTGPHHQDA

SEQ ID NO: 22044 - protein, 404 aa, Arabidopsis thaliana
  peptide (1)..(404): Ceres Seq. ID no. 12482892
  misc_feature (90)..(218): Pfam Name: Protein of unknown function (DUF568) Pfam Description: Protein of unknown function (DUF568)
  misc_feature (90)..(218): Pfam Name: Protein of unknown function (DUF568) Pfam Description: Protein of unknown function (DUF568)
  misc_feature (1)..(373): Homolog of NCBI NO: 15235545 NR Description: putative protein
  misc_feature (11)..(390): Homolog of NCBI NO: 24414270 NR Description: Putative membrane protein [Oryza sativa (japonica
  misc_feature (29)..(389): Homolog of NCBI NO: 15238124 NR Description: putative protein; protein id: At5g47530.1
  misc_feature (13)..(378): Homolog of NCBI NO: 18086563 NR Description: AT4g17280/dl4675c [Arabidopsis thaliana]
  misc_feature (9)..(402): Homolog of NCBI NO: 13785213 NR Description: putative membrane protein [Solanum tuberosum]
  misc_feature (1)..(373): Homolog of NCBI NO: 15235545 NR Description: putative protein
  misc_feature (29)..(389): Homolog of NCBI NO: 15238124 NR Description: putative protein; protein id: At5g47530.1
  misc_feature (9)..(402): Homolog of NCBI NO: 13785213 NR Description: putative membrane protein [Solanum tuberosum]
  misc_feature (1)..(404): Homolog of NCBI NO: 18421491 NR Description: Expressed protein
  misc_feature (1)..(404): Homolog of NCBI NO: 21592781 NR Description: putative membrane protein [Arabidopsis thaliana]
  misc_feature (11)..(404): Homolog of NCBI NO: 13785209 NR Description: putative membrane protein [Solanum tuberosum]
  misc_feature (9)..(402): Homolog of NCBI NO: 13785211 NR Description: putative membrane protein [Solanum tuberosum]
  misc_feature (9)..(402): Homolog of NCBI NO: 13785207 NR Description: putative membrane protein [Solanum tuberosum]
  misc_feature (13)..(378): Homolog of NCBI NO: 18086563 NR Description: AT4g17280/dl4675c [Arabidopsis thaliana]
  misc_feature (11)..(390): Homolog of NCBI NO: 24414270 NR Description: Putative membrane protein [Oryza sativa (japonica
  misc_feature (9)..(402): Homolog of NCBI NO: 13785207 NR Description: putative membrane protein [Solanum tuberosum]
  misc_feature (9)..(402): Homolog of NCBI NO: 13785211 NR Description: putative membrane protein [Solanum tuberosum]
  misc_feature (11)..(404): Homolog of NCBI NO: 13785209 NR Description: putative membrane protein [Solanum tuberosum]
  misc_feature (1)..(404): Homolog of NCBI NO: 21592781 NR Description: putative membrane protein [Arabidopsis thaliana]
  misc_feature (1)..(404): Homolog of NCBI NO: 18421491 NR Description: Expressed protein
MDRTQSPKTALFAVLATLLVLTVNGQSLCNTHRFTNNLAFADCSDLSALGSFLHWTYNEQNGTVSIAYRHPGTSASSWVAWGLNPSSTQMVGTQALVAFTNTTTNQFQAYTSSVSSYGTRLERSSLSFGVSGLSATLVSGEVTIFATLELSPNLITANQLWQVGPVVNGVPASHQTSGDNMRSSGRIDFRTGQASAGGGGSGDRLRKRNTHGVLNAVSWGVLMPMGAMMARYMKVFADPTWFYLHIAFQVSGYVIGVAGWATGIKLGNDSPGTSYSTHRNLGIALFTFATLQVFALLVRPKPDHKYRTYWNVYHHTVGYTTIILSIVNIFKGFDILDPEDKWRWAYIGILIFLGACVLILEPLTWFIVLRRKSRGGNTVAAPTSSKYSNGVNGTTTTGPHHQDA

SEQ ID NO: 22045 - protein, 315 aa, Arabidopsis thaliana
  peptide (1)..(315): Ceres Seq. ID no. 12482893
  misc_feature (1)..(129): Pfam Name: Protein of unknown function (DUF568) Pfam Description: Protein of unknown function (DUF568)
  misc_feature (1)..(129): Pfam Name: Protein of unknown function (DUF568) Pfam Description: Protein of unknown function (DUF568)
  misc_feature (1)..(284): Homolog of NCBI NO: 15235545 NR Description: putative protein
  misc_feature (1)..(301): Homolog of NCBI NO: 24414270 NR Description: Putative membrane protein [Oryza sativa (japonica
  misc_feature (1)..(300): Homolog of NCBI NO: 15238124 NR Description: putative protein; protein id: At5g47530.1
  misc_feature (1)..(289): Homolog of NCBI NO: 18086563 NR Description: AT4g17280/dl4675c [Arabidopsis thaliana]
  misc_feature (1)..(313): Homolog of NCBI NO: 13785213 NR Description: putative membrane protein [Solanum tuberosum]
  misc_feature (1)..(284): Homolog of NCBI NO: 15235545 NR Description: putative protein
  misc_feature (1)..(300): Homolog of NCBI NO: 15238124 NR Description: putative protein; protein id: At5g47530.1
  misc_feature (1)..(313): Homolog of NCBI NO: 13785213 NR Description: putative membrane protein [Solanum tuberosum]
  misc_feature (1)..(315): Homolog of NCBI NO: 18421491 NR Description: Expressed protein
  misc_feature (1)..(315): Homolog of NCBI NO: 21592781 NR Description: putative membrane protein [Arabidopsis thaliana]
  misc_feature (1)..(315): Homolog of NCBI NO: 13785209 NR Description: putative membrane protein [Solanum tuberosum]
  misc_feature (1)..(313): Homolog of NCBI NO: 13785211 NR Description: putative membrane protein [Solanum tuberosum]
  misc_feature (1)..(313): Homolog of NCBI NO: 13785207 NR Description: putative membrane protein [Solanum tuberosum]
  misc_feature (1)..(289): Homolog of NCBI NO: 18086563 NR Description: AT4g17280/dl4675c [Arabidopsis thaliana]
  misc_feature (1)..(301): Homolog of NCBI NO: 24414270 NR Description: Putative membrane protein [Oryza sativa (japonica
  misc_feature (1)..(313): Homolog of NCBI NO: 13785207 NR Description: putative membrane protein [Solanum tuberosum]
  misc_feature (1)..(313): Homolog of NCBI NO: 13785211 NR Description: putative membrane protein [Solanum tuberosum]
  misc_feature (1)..(315): Homolog of NCBI NO: 13785209 NR Description: putative membrane protein [Solanum tuberosum]
  misc_feature (1)..(315): Homolog of NCBI NO: 21592781 NR Description: putative membrane protein [Arabidopsis thaliana]
  misc_feature (1)..(315): Homolog of NCBI NO: 18421491 NR Description: Expressed protein
MVGTQALVAFTNTTTNQFQAYTSSVSSYGTRLERSSLSFGVSGLSATLVSGEVTIFATLELSPNLITANQLWQVGPVVNGVPASHQTSGDNMRSSGRIDFRTGQASAGGGGSGDRLRKRNTHGVLNAVSWGVLMPMGAMMARYMKVFADPTWFYLHIAFQVSGYVIGVAGWATGIKLGNDSPGTSYSTHRNLGIALFTFATLQVFALLVRPKPDHKYRTYWNVYHHTVGYTTIILSIVNIFKGFDILDPEDKWRWAYIGILIFLGACVLILEPLTWFIVLRRKSRGGNTVAAPTSSKYSNGVNGTTTTGPHHQDA

SEQ ID NO: 22046 - DNA, 646 bp, Arabidopsis thaliana
  misc_feature (1)..(646): Ceres Seq. ID no. 12393648
  misc_feature: MA Experiment ID: 108434 Result: Up-regulated in Transcription
  misc_feature: MA Experiment 108434 PARAMETER Experiment Name: At_Root_Tips_cDNA_P Parameter: Tissue Value: Root Tips
  misc_feature: MA Experiment ID: 108462 Result: Down-regulated in Transcription
  misc_feature: MA Experiment 108462 PARAMETER Experiment Name: At_Germinating_Seeds_cDNA_P Parameter: Age (day) Value: 2 vs. 0
  misc_feature: MA Experiment 108462 PARAMETER Experiment Name: At_Germinating_Seeds_cDNA_P Parameter: Tissue Value: Germinating Seeds
  misc_feature: MA Experiment ID: 108463 Result: Down-regulated in Transcription
  misc_feature: MA Experiment 108463 PARAMETER Experiment Name: At_Germinating_Seeds_cDNA_P Parameter: Age (day) Value: 3 vs. 0
  misc_feature: MA Experiment 108463 PARAMETER Experiment Name: At_Germinating_Seeds_cDNA_P Parameter: Tissue Value: Germinating Seeds
  misc_feature: MA Experiment ID: 108464 Result: Down-regulated in Transcription
  misc_feature: MA Experiment 108464 PARAMETER Experiment Name: At_Germinating_Seeds_cDNA_P Parameter: Age (day) Value: 4 vs. 0
  misc_feature: MA Experiment 108464 PARAMETER Experiment Name: At_Germinating_Seeds_cDNA_P Parameter: Tissue Value: Germinating Seeds
  misc_feature: MA Experiment ID: 20000090 Result: Up-regulated in Transcription
  misc_feature: MA Experiment ID: 20000111 Result: Up-regulated in Transcription
  misc_feature: MA Experiment 20000111 PARAMETER Experiment Name: At_42deg_Heat_cDNA_P Parameter: Temperature (deg C) Value: 42 vs. 22
  misc_feature: MA Experiment 20000111 PARAMETER Experiment Name: At_42deg_Heat_cDNA_P Parameter: Timepoint (hr) Value: 6
  misc_feature: MA Experiment 20000111 PARAMETER Experiment Name: At_42deg_Heat_cDNA_P Parameter: Tissue Value: Aerial
  misc_feature: MA Experiment ID: 20000113 Result: Up-regulated in Transcription
  misc_feature: MA Experiment 20000113 PARAMETER Experiment Name: At_42deg_Heat_cDNA_P Parameter: Temperature (deg C) Value: 42 vs. 22
  misc_feature: MA Experiment 20000113 PARAMETER Experiment Name: At_42deg_Heat_cDNA_P Parameter: Timepoint (hr) Value: 8
  misc_feature: MA Experiment 20000113 PARAMETER Experiment Name: At_42deg_Heat_cDNA_P Parameter: Tissue Value: Aerial
  misc_feature: MA Experiment ID: 20000173 Result: Up-regulated in Transcription
  misc_feature: MA Experiment 20000173 PARAMETER Experiment Name: At_42deg_Heat_P Parameter: Age (day) Value: 14
  misc_feature: MA Experiment 20000173 PARAMETER Experiment Name: At_42deg_Heat_P Parameter: Organism Value: A. thaliana
  misc_feature: MA Experiment 20000173 PARAMETER Experiment Name: At_42deg_Heat_P Parameter: Plant Line Value: WS
  misc_feature: MA Experiment 20000173 PARAMETER Experiment Name: At_42deg_Heat_P Parameter: Temperature (deg C) Value: 42 vs. 22
  misc_feature: MA Experiment 20000173 PARAMETER Experiment Name: At_42deg_Heat_P Parameter: Timepoint (hr) Value: 6
  misc_feature: MA Experiment 20000173 PARAMETER Experiment Name: At_42deg_Heat_P Parameter: Tissue Value: Aerial
  misc_feature: MA Experiment ID: 20000224 Result: Down-regulated in Transcription
tctcgagtacacctcatcattcttcttcgtgtgagagagatctttttggaaaacgaaagcgggatttagcgtatagcagcttccaccgtttcgccgaatttcatcgagcttcaagtgaacatgagtaaaccaatggaagaggataccaaccagggaaagactgaggaggaggagttcaacactggaccactctctgttttgatgatgagtgttaagaataacactcaggtgttgatcaattgccgtaacaacaggaaactccttggccgagttagggcttttgacaggcactgcaacatggttcttgaaaatgtcagagaaatgtggactgaggttccgaaaaccggaaaaggaaagaagaaagctcttcctgttaacagagatcgattcatcagcaagatgttcctgcgtggagactcagtcattatcgtcctcaggaaccccaagtgaaagaagctcttcttatgataattctcgcttcttcttgtcaaatcctaattgttgcatcaacagtgagaacatgttttgattatgagccttaaatctactagtgttgccttgtatttttcacttgtcttctatctttgacttgaaacgcagccagtgaactttgtaatatcaaaagagaagttctttnnttcttttt

SEQ ID NO: 22047 - protein, 109 aa, Arabidopsis thaliana
  peptide (1)..(109): Ceres Seq. ID no. 12393649
  misc_feature (27)..(106): Pfam Name: LSM domain Pfam Description: LSM domain
  misc_feature (1)..(108): Homolog of NCBI NO: 34881247 NR Description: similar to SNF2/RAD54 family protein [Rattus
  misc_feature (1)..(108): Homolog of NCBI NO: 27677236 NR Description: similar to Small nuclear ribonucleoprotein Sm D2
  misc_feature (1)..(108): Homolog of NCBI NO: 22203734 NR Description: small nuclear ribonucleoprotein D2-like protein
  misc_feature (3)..(108): Homolog of NCBI NO: 21357623 NR Description: CG1249-PA [Drosophila melanogaster]
  misc_feature (1)..(108): Homolog of NCBI NO: 26337731 NR Description: unnamed protein product [Mus musculus]
  misc_feature (1)..(109): Homolog of NCBI NO: 31230450 NR Description: ENSANGP00000002741 [Anopheles gambiae]
  misc_feature (1)..(108): Homolog of NCBI NO: 4759158 NR Description: small nuclear ribonucleoprotein polypeptide D2
  misc_feature (5)..(109): Homolog of NCBI NO: 21554692 NR Description: small nuclear ribonucleoprotein-like protein
  misc_feature (1)..(109): Homolog of NCBI NO: 30690747 NR Description: small nuclear ribonucleo protein D2 -related
  misc_feature (1)..(109): Homolog of NCBI NO: 18407411 NR Description: putative small nuclear ribonucleoprotein D2
MSKPMEEDTNQGKTEEEEFNTGPLSVLMMSVKNNTQVLINCRNNRKLLGRVRAFDRHCNMVLENVREMWTEVPKTGKGKKKALPVNRDRFISKMFLRGDSVIIVLRNPK

SEQ ID NO: 22048 - protein, 105 aa, Arabidopsis thaliana
  peptide (1)..(105): Ceres Seq. ID no. 12393650
  misc_feature (23)..(102): Pfam Name: LSM domain Pfam Description: LSM domain
  misc_feature (1)..(104): Homolog of NCBI NO: 34881247 NR Description: similar to SNF2/RAD54 family protein [Rattus
  misc_feature (1)..(104): Homolog of NCBI NO: 27677236 NR Description: similar to Small nuclear ribonucleoprotein Sm D2
  misc_feature (1)..(104): Homolog of NCBI NO: 22203734 NR Description: small nuclear ribonucleoprotein D2-like protein
  misc_feature (1)..(104): Homolog of NCBI NO: 21357623 NR Description: CG1249-PA [Drosophila melanogaster]
  misc_feature (1)..(104): Homolog of NCBI NO: 26337731 NR Description: unnamed protein product [Mus musculus]
  misc_feature (1)..(105): Homolog of NCBI NO: 31230450 NR Description: ENSANGP00000002741 [Anopheles gambiae]
  misc_feature (1)..(104): Homolog of NCBI NO: 4759158 NR Description: small nuclear ribonucleoprotein polypeptide D2
  misc_feature (1)..(105): Homolog of NCBI NO: 21554692 NR Description: small nuclear ribonucleoprotein-like protein
  misc_feature (1)..(105): Homolog of NCBI NO: 30690747 NR Description: small nuclear ribonucleo protein D2 -related
  misc_feature (1)..(105): Homolog of NCBI NO: 18407411 NR Description: putative small nuclear ribonucleoprotein D2
MEEDTNQGKTEEEEFNTGPLSVLMMSVKNNTQVLINCRNNRKLLGRVRAFDRHCNMVLENVREMWTEVPKTGKGKKKALPVNRDRFISKMFLRGDSVIIVLRNPK

SEQ ID NO: 22049 - protein, 82 aa, Arabidopsis thaliana
  peptide (1)..(82): Ceres Seq. ID no. 12393651
  misc_feature (1)..(79): Pfam Name: LSM domain Pfam Description: LSM domain
  misc_feature (1)..(81): Homolog of NCBI NO: 34881247 NR Description: similar to SNF2/RAD54 family protein [Rattus
  misc_feature (1)..(81): Homolog of NCBI NO: 27677236 NR Description: similar to Small nuclear ribonucleoprotein Sm D2
  misc_feature (1)..(81): Homolog of NCBI NO: 22203734 NR Description: small nuclear ribonucleoprotein D2-like protein
  misc_feature (1)..(81): Homolog of NCBI NO: 21357623 NR Description: CG1249-PA [Drosophila melanogaster]
  misc_feature (1)..(81): Homolog of NCBI NO: 26337731 NR Description: unnamed protein product [Mus musculus]
  misc_feature (1)..(82): Homolog of NCBI NO: 31230450 NR Description: ENSANGP00000002741 [Anopheles gambiae]
  misc_feature (1)..(81): Homolog of NCBI NO: 4759158 NR Description: small nuclear ribonucleoprotein polypeptide D2
  misc_feature (1)..(82): Homolog of NCBI NO: 21554692 NR Description: small nuclear ribonucleoprotein-like protein
  misc_feature (1)..(82): Homolog of NCBI NO: 30690747 NR Description: small nuclear ribonucleo protein D2 -related
  misc_feature (1)..(82): Homolog of NCBI NO: 18407411 NR Description: putative small nuclear ribonucleoprotein D2
MMSVKNNTQVLINCRNNRKLLGRVRAFDRHCNMVLENVREMWTEVPKTGKGKKKALPVNRDRFISKMFLRGDSVIIVLRNPK

SEQ ID NO: 22050 - DNA, 956 bp, Arabidopsis thaliana
  misc_feature (1)..(956): Ceres Seq. ID no. 13489803
  misc_feature: MA Experiment ID: 108434 Result: Up-regulated in Transcription
  misc_feature: MA Experiment 108434 PARAMETER Experiment Name: At_Root_Tips_cDNA_P Parameter: Tissue Value: Root Tips
  misc_feature: MA Experiment ID: 108595 Result: Down-regulated in Transcription
  misc_feature: MA Experiment 108595 PARAMETER Experiment Name: At_Ler-pi_Ovule_cDNA_P Parameter: Plant Line Value: null
  misc_feature: MA Experiment ID: 20000495 Result: Down-regulated in Transcription
  misc_feature: MA Experiment 20000495 PARAMETER Experiment Name: At_Guard_Cells_P Parameter: Harvest Date Value: 8/2/2002
  misc_feature: MA Experiment 20000495 PARAMETER Experiment Name: At_Guard_Cells_P Parameter: Organism Value: A. thaliana
  misc_feature: MA Experiment 20000495 PARAMETER Experiment Name: At_Guard_Cells_P Parameter: Tissue Value: Guard Cells vs. Leaves
  misc_feature: MA Experiment ID: 20001248 Result: Down-regulated in Transcription
  misc_feature: MA Experiment 20001248 PARAMETER Experiment Name: At_Far-red-induction_P Parameter: Age (day) Value: 7
  misc_feature: MA Experiment 20001248 PARAMETER Experiment Name: At_Far-red-induction_P Parameter: Light Value: Far-red vs. White
  misc_feature: MA Experiment 20001248 PARAMETER Experiment Name: At_Far-red-induction_P Parameter: Organism Value: A. thaliana
  misc_feature: MA Experiment 20001248 PARAMETER Experiment Name: At_Far-red-induction_P Parameter: Plant Line Value: Columbia
  misc_feature: MA Experiment 20001248 PARAMETER Experiment Name: At_Far-red-induction_P Parameter: Timepoint (hr) Value: 4
  misc_feature: MA Experiment 20001248 PARAMETER Experiment Name: At_Far-red-induction_P Parameter: Tissue Value: Whole Plant
  misc_feature: MA Experiment ID: 20001450 Result: Down-regulated in Transcription
  misc_feature: MA Experiment 20001450 PARAMETER Experiment Name: At_Far-red-induction_P Parameter: Age (day) Value: 7
  misc_feature: MA Experiment 20001450 PARAMETER Experiment Name: At_Far-red-induction_P Parameter: Light Value: Far-red vs. White
  misc_feature: MA Experiment 20001450 PARAMETER Experiment Name: At_Far-red-induction_P Parameter: Organism Value: A. thaliana
  misc_feature: MA Experiment 20001450 PARAMETER Experiment Name: At_Far-red-induction_P Parameter: Plant Line Value: Columbia
  misc_feature: MA Experiment 20001450 PARAMETER Experiment Name: At_Far-red-induction_P Parameter: Timepoint (hr) Value: 8
  misc_feature: MA Experiment 20001450 PARAMETER Experiment Name: At_Far-red-induction_P Parameter: Tissue Value: Whole Plant
  misc_feature: MA Experiment ID: 20001451 Result: Down-regulated in Transcription
  misc_feature: MA Experiment 20001451 PARAMETER Experiment Name: At_Far-red-induction_P Parameter: Age (day) Value: 7
  misc_feature: MA Experiment 20001451 PARAMETER Experiment Name: At_Far-red-induction_P Parameter: Light Value: Far-red vs. White
  misc_feature: MA Experiment 20001451 PARAMETER Experiment Name: At_Far-red-induction_P Parameter: Organism Value: A. thaliana
  misc_feature: MA Experiment 20001451 PARAMETER Experiment Name: At_Far-red-induction_P Parameter: Plant Line Value: Columbia
  misc_feature: MA Experiment 20001451 PARAMETER Experiment Name: At_Far-red-induction_P Parameter: Timepoint (hr) Value: 24
  misc_feature: MA Experiment 20001451 PARAMETER Experiment Name: At_Far-red-induction_P Parameter: Tissue Value: Whole Plant
gacgttctttcatttttcccgttatccagacacactcgcgaaaatggcggctcactcttcttgcaactttgctttgacgaatccgatcatctcacaaatcgattctttctctaagaagaaactatctgttccattatacttcttctctacaagaaaagcattgacgaatccttggttaggcgttgttgattcatccctctctctcacttctccagtctccgctctacaaactaatcgcccaagaagaatccataaatccgccatctccagcttacccaccgcgaatccagatttagtggtttctgatgcgaaaaagcccaaatggtcatggagggcaattaaatcatttgcaatgggagagcttgaagctaggaagctcaagtatccaaatactggaactgaagcacttctcatgggtattttgattgaaggaactagttttacttcaaagtttttgcgggcgaataagattatgctttacaaagtgcgtgaagaaacggtcaagttactaggaaaggcagatatgtatttctttagcccggaacatcctcctttaactgaagatgctcaaagagcacttgactctgctctggatcagaatctaaaagcaggtggtatcggggaagtaatgccagcacatatactacttgggatttggtctgaagttgaatctccaggtcacaagatactggcaactcttggtttcactgatgagaaatctaaagagttagagtcttttgcctctgaatctggctttttagatgaatagtatattacatccatatcatttctccattaatgcaaaatctccaagttcatagttgctgtttgcaataatattcgtatgtgttcgtctttgctcattcttattttcggttctttgtttcgcctttaagactttaagcttttttcacaaaaactactaacacttgatccttaagctttacttgctatat

SEQ ID NO: 22051 - protein, 255 aa, Arabidopsis thaliana
  peptide (1)..(255): Ceres Seq. ID no. 13489804
  misc_feature (119)..(171): Pfam Name: Clp amino terminal domain Pfam Description: Clp amino terminal domain
  misc_feature (100)..(234): Homolog of NCBI NO: 399213 NR Description: ATP-dependent clp protease ATP-binding subunit
  misc_feature (90)..(234): Homolog of NCBI NO: 1168972 NR Description: ATP-dependent clp protease ATP-binding subunit
  misc_feature (100)..(234): Homolog of NCBI NO: 15983763 NR Description: AT3g48870/T21J18_140 [Arabidopsis thaliana]
  misc_feature (100)..(234): Homolog of NCBI NO: 399212 NR Description: ATP-dependent clp protease ATP-binding subunit
  misc_feature (107)..(234): Homolog of NCBI NO: 23039549 NR Description: hypothetical protein [Trichodesmium erythraeum
  misc_feature (49)..(248): Homolog of NCBI NO: 7487579 NR Description: hypothetical protein T30C3.40 - Arabidopsis
  misc_feature (49)..(249): Homolog of NCBI NO: 18416540 NR Description: expressed protein [Arabidopsis thaliana]
  misc_feature (15)..(242): Homolog of NCBI NO: 7485569 NR Description: hypothetical protein F16J13.130 - Arabidopsis
  misc_feature (15)..(255): Homolog of NCBI NO: 21592785 NR Description: unknown [Arabidopsis thaliana]
  misc_feature (15)..(255): Homolog of NCBI NO: 18413740 NR Description: expressed protein [Arabidopsis thaliana]
TFFHFSRYPDTLAKMAAHSSCNFALTNPIISQIDSFSKKKLSVPLYFFSTRKALTNPWLGVVDSSLSLTSPVSALQTNRPRRIHKSAISSLPTANPDLVVSDAKKPKWSWRAIKSFAMGELEARKLKYPNTGTEALLMGILIEGTSFTSKFLRANKIMLYKVREETVKLLGKADMYFFSPEHPPLTEDAQRALDSALDQNLKAGGIGEVMPAHILLGIWSEVESPGHKILATLGFTDEKSKELESFASESGFLDE

SEQ ID NO: 22052 - protein, 241 aa, Arabidopsis thaliana
  peptide (1)..(241): Ceres Seq. ID no. 13489805
  misc_feature (105)..(157): Pfam Name: Clp amino terminal domain Pfam Description: Clp amino terminal domain
  misc_feature (86)..(220): Homolog of NCBI NO: 399213 NR Description: ATP-dependent clp protease ATP-binding subunit
  misc_feature (76)..(220): Homolog of NCBI NO: 1168972 NR Description: ATP-dependent clp protease ATP-binding subunit
  misc_feature (86)..(220): Homolog of NCBI NO: 15983763 NR Description: AT3g48870/T21J18_140 [Arabidopsis thaliana]
  misc_feature (86)..(220): Homolog of NCBI NO: 399212 NR Description: ATP-dependent clp protease ATP-binding subunit
  misc_feature (93)..(220): Homolog of NCBI NO: 23039549 NR Description: hypothetical protein [Trichodesmium erythraeum
  misc_feature (35)..(234): Homolog of NCBI NO: 7487579 NR Description: hypothetical protein T30C3.40 - Arabidopsis
  misc_feature (35)..(235): Homolog of NCBI NO: 18416540 NR Description: expressed protein [Arabidopsis thaliana]
  misc_feature (1)..(228): Homolog of NCBI NO: 7485569 NR Description: hypothetical protein F16J13.130 - Arabidopsis
  misc_feature (1)..(241): Homolog of NCBI NO: 21592785 NR Description: unknown [Arabidopsis thaliana]
  misc_feature (1)..(241): Homolog of NCBI NO: 18413740 NR Description: expressed protein [Arabidopsis thaliana]
MAAHSSCNFALTNPIISQIDSFSKKKLSVPLYFFSTRKALTNPWLGVVDSSLSLTSPVSALQTNRPRRIHKSAISSLPTANPDLVVSDAKKPKWSWRAIKSFAMGELEARKLKYPNTGTEALLMGILIEGTSFTSKFLRANKIMLYKVREETVKLLGKADMYFFSPEHPPLTEDAQRALDSALDQNLKAGGIGEVMPAHILLGIWSEVESPGHKILATLGFTDEKSKELESFASESGFLDE

SEQ ID NO: 22053 - protein, 138 aa, Arabidopsis thaliana
  peptide (1)..(138): Ceres Seq. ID no. 13489806
  misc_feature (2)..(54): Pfam Name: Clp amino terminal domain Pfam Description: Clp amino terminal domain
  misc_feature (1)..(125): Homolog of NCBI NO: 7485569 NR Description: hypothetical protein F16J13.130 - Arabidopsis
  misc_feature (1)..(138): Homolog of NCBI NO: 21592785 NR Description: unknown [Arabidopsis thaliana]
  misc_feature (1)..(117): Homolog of NCBI NO: 1168972 NR Description: ATP-dependent clp protease ATP-binding subunit
  misc_feature (1)..(117): Homolog of NCBI NO: 399212 NR Description: ATP-dependent clp protease ATP-binding subunit
  misc_feature (1)..(131): Homolog of NCBI NO: 7487579 NR Description: hypothetical protein T30C3.40 - Arabidopsis
  misc_feature (1)..(132): Homolog of NCBI NO: 18416540 NR Description: expressed protein [Arabidopsis thaliana]
  misc_feature (1)..(117): Homolog of NCBI NO: 23039549 NR Description: hypothetical protein [Trichodesmium erythraeum
  misc_feature (1)..(117): Homolog of NCBI NO: 15983763 NR Description: AT3g48870/T21J18_140 [Arabidopsis thaliana]
  misc_feature (1)..(117): Homolog of NCBI NO: 399213 NR Description: ATP-dependent clp protease ATP-binding subunit
  misc_feature (1)..(138): Homolog of NCBI NO: 18413740 NR Description: expressed protein [Arabidopsis thaliana]
MGELEARKLKYPNTGTEALLMGILIEGTSFTSKFLRANKIMLYKVREETVKLLGKADMYFFSPEHPPLTEDAQRALDSALDQNLKAGGIGEVMPAHILLGIWSEVESPGHKILATLGFTDEKSKELESFASESGFLDE

SEQ ID NO: 22054 - DNA, 2035 bp, Arabidopsis thaliana
  misc_feature (1)..(2035): Ceres Seq. ID no. 12327285
  misc_feature: MA Experiment ID: 108434 Result: Up-regulated in Transcription
  misc_feature: MA Experiment 108434 PARAMETER Experiment Name: At_Root_Tips_cDNA_P Parameter: Tissue Value: Root Tips
  misc_feature: MA Experiment ID: 108579 Result: Down-regulated in Transcription
  misc_feature: MA Experiment 108579 PARAMETER Experiment Name: At_4deg_Cold_cDNA_P Parameter: Temperature (deg C) Value: 4 vs. 22
  misc_feature: MA Experiment 108579 PARAMETER Experiment Name: At_4deg_Cold_cDNA_P Parameter: Timepoint (hr) Value: 6
  misc_feature: MA Experiment 108579 PARAMETER Experiment Name: At_4deg_Cold_cDNA_P Parameter: Tissue Value: Aerial
  misc_feature: MA Experiment ID: 20000117 Result: Down-regulated in Transcription
  misc_feature: MA Experiment 20000117 PARAMETER Experiment Name: At_100uM_ABA_Mutants_cDNA_P Parameter: Plant Line Value: Columbia
  misc_feature: MA Experiment 20000117 PARAMETER Experiment Name: At_100uM_ABA_Mutants_cDNA_P Parameter: Timepoint (hr) Value: 6
  misc_feature: MA Experiment 20000117 PARAMETER Experiment Name: At_100uM_ABA_Mutants_cDNA_P Parameter: Tissue Value: Aerial
  misc_feature: MA Experiment 20000117 PARAMETER Experiment Name: At_100uM_ABA_Mutants_cDNA_P Parameter: Treatment Value: 100uM ABA vs. No Treatment
  misc_feature: MA Experiment ID: 20000180 Result: Up-regulated in Transcription
  misc_feature: MA Experiment 20000180 PARAMETER Experiment Name: At_Germinating_Seeds_P Parameter: Age (hr) Value: 24 vs. 0
  misc_feature: MA Experiment 20000180 PARAMETER Experiment Name: At_Germinating_Seeds_P Parameter: Tissue Value: Germinating Seeds
  misc_feature: MA Experiment ID: 20001248 Result: Up-regulated in Transcription
  misc_feature: MA Experiment 20001248 PARAMETER Experiment Name: At_Far-red-induction_P Parameter: Age (day) Value: 7
  misc_feature: MA Experiment 20001248 PARAMETER Experiment Name: At_Far-red-induction_P Parameter: Light Value: Far-red vs. White
  misc_feature: MA Experiment 20001248 PARAMETER Experiment Name: At_Far-red-induction_P Parameter: Organism Value: A. thaliana
  misc_feature: MA Experiment 20001248 PARAMETER Experiment Name: At_Far-red-induction_P Parameter: Plant Line Value: Columbia
  misc_feature: MA Experiment 20001248 PARAMETER Experiment Name: At_Far-red-induction_P Parameter: Timepoint (hr) Value: 4
  misc_feature: MA Experiment 20001248 PARAMETER Experiment Name: At_Far-red-induction_P Parameter: Tissue Value: Whole Plant
aatctctctctctctccctctcccaaaatctcacgatgcaacctcagccgcatatttctccgaacaccgcaactgccgcgatctcagccgcgcttgaatctcagcgcagtagaaaaaaccgaggaagttacaattgcggtagatgtggtcaacctaagaaaggccatgtctgtcttttaactgctccacctgatattcccactactccgatcgcttctgagccagtgagctgcatctccgccgccgcatcttcttcccgttctactgtcttatctttaacagcggcgccgtcatcgcgacagaccttcactcacttacgccgagctttatcgttcgatgacgtcgatgcgcgtaattcactcgatgaatccgatctggatgctgcatcgatggatctggatctacaattggatacggatattgttcagcctgggaggtttcatgcggtgggtttatgggaggtgcttaagcggctacctccgtctagtttactgatggcggctagggtttgcaaaggatggagagagacatcgaggaagatgtggaaagcggctgaggagcttcggattagggttccggagagagctcagattggatacattggatccttattacaaaaatgtcctcgacttattagactctcacttaaaatcgagagtgattttgacgcgacgactctggcttgcattgcattttcttgtcctaacctggaggttttggagattacaacttcgggtgcagctgtcaataggatttctggggatgagctgagtcggtttgttgctaataaacgaggactaacaagccttaagatggaaggatgttccaatttgggaggattttccctctcttcatcaagcctctccactctttggctctcggatcttcattctctctcaaagatgatcttcaactgtccaaatcttacggaaatatcacttgaattttctcgccaagaagatgattcaactgatcttgtaacaatggttgatggtttgggaaggacttgcactagattgcagaacatccatatagcctctttgaagctttcacatactgttgtactttctcttactgctgtgaatttcaggtatttgagaatgctctcgctagttcttggaataaatatcactgatgcatctgtagctgccatttcctcaggttacaaaaaccttgaactgcttgatctgagtggttccagcattactgatactggcctcgggatgatctgcgatgtcttacctgatacactctcaaaattacttgttgctctttgtcccaacattacatcaagtggcattcaatttgctactgctcaattgccccttcttgagctgatggattgtggcatgactgtctctgatcccaactcagataatccgacctttgtagagaatccaagtccacataaaacaccaggctacaatcaaaagatgtttatcaaacataaacggctgaagaaacttagtttgtggggatgctccagtttggacgctttgttcctaaactgcccagagctcatggacttgaacttgaacttatgcagtaatttgcatccggagagtctggtgctacaatgtccaaagttacaacttgtgtacgcatcaggatgtcaaggcctattgaccggagctatccgaaaacaggtttctgaaaacttctcggctggtgagaaccatatgccacggaaacgcttggctgatgcatctaaaaggattcaagctttaccttcattataccaagaaacaagggaagatggtatttatgcagggaagagaaggaagttggagaaagaaatgtgtaccattatacattaataatccttttattggactcgtcacaattttcgtctaccatatttatatttactgtactgtgtacatcagattatgttggatcacgttctcttctgttgtttcacttatcaactttacatgtttatcattgttctccaattgcttcgaataaattgtatgataacattctgtatttgtttaaattatatactactagagtactaggggtattttcttcg

SEQ ID NO: 22055 - protein, 604 aa, Arabidopsis thaliana
  peptide (1)..(604): Ceres Seq. ID no. 12327286
  misc_feature (390)..(421): Pfam Name: Leucine Rich Repeat Pfam Description: Leucine Rich Repeat
  misc_feature (12)..(549): Homolog of NCBI NO: 18410106 NR Description: F-box protein family, AtFBL17; protein id:
  misc_feature (12)..(604): Homolog of NCBI NO: 18087570 NR Description: AT3g54650/T5N23_10 [Arabidopsis thaliana]
SLSLSLSQNLTMQPQPHISPNTATAAISAALESQRSRKNRGSYNCGRCGQPKKGHVCLLTAPPDIPTTPIASEPVSCISAAASSSRSTVLSLTAAPSSRQTFTHLRRALSFDDVDARNSLDESDLDAASMDLDLQLDTDIVQPGRFHAVGLWEVLKRLPPSSLLMAARVCKGWRETSRKMWKAAEELRIRVPERAQIGYIGSLLQKCPRLIRLSLKIESDFDATTLACIAFSCPNLEVLEITTSGAAVNRISGDELSRFVANKRGLTSLKMEGCSNLGGFSLSSSSLSTLWLSDLHSLSKMIFNCPNLTEISLEFSRQEDDSTDLVTMVDGLGRTCTRLQNIHIASLKLSHTVVLSLTAVNFRYLRMLSLVLGINITDASVAAISSGYKNLELLDLSGSSITDTGLGMICDVLPDTLSKLLVALCPNITSSGIQFATAQLPLLELMDCGMTVSDPNSDNPTFVENPSPHKTPGYNQKMFIKHKRLKKLSLWGCSSLDALFLNCPELMDLNLNLCSNLHPESLVLQCPKLQLVYASGCQGLLTGAIRKQVSENFSAGENHMPRKRLADASKRIQALPSLYQETREDGIYAGKRRKLEKEMCTIIH

SEQ ID NO: 22056 - protein, 593 aa, Arabidopsis thaliana
  peptide (1)..(593): Ceres Seq. ID no. 12327287
  misc_feature (379)..(410): Pfam Name: Leucine Rich Repeat Pfam Description: Leucine Rich Repeat
  misc_feature (1)..(538): Homolog of NCBI NO: 18410106 NR Description: F-box protein family, AtFBL17; protein id:
  misc_feature (1)..(593): Homolog of NCBI NO: 18087570 NR Description: AT3g54650/T5N23_10 [Arabidopsis thaliana]
MQPQPHISPNTATAAISAALESQRSRKNRGSYNCGRCGQPKKGHVCLLTAPPDIPTTPIASEPVSCISAAASSSRSTVLSLTAAPSSRQTFTHLRRALSFDDVDARNSLDESDLDAASMDLDLQLDTDIVQPGRFHAVGLWEVLKRLPPSSLLMAARVCKGWRETSRKMWKAAEELRIRVPERAQIGYIGSLLQKCPRLIRLSLKIESDFDATTLACIAFSCPNLEVLEITTSGAAVNRISGDELSRFVANKRGLTSLKMEGCSNLGGFSLSSSSLSTLWLSDLHSLSKMIFNCPNLTEISLEFSRQEDDSTDLVTMVDGLGRTCTRLQNIHIASLKLSHTVVLSLTAVNFRYLRMLSLVLGINITDASVAAISSGYKNLELLDLSGSSITDTGLGMICDVLPDTLSKLLVALCPNITSSGIQFATAQLPLLELMDCGMTVSDPNSDNPTFVENPSPHKTPGYNQKMFIKHKRLKKLSLWGCSSLDALFLNCPELMDLNLNLCSNLHPESLVLQCPKLQLVYASGCQGLLTGAIRKQVSENFSAGENHMPRKRLADASKRIQALPSLYQETREDGIYAGKRRKLEKEMCTIIH

SEQ ID NO: 22057 - protein, 475 aa, Arabidopsis thaliana
  peptide (1)..(475): Ceres Seq. ID no. 12327288
  misc_feature (261)..(292): Pfam Name: Leucine Rich Repeat Pfam Description: Leucine Rich Repeat
  misc_feature (1)..(420): Homolog of NCBI NO: 18410106 NR Description: F-box protein family, AtFBL17; protein id:
  misc_feature (1)..(475): Homolog of NCBI NO: 18087570 NR Description: AT3g54650/T5N23_10 [Arabidopsis thaliana]
MDLDLQLDTDIVQPGRFHAVGLWEVLKRLPPSSLLMAARVCKGWRETSRKMWKAAEELRIRVPERAQIGYIGSLLQKCPRLIRLSLKIESDFDATTLACIAFSCPNLEVLEITTSGAAVNRISGDELSRFVANKRGLTSLKMEGCSNLGGFSLSSSSLSTLWLSDLHSLSKMIFNCPNLTEISLEFSRQEDDSTDLVTMVDGLGRTCTRLQNIHIASLKLSHTVVLSLTAVNFRYLRMLSLVLGINITDASVAAISSGYKNLELLDLSGSSITDTGLGMICDVLPDTLSKLLVALCPNITSSGIQFATAQLPLLELMDCGMTVSDPNSDNPTFVENPSPHKTPGYNQKMFIKHKRLKKLSLWGCSSLDALFLNCPELMDLNLNLCSNLHPESLVLQCPKLQLVYASGCQGLLTGAIRKQVSENFSAGENHMPRKRLADASKRIQALPSLYQETREDGIYAGKRRKLEKEMCTIIH

SEQ ID NO: 22058 - DNA, 756 bp, Arabidopsis thaliana
  misc_feature (1)..(756): Ceres Seq. ID no. 12653898
  misc_feature: MA Experiment ID: 108462 Result: Down-regulated in Transcription
  misc_feature: MA Experiment 108462 PARAMETER Experiment Name: At_Germinating_Seeds_cDNA_P Parameter: Age (day) Value: 2 vs. 0
  misc_feature: MA Experiment 108462 PARAMETER Experiment Name: At_Germinating_Seeds_cDNA_P Parameter: Tissue Value: Germinating Seeds
  misc_feature: MA Experiment ID: 108463 Result: Down-regulated in Transcription
  misc_feature: MA Experiment 108463 PARAMETER Experiment Name: At_Germinating_Seeds_cDNA_P Parameter: Age (day) Value: 3 vs. 0
  misc_feature: MA Experiment 108463 PARAMETER Experiment Name: At_Germinating_Seeds_cDNA_P Parameter: Tissue Value: Germinating Seeds
  misc_feature: MA Experiment ID: 108464 Result: Down-regulated in Transcription
  misc_feature: MA Experiment 108464 PARAMETER Experiment Name: At_Germinating_Seeds_cDNA_P Parameter: Age (day) Value: 4 vs. 0
  misc_feature: MA Experiment 108464 PARAMETER Experiment Name: At_Germinating_Seeds_cDNA_P Parameter: Tissue Value: Germinating Seeds
  misc_feature: MA Experiment ID: 108605 Result: Down-regulated in Transcription
  misc_feature: MA Experiment 108605 PARAMETER Experiment Name: At_100uM_ABA_cDNA_P Parameter: Timepoint (hr) Value: 6
  misc_feature: MA Experiment 108605 PARAMETER Experiment Name: At_100uM_ABA_cDNA_P Parameter: Tissue Value: Aerial
  misc_feature: MA Experiment 108605 PARAMETER Experiment Name: At_100uM_ABA_cDNA_P Parameter: Treatment Value: 100uM ABA vs. No Treatment
  misc_feature: MA Experiment ID: 108607 Result: Down-regulated in Transcription
  misc_feature: MA Experiment 108607 PARAMETER Experiment Name: At_100uM_ABA_cDNA_P Parameter: Timepoint (hr) Value: 4
  misc_feature: MA Experiment 108607 PARAMETER Experiment Name: At_100uM_ABA_cDNA_P Parameter: Tissue Value: Aerial
  misc_feature: MA Experiment 108607 PARAMETER Experiment Name: At_100uM_ABA_cDNA_P Parameter: Treatment Value: 100uM ABA vs. No Treatment
  misc_feature: MA Experiment ID: 108609 Result: Down-regulated in Transcription
  misc_feature: MA Experiment 108609 PARAMETER Experiment Name: At_100uM_ABA_cDNA_P Parameter: Timepoint (hr) Value: 24
  misc_feature: MA Experiment 108609 PARAMETER Experiment Name: At_100uM_ABA_cDNA_P Parameter: Tissue Value: Aerial
  misc_feature: MA Experiment 108609 PARAMETER Experiment Name: At_100uM_ABA_cDNA_P Parameter: Treatment Value: 100uM ABA vs. No Treatment
  misc_feature: MA Experiment ID: 20000069 Result: Up-regulated in Transcription
  misc_feature: MA Experiment 20000069 PARAMETER Experiment Name: At_100uM_ABA_Mutants_cDNA_P Parameter: Plant Line Value: CS23
  misc_feature: MA Experiment 20000069 PARAMETER Experiment Name: At_100uM_ABA_Mutants_cDNA_P Parameter: Timepoint (hr) Value: 6
  misc_feature: MA Experiment 20000069 PARAMETER Experiment Name: At_100uM_ABA_Mutants_cDNA_P Parameter: Tissue Value: Aerial
  misc_feature: MA Experiment 20000069 PARAMETER Experiment Name: At_100uM_ABA_Mutants_cDNA_P Parameter: Treatment Value: 100uM ABA vs. No Treatment
  misc_feature: MA Experiment ID: 20000070 Result: Up-regulated in Transcription
  misc_feature: MA Experiment 20000070 PARAMETER Experiment Name: At_100uM_ABA_Mutants_cDNA_P Parameter: Plant Line Value: CS24
  misc_feature: MA Experiment 20000070 PARAMETER Experiment Name: At_100uM_ABA_Mutants_cDNA_P Parameter: Timepoint (hr) Value: 6
  misc_feature: MA Experiment 20000070 PARAMETER Experiment Name: At_100uM_ABA_Mutants_cDNA_P Parameter: Tissue Value: Aerial
  misc_feature: MA Experiment 20000070 PARAMETER Experiment Name: At_100uM_ABA_Mutants_cDNA_P Parameter: Treatment Value: 100uM ABA vs. No Treatment
  misc_feature: MA Experiment ID: 20000072 Result: Up-regulated in Transcription
  misc_feature: MA Experiment 20000072 PARAMETER Experiment Name: At_100uM_ABA_Mutants_cDNA_P Parameter: Plant Line Value: CS8105
  misc_feature: MA Experiment 20000072 PARAMETER Experiment Name: At_100uM_ABA_Mutants_cDNA_P Parameter: Timepoint (hr) Value: 6
  misc_feature: MA Experiment 20000072 PARAMETER Experiment Name: At_100uM_ABA_Mutants_cDNA_P Parameter: Tissue Value: Aerial
  misc_feature: MA Experiment 20000072 PARAMETER Experiment Name: At_100uM_ABA_Mutants_cDNA_P Parameter: Treatment Value: 100uM ABA vs. No Treatment
  misc_feature: MA Experiment ID: 20000086 Result: Up-regulated in Transcription
  misc_feature: MA Experiment 20000086 PARAMETER Experiment Name: At_100uM_ABA_Mutants_cDNA_P Parameter: Plant Line Value: CS22
  misc_feature: MA Experiment 20000086 PARAMETER Experiment Name: At_100uM_ABA_Mutants_cDNA_P Parameter: Timepoint (hr) Value: 6
  misc_feature: MA Experiment 20000086 PARAMETER Experiment Name: At_100uM_ABA_Mutants_cDNA_P Parameter: Tissue Value: Aerial
  misc_feature: MA Experiment 20000086 PARAMETER Experiment Name: At_100uM_ABA_Mutants_cDNA_P Parameter: Treatment Value: 100uM ABA vs. No Treatment
  misc_feature: MA Experiment ID: 20000087 Result: Up-regulated in Transcription
  misc_feature: MA Experiment 20000087 PARAMETER Experiment Name: At_100uM_ABA_Mutants_cDNA_P Parameter: Plant Line Value: WS
  misc_feature: MA Experiment 20000087 PARAMETER Experiment Name: At_100uM_ABA_Mutants_cDNA_P Parameter: Timepoint (hr) Value: 6
  misc_feature: MA Experiment 20000087 PARAMETER Experiment Name: At_100uM_ABA_Mutants_cDNA_P Parameter: Tissue Value: Aerial
  misc_feature: MA Experiment 20000087 PARAMETER Experiment Name: At_100uM_ABA_Mutants_cDNA_P Parameter: Treatment Value: 100uM ABA vs. No Treatment
  misc_feature: MA Experiment ID: 20000088 Result: Up-regulated in Transcription
  misc_feature: MA Experiment 20000088 PARAMETER Experiment Name: At_100uM_ABA_Mutants_cDNA_P Parameter: Plant Line Value: Landsberg
  misc_feature: MA Experiment 20000088 PARAMETER Experiment Name: At_100uM_ABA_Mutants_cDNA_P Parameter: Timepoint (hr) Value: 6
  misc_feature: MA Experiment 20000088 PARAMETER Experiment Name: At_100uM_ABA_Mutants_cDNA_P Parameter: Tissue Value: Aerial
  misc_feature: MA Experiment 20000088 PARAMETER Experiment Name: At_100uM_ABA_Mutants_cDNA_P Parameter: Treatment Value: 100uM ABA vs. No Treatment
  misc_feature: MA Experiment ID: 20000089 Result: Up-regulated in Transcription
  misc_feature: MA Experiment ID: 20000090 Result: Up-regulated in Transcription
  misc_feature: MA Experiment ID: 20000111 Result: Down-regulated in Transcription
  misc_feature: MA Experiment 20000111 PARAMETER Experiment Name: At_42deg_Heat_cDNA_P Parameter: Temperature (deg C) Value: 42 vs. 22
  misc_feature: MA Experiment 20000111 PARAMETER Experiment Name: At_42deg_Heat_cDNA_P Parameter: Timepoint (hr) Value: 6
  misc_feature: MA Experiment 20000111 PARAMETER Experiment Name: At_42deg_Heat_cDNA_P Parameter: Tissue Value: Aerial
  misc_feature: MA Experiment ID: 20000112 Result: Down-regulated in Transcription
  misc_feature: MA Experiment 20000112 PARAMETER Experiment Name: At_42deg_Heat_cDNA_P Parameter: Temperature (deg C) Value: 42 vs. 22
  misc_feature: MA Experiment 20000112 PARAMETER Experiment Name: At_42deg_Heat_cDNA_P Parameter: Timepoint (hr) Value: 2
  misc_feature: MA Experiment 20000112 PARAMETER Experiment Name: At_42deg_Heat_cDNA_P Parameter: Tissue Value: Aerial
  misc_feature: MA Experiment ID: 20000117 Result: Up-regulated in Transcription
  misc_feature: MA Experiment 20000117 PARAMETER Experiment Name: At_100uM_ABA_Mutants_cDNA_P Parameter: Plant Line Value: Columbia
  misc_feature: MA Experiment 20000117 PARAMETER Experiment Name: At_100uM_ABA_Mutants_cDNA_P Parameter: Timepoint (hr) Value: 6
  misc_feature: MA Experiment 20000117 PARAMETER Experiment Name: At_100uM_ABA_Mutants_cDNA_P Parameter: Tissue Value: Aerial
  misc_feature: MA Experiment 20000117 PARAMETER Experiment Name: At_100uM_ABA_Mutants_cDNA_P Parameter: Treatment Value: 100uM ABA vs. No Treatment
  misc_feature: MA Experiment ID: 20000173 Result: Down-regulated in Transcription
  misc_feature: MA Experiment 20000173 PARAMETER Experiment Name: At_42deg_Heat_P Parameter: Age (day) Value: 14
  misc_feature: MA Experiment 20000173 PARAMETER Experiment Name: At_42deg_Heat_P Parameter: Organism Value: A. thaliana
  misc_feature: MA Experiment 20000173 PARAMETER Experiment Name: At_42deg_Heat_P Parameter: Plant Line Value: WS
  misc_feature: MA Experiment 20000173 PARAMETER Experiment Name: At_42deg_Heat_P Parameter: Temperature (deg C) Value: 42 vs. 22
  misc_feature: MA Experiment 20000173 PARAMETER Experiment Name: At_42deg_Heat_P Parameter: Timepoint (hr) Value: 6
  misc_feature: MA Experiment 20000173 PARAMETER Experiment Name: At_42deg_Heat_P Parameter: Tissue Value: Aerial
  misc_feature: MA Experiment ID: 20000213 Result: Up-regulated in Transcription
  misc_feature: MA Experiment 20000213 PARAMETER Experiment Name: At_4deg_Cold_P Parameter: Timepoint (hr) Value: 2
  misc_feature: MA Experiment ID: 20000453 Result: Down-regulated in Transcription
  misc_feature: MA Experiment 20000453 PARAMETER Experiment Name: At_100uM_ABA_P Parameter: Age (day) Value: 15
  misc_feature: MA Experiment 20000453 PARAMETER Experiment Name: At_100uM_ABA_P Parameter: Organism Value: A. thaliana
  misc_feature: MA Experiment 20000453 PARAMETER Experiment Name: At_100uM_ABA_P Parameter: Plant Line Value: WS
  misc_feature: MA Experiment 20000453 PARAMETER Experiment Name: At_100uM_ABA_P Parameter: Timepoint (hr) Value: 24
  misc_feature: MA Experiment 20000453 PARAMETER Experiment Name: At_100uM_ABA_P Parameter: Tissue Value: Aerial
  misc_feature: MA Experiment 20000453 PARAMETER Experiment Name: At_100uM_ABA_P Parameter: Treatment Value: 100uM ABA vs. No Treatment
  misc_feature: MA Experiment ID: 20001247 Result: Down-regulated in Transcription
  misc_feature: MA Experiment 20001247 PARAMETER Experiment Name: At_Far-red-induction_P Parameter: Age (day) Value: 7
  misc_feature: MA Experiment 20001247 PARAMETER Experiment Name: At_Far-red-induction_P Parameter: Light Value: Far-red vs. White
  misc_feature: MA Experiment 20001247 PARAMETER Experiment Name: At_Far-red-induction_P Parameter: Organism Value: A. thaliana
  misc_feature: MA Experiment 20001247 PARAMETER Experiment Name: At_Far-red-induction_P Parameter: Plant Line Value: Columbia
  misc_feature: MA Experiment 20001247 PARAMETER Experiment Name: At_Far-red-induction_P Parameter: Timepoint (hr) Value: 1
  misc_feature: MA Experiment 20001247 PARAMETER Experiment Name: At_Far-red-induction_P Parameter: Tissue Value: Whole Plant
  misc_feature: MA Experiment ID: 20001248 Result: Up-regulated in Transcription
  misc_feature: MA Experiment 20001248 PARAMETER Experiment Name: At_Far-red-induction_P Parameter: Age (day) Value: 7
  misc_feature: MA Experiment 20001248 PARAMETER Experiment Name: At_Far-red-induction_P Parameter: Light Value: Far-red vs. White
  misc_feature: MA Experiment 20001248 PARAMETER Experiment Name: At_Far-red-induction_P Parameter: Organism Value: A. thaliana
  misc_feature: MA Experiment 20001248 PARAMETER Experiment Name: At_Far-red-induction_P Parameter: Plant Line Value: Columbia
  misc_feature: MA Experiment 20001248 PARAMETER Experiment Name: At_Far-red-induction_P Parameter: Timepoint (hr) Value: 4
  misc_feature: MA Experiment 20001248 PARAMETER Experiment Name: At_Far-red-induction_P Parameter: Tissue Value: Whole Plant
  misc_feature: MA Experiment ID: 20001557 Result: Up-regulated in Transcription
  misc_feature: MA Experiment 20001557 PARAMETER Experiment Name: At_Drought_Soil_Dry_P Parameter: Age (day) Value: 27
  misc_feature: MA Experiment 20001557 PARAMETER Experiment Name: At_Drought_Soil_Dry_P Parameter: Organism Value: A. thaliana
  misc_feature: MA Experiment 20001557 PARAMETER Experiment Name: At_Drought_Soil_Dry_P Parameter: Plant Line Value: WS
  misc_feature: MA Experiment 20001557 PARAMETER Experiment Name: At_Drought_Soil_Dry_P Parameter: Post Timepoint (hr) Value: 3
  misc_feature: MA Experiment 20001557 PARAMETER Experiment Name: At_Drought_Soil_Dry_P Parameter: Post-Treatment Value: Re-Water vs. No Drought
  misc_feature: MA Experiment 20001557 PARAMETER Experiment Name: At_Drought_Soil_Dry_P Parameter: Timepoint (day) Value: 13
  misc_feature: MA Experiment 20001557 PARAMETER Experiment Name: At_Drought_Soil_Dry_P Parameter: Treatment Value: Drought vs. No Drought
  misc_feature: Phenotype: ROSETTE LEAVES Curled-Curled 2
  misc_feature: Phenotype: WHOLE PLANT Size-Small
  misc_feature: Phenotype: WHOLE PLANT Size-Small
  misc_feature: Phenotype: INFLORESCENCE Height-Short
  misc_feature: Phenotype: FERTILITY Fertility-Reduced
  misc_feature: Phenotype: ROSETTE LEAVES Curled-Corkscrew
  misc_feature: Phenotype: ROSETTE LEAVES Other
  misc_feature: Phenotype: WHOLE PLANT Size-Small
  misc_feature: Phenotype: WHOLE PLANT Size-Small
  misc_feature: Phenotype: CAULINE LEAVES Curled-Curled 2
  misc_feature: Phenotype: INFLORESCENCE Flowering Time-Late Flowering
  misc_feature: Phenotype: INFLORESCENCE Height-Short
  misc_feature: Phenotype: FERTILITY Fertility-Sterile
  misc_feature: Phenotype: ROSETTE LEAVES Curled-Curled 2
  misc_feature: Phenotype: ROSETTE LEAVES Shape-Serrate
  misc_feature: Phenotype: ROSETTE LEAVES Other
  misc_feature: Phenotype: WHOLE PLANT Color-Dark Green
  misc_feature: Phenotype: WHOLE PLANT Color-Dark Green
  misc_feature: Phenotype: WHOLE PLANT Size-Small
  misc_feature: Phenotype: WHOLE PLANT Size-Small
  misc_feature: Phenotype: INFLORESCENCE Flowering Time-Late Flowering
  misc_feature: Phenotype: INFLORESCENCE Height-Short
  misc_feature: Phenotype: FERTILITY Fertility-Sterile
aaaatcacataagtctctctcttacattttgaaaccctaatttctcaaaataaatgtctgaagttgagtaccggtgctttgtcggcggccttgcctgggccaccaatgatgaagatcttcaaaggacgttctcacagttcggcgacgttatcgattctaagatcattaacgaccgcgagagtggaagatcaaggggattcggattcgtcaccttcaaggacgagaaagccatgagggatgcgattgaagagatgaacggtaaagagctcgatggacgtgtcatcaccgtgaacgaggctcagtcgagaggtagcggcggtggcggaggaggccgtggtggaagcggtggtggttaccgcagcggaggcggtggtggatactcaggaggcggtggcggcggatactcaggaggaggcggtggtggttacgagagacgtagcggaggttacggatctggtggaggcggtggtggccgaggatacggtggtggtggacgccgtgagggaggtggctacggaggcggtgatggtggaagttacggaggcggtggtggcggctggtaatcaaagatagagttgtttgcgtgctgctgctctgtttttggtttagatttggatttgtgtcaccacttctggtttggttatcgttcgtttggtttacttttttgatgaaacagtttcgtttaagtcttctttgtctggatcgaaatgttaattcgcgtgttgtttactaaatttataacgtttccttttaacc

SEQ ID NO: 22059 - protein, 169 aa, Arabidopsis thaliana
  peptide (1)..(169): Ceres Seq. ID no. 12653899
  misc_feature (8)..(79): Pfam Name: RNA recognition motif. (a.k.a. RRM, RBD, or RNP domain) Pfam Description: RNA recognition motif. (a.k.a. RRM, RBD, or RNP
  misc_feature (3)..(169): Homolog of NCBI NO: 30681492 NR Description: glycine-rich RNA-binding protein (AtGRP7)
  misc_feature (2)..(168): Homolog of NCBI NO: 34851124 NR Description: putative glycine-rich RNA-binding protein [Prunus
  misc_feature (1)..(161): Homolog of NCBI NO: 544426 NR Description: Glycine-rich RNA-binding protein
  misc_feature (1)..(124): Homolog of NCBI NO: 30692254 NR Description: glycine-rich RNA-binding protein 8 (GRP8) (CCR1)
  misc_feature (3)..(169): Homolog of NCBI NO: 1346180 NR Description: Glycine-rich RNA-binding protein GRP1A
  misc_feature (3)..(169): Homolog of NCBI NO: 21553354 NR Description: glycine-rich RNA binding protein 7 [Arabidopsis
  misc_feature (3)..(169): Homolog of NCBI NO: 1346181 NR Description: Glycine-rich RNA-binding protein GRP2A
  misc_feature (1)..(169): Homolog of NCBI NO: 544416 NR Description: Glycine-rich RNA-binding protein 10
  misc_feature (3)..(169): Homolog of NCBI NO: 15226605 NR Description: glycine-rich RNA binding protein AtGRP7
  misc_feature (1)..(169): Homolog of NCBI NO: 15235002 NR Description: glycine-rich RNA-binding protein 8 (GRP8)
MSEVEYRCFVGGLAWATNDEDLQRTFSQFGDVIDSKIINDRESGRSRGFGFVTFKDEKAMRDAIEEMNGKELDGRVITVNEAQSRGSGGGGGGRGGSGGGYRSGGGGGYSGGGGGGYSGGGGGGYERRSGGYGSGGGGGGRGYGGGGRREGGGYGGGDGGSYGGGGGGW

SEQ ID NO: 22060 - protein, 110 aa, Arabidopsis thaliana
  peptide (1)..(110): Ceres Seq. ID no. 12653900
  misc_feature (30)..(109): Pfam Name: Herpesvirus large structural phosphoprotein UL32 Pfam Description: Herpesvirus large structural phosphoprotein UL32
  misc_feature (1)..(110): Homolog of NCBI NO: 30681492 NR Description: glycine-rich RNA-binding protein (AtGRP7)
  misc_feature (1)..(109): Homolog of NCBI NO: 34851124 NR Description: putative glycine-rich RNA-binding protein [Prunus
  misc_feature (1)..(102): Homolog of NCBI NO: 544426 NR Description: Glycine-rich RNA-binding protein
  misc_feature (1)..(65): Homolog of NCBI NO: 30692254 NR Description: glycine-rich RNA-binding protein 8 (GRP8) (CCR1)
  misc_feature (1)..(110): Homolog of NCBI NO: 1346180 NR Description: Glycine-rich RNA-binding protein GRP1A
  misc_feature (1)..(110): Homolog of NCBI NO: 21553354 NR Description: glycine-rich RNA binding protein 7 [Arabidopsis
  misc_feature (1)..(110): Homolog of NCBI NO: 1346181 NR Description: Glycine-rich RNA-binding protein GRP2A
  misc_feature (1)..(110): Homolog of NCBI NO: 544416 NR Description: Glycine-rich RNA-binding protein 10
  misc_feature (1)..(110): Homolog of NCBI NO: 15226605 NR Description: glycine-rich RNA binding protein AtGRP7
  misc_feature (1)..(110): Homolog of NCBI NO: 15235002 NR Description: glycine-rich RNA-binding protein 8 (GRP8)
MRDAIEEMNGKELDGRVITVNEAQSRGSGGGGGGRGGSGGGYRSGGGGGYSGGGGGGYSGGGGGGYERRSGGYGSGGGGGGRGYGGGGRREGGGYGGGDGGSYGGGGGGW

SEQ ID NO: 22061 - protein, 103 aa, Arabidopsis thaliana
  peptide (1)..(103): Ceres Seq. ID no. 12653901
  misc_feature (23)..(102): Pfam Name: Herpesvirus large structural phosphoprotein UL32 Pfam Description: Herpesvirus large structural phosphoprotein UL32
  misc_feature (1)..(103): Homolog of NCBI NO: 30681492 NR Description: glycine-rich RNA-binding protein (AtGRP7)
  misc_feature (1)..(102): Homolog of NCBI NO: 34851124 NR Description: putative glycine-rich RNA-binding protein [Prunus
  misc_feature (1)..(95): Homolog of NCBI NO: 544426 NR Description: Glycine-rich RNA-binding protein
  misc_feature (1)..(58): Homolog of NCBI NO: 30692254 NR Description: glycine-rich RNA-binding protein 8 (GRP8) (CCR1)
  misc_feature (1)..(103): Homolog of NCBI NO: 1346180 NR Description: Glycine-rich RNA-binding protein GRP1A
  misc_feature (1)..(103): Homolog of NCBI NO: 21553354 NR Description: glycine-rich RNA binding protein 7 [Arabidopsis
  misc_feature (1)..(103): Homolog of NCBI NO: 1346181 NR Description: Glycine-rich RNA-binding protein GRP2A
  misc_feature (1)..(103): Homolog of NCBI NO: 544416 NR Description: Glycine-rich RNA-binding protein 10
  misc_feature (1)..(103): Homolog of NCBI NO: 15226605 NR Description: glycine-rich RNA binding protein AtGRP7
  misc_feature (1)..(103): Homolog of NCBI NO: 15235002 NR Description: glycine-rich RNA-binding protein 8 (GRP8)
MNGKELDGRVITVNEAQSRGSGGGGGGRGGSGGGYRSGGGGGYSGGGGGGYSGGGGGGYERRSGGYGSGGGGGGRGYGGGGRREGGGYGGGDGGSYGGGGGGW

SEQ ID NO: 22062 - DNA, 1221 bp, Arabidopsis thaliana
  misc_feature (1)..(1221): Ceres Seq. ID no. 12324916
  misc_feature: MA Experiment ID: 108461 Result: Up-regulated in Transcription
  misc_feature: MA Experiment 108461 PARAMETER Experiment Name: At_Germinating_Seeds_cDNA_P Parameter: Age (day) Value: 1 vs. 0
  misc_feature: MA Experiment 108461 PARAMETER Experiment Name: At_Germinating_Seeds_cDNA_P Parameter: Tissue Value: Germinating Seeds
  misc_feature: MA Experiment ID: 108462 Result: Up-regulated in Transcription
  misc_feature: MA Experiment 108462 PARAMETER Experiment Name: At_Germinating_Seeds_cDNA_P Parameter: Age (day) Value: 2 vs. 0
  misc_feature: MA Experiment 108462 PARAMETER Experiment Name: At_Germinating_Seeds_cDNA_P Parameter: Tissue Value: Germinating Seeds
  misc_feature: MA Experiment ID: 108464 Result: Up-regulated in Transcription
  misc_feature: MA Experiment 108464 PARAMETER Experiment Name: At_Germinating_Seeds_cDNA_P Parameter: Age (day) Value: 4 vs. 0
  misc_feature: MA Experiment 108464 PARAMETER Experiment Name: At_Germinating_Seeds_cDNA_P Parameter: Tissue Value: Germinating Seeds
  misc_feature: MA Experiment ID: 108488 Result: Up-regulated in Transcription
  misc_feature: MA Experiment ID: 108489 Result: Down-regulated in Transcription
  misc_feature: MA Experiment ID: 108572 Result: Down-regulated in Transcription
  misc_feature: MA Experiment 108572 PARAMETER Experiment Name: At_Drought_cDNA_P Parameter: Timepoint (hr) Value: 1
  misc_feature: MA Experiment 108572 PARAMETER Experiment Name: At_Drought_cDNA_P Parameter: Tissue Value: Aerial
  misc_feature: MA Experiment 108572 PARAMETER Experiment Name: At_Drought_cDNA_P Parameter: Treatment Value: Drought vs. No Drought
  misc_feature: MA Experiment ID: 108573 Result: Down-regulated in Transcription
  misc_feature: MA Experiment 108573 PARAMETER Experiment Name: At_Drought_cDNA_P Parameter: Timepoint (hr) Value: 6
  misc_feature: MA Experiment 108573 PARAMETER Experiment Name: At_Drought_cDNA_P Parameter: Tissue Value: Aerial
  misc_feature: MA Experiment 108573 PARAMETER Experiment Name: At_Drought_cDNA_P Parameter: Treatment Value: Drought vs. No Drought
  misc_feature: MA Experiment ID: 108576 Result: Down-regulated in Transcription
  misc_feature: MA Experiment 108576 PARAMETER Experiment Name: At_42deg_Heat_cDNA_P Parameter: Temperature (deg C) Value: 42 vs. 22
  misc_feature: MA Experiment 108576 PARAMETER Experiment Name: At_42deg_Heat_cDNA_P Parameter: Timepoint (hr) Value: 1
  misc_feature: MA Experiment 108576 PARAMETER Experiment Name: At_42deg_Heat_cDNA_P Parameter: Tissue Value: Aerial
  misc_feature: MA Experiment ID: 108577 Result: Down-regulated in Transcription
  misc_feature: MA Experiment 108577 PARAMETER Experiment Name: At_42deg_Heat_cDNA_P Parameter: Temperature (deg C) Value: 42 vs. 22
  misc_feature: MA Experiment 108577 PARAMETER Experiment Name: At_42deg_Heat_cDNA_P Parameter: Timepoint (hr) Value: 6
  misc_feature: MA Experiment 108577 PARAMETER Experiment Name: At_42deg_Heat_cDNA_P Parameter: Tissue Value: Aerial
  misc_feature: MA Experiment ID: 108668 Result: Down-regulated in Transcription
  misc_feature: MA Experiment 108668 PARAMETER Experiment Name: At_2mM_SA_cDNA_P Parameter: Plant Line Value: WS
  misc_feature: MA Experiment 108668 PARAMETER Experiment Name: At_2mM_SA_cDNA_P Parameter: Timepoint (hr) Value: 6
  misc_feature: MA Experiment 108668 PARAMETER Experiment Name: At_2mM_SA_cDNA_P Parameter: Treatment Value: 2mM SA vs. No Treatment
  misc_feature: MA Experiment ID: 20000071 Result: Down-regulated in Transcription
  misc_feature: MA Experiment 20000071 PARAMETER Experiment Name: At_100uM_ABA_Mutants_cDNA_P Parameter: Plant Line Value: CS8104
  misc_feature: MA Experiment 20000071 PARAMETER Experiment Name: At_100uM_ABA_Mutants_cDNA_P Parameter: Timepoint (hr) Value: 6
  misc_feature: MA Experiment 20000071 PARAMETER Experiment Name: At_100uM_ABA_Mutants_cDNA_P Parameter: Tissue Value: Aerial
  misc_feature: MA Experiment 20000071 PARAMETER Experiment Name: At_100uM_ABA_Mutants_cDNA_P Parameter: Treatment Value: 100uM ABA vs. No Treatment
  misc_feature: MA Experiment ID: 20000089 Result: Down-regulated in Transcription
  misc_feature: MA Experiment ID: 20000090 Result: Down-regulated in Transcription
  misc_feature: MA Experiment ID: 20000112 Result: Down-regulated in Transcription
  misc_feature: MA Experiment 20000112 PARAMETER Experiment Name: At_42deg_Heat_cDNA_P Parameter: Temperature (deg C) Value: 42 vs. 22
  misc_feature: MA Experiment 20000112 PARAMETER Experiment Name: At_42deg_Heat_cDNA_P Parameter: Timepoint (hr) Value: 2
  misc_feature: MA Experiment 20000112 PARAMETER Experiment Name: At_42deg_Heat_cDNA_P Parameter: Tissue Value: Aerial
  misc_feature: MA Experiment ID: 20000117 Result: Down-regulated in Transcription
  misc_feature: MA Experiment 20000117 PARAMETER Experiment Name: At_100uM_ABA_Mutants_cDNA_P Parameter: Plant Line Value: Columbia
  misc_feature: MA Experiment 20000117 PARAMETER Experiment Name: At_100uM_ABA_Mutants_cDNA_P Parameter: Timepoint (hr) Value: 6
  misc_feature: MA Experiment 20000117 PARAMETER Experiment Name: At_100uM_ABA_Mutants_cDNA_P Parameter: Tissue Value: Aerial
  misc_feature: MA Experiment 20000117 PARAMETER Experiment Name: At_100uM_ABA_Mutants_cDNA_P Parameter: Treatment Value: 100uM ABA vs. No Treatment
  misc_feature: MA Experiment ID: 20000173 Result: Down-regulated in Transcription
  misc_feature: MA Experiment 20000173 PARAMETER Experiment Name: At_42deg_Heat_P Parameter: Age (day) Value: 14
  misc_feature: MA Experiment 20000173 PARAMETER Experiment Name: At_42deg_Heat_P Parameter: Organism Value: A. thaliana
  misc_feature: MA Experiment 20000173 PARAMETER Experiment Name: At_42deg_Heat_P Parameter: Plant Line Value: WS
  misc_feature: MA Experiment 20000173 PARAMETER Experiment Name: At_42deg_Heat_P Parameter: Temperature (deg C) Value: 42 vs. 22
  misc_feature: MA Experiment 20000173 PARAMETER Experiment Name: At_42deg_Heat_P Parameter: Timepoint (hr) Value: 6
  misc_feature: MA Experiment 20000173 PARAMETER Experiment Name: At_42deg_Heat_P Parameter: Tissue Value: Aerial
  misc_feature: MA Experiment ID: 20000179 Result: Up-regulated in Transcription
  misc_feature: MA Experiment 20000179 PARAMETER Experiment Name: At_Germinating_Seeds_P Parameter: Age (hr) Value: 6 vs. 0
  misc_feature: MA Experiment 20000179 PARAMETER Experiment Name: At_Germinating_Seeds_P Parameter: Tissue Value: Germinating Seeds
  misc_feature: MA Experiment ID: 20000182 Result: Down-regulated in Transcription
  misc_feature: MA Experiment 20000182 PARAMETER Experiment Name: At_2mM_SA_P Parameter: Age (day) Value: 14
  misc_feature: MA Experiment 20000182 PARAMETER Experiment Name: At_2mM_SA_P Parameter: Organism Value: A. thaliana
  misc_feature: MA Experiment 20000182 PARAMETER Experiment Name: At_2mM_SA_P Parameter: Plant Line Value: WS
  misc_feature: MA Experiment 20000182 PARAMETER Experiment Name: At_2mM_SA_P Parameter: Timepoint (hr) Value: 6
  misc_feature: MA Experiment 20000182 PARAMETER Experiment Name: At_2mM_SA_P Parameter: Tissue Value: Aerial
  misc_feature: MA Experiment 20000182 PARAMETER Experiment Name: At_2mM_SA_P Parameter: Treatment Value: 2mM SA vs. No Treatment
  misc_feature: MA Experiment ID: 20000184 Result: Up-regulated in Transcription
  misc_feature: MA Experiment 20000184 PARAMETER Experiment Name: At_Shoots__P Parameter: Age (day) Value: 7
  misc_feature: MA Experiment 20000184 PARAMETER Experiment Name: At_Shoots__P Parameter: Tissue Value: Shoots vs. Whole Plant
  misc_feature: MA Experiment ID: 20000224 Result: Down-regulated in Transcription
  misc_feature: MA Experiment ID: 20000227 Result: Down-regulated in Transcription
  misc_feature: MA Experiment 20000227 PARAMETER Experiment Name: At_Root-Tips-vs-Tops_P Parameter: Tissue Value: Root Tips vs. Root Tops
  misc_feature: MA Experiment ID: 20000437 Result: Down-regulated in Transcription
  misc_feature: MA Experiment 20000437 PARAMETER Experiment Name: At_Drought_P Parameter: Age (day) Value: 8
  misc_feature: MA Experiment 20000437 PARAMETER Experiment Name: At_Drought_P Parameter: Organism Value: A. thaliana
  misc_feature: MA Experiment 20000437 PARAMETER Experiment Name: At_Drought_P Parameter: Plant Line Value: WS
  misc_feature: MA Experiment 20000437 PARAMETER Experiment Name: At_Drought_P Parameter: Timepoint (hr) Value: 24
  misc_feature: MA Experiment 20000437 PARAMETER Experiment Name: At_Drought_P Parameter: Tissue Value: Whole Plant
  misc_feature: MA Experiment 20000437 PARAMETER Experiment Name: At_Drought_P Parameter: Treatment Value: Drought vs. No Drought
  misc_feature: MA Experiment ID: 20001247 Result: Up-regulated in Transcription
  misc_feature: MA Experiment 20001247 PARAMETER Experiment Name: At_Far-red-induction_P Parameter: Age (day) Value: 7
  misc_feature: MA Experiment 20001247 PARAMETER Experiment Name: At_Far-red-induction_P Parameter: Light Value: Far-red vs. White
  misc_feature: MA Experiment 20001247 PARAMETER Experiment Name: At_Far-red-induction_P Parameter: Organism Value: A. thaliana
  misc_feature: MA Experiment 20001247 PARAMETER Experiment Name: At_Far-red-induction_P Parameter: Plant Line Value: Columbia
  misc_feature: MA Experiment 20001247 PARAMETER Experiment Name: At_Far-red-induction_P Parameter: Timepoint (hr) Value: 1
  misc_feature: MA Experiment 20001247 PARAMETER Experiment Name: At_Far-red-induction_P Parameter: Tissue Value: Whole Plant
  misc_feature: MA Experiment ID: 20001451 Result: Down-regulated in Transcription
  misc_feature: MA Experiment 20001451 PARAMETER Experiment Name: At_Far-red-induction_P Parameter: Age (day) Value: 7
  misc_feature: MA Experiment 20001451 PARAMETER Experiment Name: At_Far-red-induction_P Parameter: Light Value: Far-red vs. White
  misc_feature: MA Experiment 20001451 PARAMETER Experiment Name: At_Far-red-induction_P Parameter: Organism Value: A. thaliana
  misc_feature: MA Experiment 20001451 PARAMETER Experiment Name: At_Far-red-induction_P Parameter: Plant Line Value: Columbia
  misc_feature: MA Experiment 20001451 PARAMETER Experiment Name: At_Far-red-induction_P Parameter: Timepoint (hr) Value: 24
  misc_feature: MA Experiment 20001451 PARAMETER Experiment Name: At_Far-red-induction_P Parameter: Tissue Value: Whole Plant
  misc_feature: MA Experiment ID: 20001757 Result: Up-regulated in Transcription
  misc_feature: MA Experiment 20001757 PARAMETER Experiment Name: At_50mM_NH4NO3_L-to-H_P Parameter: Timepoint (hr) Value: 6
  misc_feature: MA Experiment 20001757 PARAMETER Experiment Name: At_50mM_NH4NO3_L-to-H_P Parameter: Tissue Value: Leaf
  misc_feature: MA Experiment 20001757 PARAMETER Experiment Name: At_50mM_NH4NO3_L-to-H_P Parameter: Treatment Value: 50mM NH4NO3 vs 100mM Mannitol
  misc_feature: MA Experiment ID: 20001904 Result: Down-regulated in Transcription
  misc_feature: MA Experiment 20001904 PARAMETER Experiment Name: At_Drought_Reproduction_P Parameter: Age (day) Value: 37
  misc_feature: MA Experiment 20001904 PARAMETER Experiment Name: At_Drought_Reproduction_P Parameter: Organism Value: A. thaliana
  misc_feature: MA Experiment 20001904 PARAMETER Experiment Name: At_Drought_Reproduction_P Parameter: Plant Line Value: WS
  misc_feature: MA Experiment 20001904 PARAMETER Experiment Name: At_Drought_Reproduction_P Parameter: Timepoint (day) Value: 7
  misc_feature: MA Experiment 20001904 PARAMETER Experiment Name: At_Drought_Reproduction_P Parameter: Tissue Value: Rosettes
  misc_feature: MA Experiment 20001904 PARAMETER Experiment Name: At_Drought_Reproduction_P Parameter: Treatment Value: Drought vs. No Drought
  misc_feature: MA Experiment ID: 20001905 Result: Down-regulated in Transcription
  misc_feature: MA Experiment 20001905 PARAMETER Experiment Name: At_Drought_Reproduction_P Parameter: Age (day) Value: 40
  misc_feature: MA Experiment 20001905 PARAMETER Experiment Name: At_Drought_Reproduction_P Parameter: Organism Value: A. thaliana
  misc_feature: MA Experiment 20001905 PARAMETER Experiment Name: At_Drought_Reproduction_P Parameter: Plant Line Value: WS
  misc_feature: MA Experiment 20001905 PARAMETER Experiment Name: At_Drought_Reproduction_P Parameter: Timepoint (day) Value: 10
  misc_feature: MA Experiment 20001905 PARAMETER Experiment Name: At_Drought_Reproduction_P Parameter: Tissue Value: Rosettes
  misc_feature: MA Experiment 20001905 PARAMETER Experiment Name: At_Drought_Reproduction_P Parameter: Treatment Value: Drought vs. No Drought
  misc_feature: MA Experiment ID: 20001906 Result: Down-regulated in Transcription
  misc_feature: MA Experiment 20001906 PARAMETER Experiment Name: At_Drought_Reproduction_P Parameter: Age (day) Value: 35
  misc_feature: MA Experiment 20001906 PARAMETER Experiment Name: At_Drought_Reproduction_P Parameter: Organism Value: A. thaliana
  misc_feature: MA Experiment 20001906 PARAMETER Experiment Name: At_Drought_Reproduction_P Parameter: Plant Line Value: WS
  misc_feature: MA Experiment 20001906 PARAMETER Experiment Name: At_Drought_Reproduction_P Parameter: Timepoint (day) Value: 5
  misc_feature: MA Experiment 20001906 PARAMETER Experiment Name: At_Drought_Reproduction_P Parameter: Tissue Value: Siliques
  misc_feature: MA Experiment 20001906 PARAMETER Experiment Name: At_Drought_Reproduction_P Parameter: Treatment Value: Drought vs. No Drought
  misc_feature: MA Experiment ID: 20001911 Result: Down-regulated in Transcription
  misc_feature: MA Experiment 20001911 PARAMETER Experiment Name: At_Drought_Reproduction_P Parameter: Age (day) Value: 40
  misc_feature: MA Experiment 20001911 PARAMETER Experiment Name: At_Drought_Reproduction_P Parameter: Organism Value: A. thaliana
  misc_feature: MA Experiment 20001911 PARAMETER Experiment Name: At_Drought_Reproduction_P Parameter: Plant Line Value: WS
  misc_feature: MA Experiment 20001911 PARAMETER Experiment Name: At_Drought_Reproduction_P Parameter: Timepoint (day) Value: 10
  misc_feature: MA Experiment 20001911 PARAMETER Experiment Name: At_Drought_Reproduction_P Parameter: Tissue Value: Flowers
  misc_feature: MA Experiment 20001911 PARAMETER Experiment Name: At_Drought_Reproduction_P Parameter: Treatment Value: Drought vs. No Drought
aatcaacacacacaaacacacacacacacagcctttttccttcgttgatcgattgttaagctcgatccaatggcggataacaccgataatcggagatccttatggggagttccggagaagcttcagcttcacatagcgatgctgacgttgcaattcggttacgccggattccacgtggtgtctcgagctgctcttaacatgggaatcagcaaactcgtcttccctgtttatcgtaacatcatcgccttgcttcttctccttcccttcgcttacttccttgaaaagaaggagagaccagcgattactctcaactttctcatccagttcttctttttggcactcataggaataacagcgaggctctcggttacgtcttacacttgtttcttcggaatcattcagttcttgatcattgctgctttctgtgaaagagattctcaggcttgggtttttcactccggttgggagcttttcaccatcctctacgccggaatcgtagcgtctggaatcgcgtttgcggttcagatttggtgtattgacagagggggtccagtcttcgttgctgtttaccagcctgttcagactcttgtcgttgcgatcatggcttctattgcgttaggcgaagaattttatttgggcgggattattggagcggtcttgatcatagcgggactttacttcgtattgtacggtaagagcgaagagaggaaatttgcagcgcttgagaaggcagagatccagtcctccgcggagcatggtattgaacgtgcacctgtttctcgcaactccatcaagtcgtccatcacaacaccactactccatcagtcaacggacaatgtttgactactttggacaaatcactctccagctaataattacaaatgccattacccaattaaaagggaacaatggtgtgccgttgtgttttatgacttttgtgtctgctttttttcttagtgttttctcttcttttttttttctaaaaaattattaattacctaagaaaggtttttgaagaaaggaaaaaaaaatggtggatgagacatcattgttcatgaggatgatgatgatgatgatagtgatgaagaagactatgtgggagctttggattgagacttttctatatataatatctggctgatatattagtgccattttttcttacatttcttgtggggttnttctttcctttatcatcaatagaatgttataatttgcatc

SEQ ID NO: 22063 - protein, 257 aa, Arabidopsis thaliana
  peptide (1)..(257): Ceres Seq. ID no. 12324917
  misc_feature (96)..(207): Pfam Name: Integral membrane protein DUF6 Pfam Description: Integral membrane protein DUF6
  misc_feature (96)..(250): Homolog of NCBI NO: 18409794 NR Description: putative protein
  misc_feature (14)..(96): Homolog of NCBI NO: 15229596 NR Description: integral membrane protein, putative; protein id:
  misc_feature (14)..(96): Homolog of NCBI NO: 9294076 NR Description: nodulin-like protein [Arabidopsis thaliana]
  misc_feature (96)..(240): Homolog of NCBI NO: 15229596 NR Description: integral membrane protein, putative; protein id:
  misc_feature (96)..(240): Homolog of NCBI NO: 9294076 NR Description: nodulin-like protein [Arabidopsis thaliana]
  misc_feature (16)..(96): Homolog of NCBI NO: 34895316 NR Description: putative nodulin [Oryza sativa (japonica
  misc_feature (96)..(249): Homolog of NCBI NO: 34895316 NR Description: putative nodulin [Oryza sativa (japonica
  misc_feature (96)..(257): Homolog of NCBI NO: 25404978 NR Description: protein F10A5.28 [imported] - Arabidopsis
  misc_feature (1)..(96): Homolog of NCBI NO: 18410867 NR Description: nodulin-like protein
  misc_feature (96)..(257): Homolog of NCBI NO: 18410867 NR Description: nodulin-like protein
MADNTDNRRSLWGVPEKLQLHIAMLTLQFGYAGFHVVSRAALNMGISKLVFPVYRNIIALLLLLPFAYFLEKKERPAITLNFLIQFFFLALIGITARLSVTSYTCFFGIIQFLIIAAFCERDSQAWVFHSGWELFTILYAGIVASGIAFAVQIWCIDRGGPVFVAVYQPVQTLVVAIMASIALGEEFYLGGIIGAVLIIAGLYFVLYGKSEERKFAALEKAEIQSSAEHGIERAPVSRNSIKSSITTPLLHQSTDNV

SEQ ID NO: 22064 - protein, 234 aa, Arabidopsis thaliana
  peptide (1)..(234): Ceres Seq. ID no. 12324918
  misc_feature (73)..(184): Pfam Name: Integral membrane protein DUF6 Pfam Description: Integral membrane protein DUF6
  misc_feature (73)..(227): Homolog of NCBI NO: 18409794 NR Description: putative protein
  misc_feature (1)..(73): Homolog of NCBI NO: 15229596 NR Description: integral membrane protein, putative; protein id:
  misc_feature (1)..(73): Homolog of NCBI NO: 9294076 NR Description: nodulin-like protein [Arabidopsis thaliana]
  misc_feature (73)..(217): Homolog of NCBI NO: 15229596 NR Description: integral membrane protein, putative; protein id:
  misc_feature (73)..(217): Homolog of NCBI NO: 9294076 NR Description: nodulin-like protein [Arabidopsis thaliana]
  misc_feature (1)..(73): Homolog of NCBI NO: 34895316 NR Description: putative nodulin [Oryza sativa (japonica
  misc_feature (73)..(226): Homolog of NCBI NO: 34895316 NR Description: putative nodulin [Oryza sativa (japonica
  misc_feature (73)..(234): Homolog of NCBI NO: 25404978 NR Description: protein F10A5.28 [imported] - Arabidopsis
  misc_feature (1)..(73): Homolog of NCBI NO: 18410867 NR Description: nodulin-like protein
  misc_feature (73)..(234): Homolog of NCBI NO: 18410867 NR Description: nodulin-like protein
MLTLQFGYAGFHVVSRAALNMGISKLVFPVYRNIIALLLLLPFAYFLEKKERPAITLNFLIQFFFLALIGITARLSVTSYTCFFGIIQFLIIAAFCERDSQAWVFHSGWELFTILYAGIVASGIAFAVQIWCIDRGGPVFVAVYQPVQTLVVAIMASIALGEEFYLGGIIGAVLIIAGLYFVLYGKSEERKFAALEKAEIQSSAEHGIERAPVSRNSIKSSITTPLLHQSTDNV

SEQ ID NO: 22065 - protein, 214 aa, Arabidopsis thaliana
  peptide (1)..(214): Ceres Seq. ID no. 12324919
  misc_feature (53)..(164): Pfam Name: Integral membrane protein DUF6 Pfam Description: Integral membrane protein DUF6
  misc_feature (53)..(207): Homolog of NCBI NO: 18409794 NR Description: putative protein
  misc_feature (1)..(53): Homolog of NCBI NO: 15229596 NR Description: integral membrane protein, putative; protein id:
  misc_feature (1)..(53): Homolog of NCBI NO: 9294076 NR Description: nodulin-like protein [Arabidopsis thaliana]
  misc_feature (53)..(197): Homolog of NCBI NO: 15229596 NR Description: integral membrane protein, putative; protein id:
  misc_feature (53)..(197): Homolog of NCBI NO: 9294076 NR Description: nodulin-like protein [Arabidopsis thaliana]
  misc_feature (1)..(53): Homolog of NCBI NO: 34895316 NR Description: putative nodulin [Oryza sativa (japonica
  misc_feature (53)..(206): Homolog of NCBI NO: 34895316 NR Description: putative nodulin [Oryza sativa (japonica
  misc_feature (53)..(214): Homolog of NCBI NO: 25404978 NR Description: protein F10A5.28 [imported] - Arabidopsis
  misc_feature (1)..(53): Homolog of NCBI NO: 18410867 NR Description: nodulin-like protein
  misc_feature (53)..(214): Homolog of NCBI NO: 18410867 NR Description: nodulin-like protein
MGISKLVFPVYRNIIALLLLLPFAYFLEKKERPAITLNFLIQFFFLALIGITARLSVTSYTCFFGIIQFLIIAAFCERDSQAWVFHSGWELFTILYAGIVASGIAFAVQIWCIDRGGPVFVAVYQPVQTLVVAIMASIALGEEFYLGGIIGAVLIIAGLYFVLYGKSEERKFAALEKAEIQSSAEHGIERAPVSRNSIKSSITTPLLHQSTDNV

SEQ ID NO: 22066 - DNA, 1224 bp, Arabidopsis thaliana
  misc_feature (1)..(1224): Ceres Seq. ID no. 13500056
  misc_feature: MA Experiment ID: 20000111 Result: Down-regulated in Transcription
  misc_feature: MA Experiment 20000111 PARAMETER Experiment Name: At_42deg_Heat_cDNA_P Parameter: Temperature (deg C) Value: 42 vs. 22
  misc_feature: MA Experiment 20000111 PARAMETER Experiment Name: At_42deg_Heat_cDNA_P Parameter: Timepoint (hr) Value: 6
  misc_feature: MA Experiment 20000111 PARAMETER Experiment Name: At_42deg_Heat_cDNA_P Parameter: Tissue Value: Aerial
aaaagagcaaagggaacgataccattagtcccaataccaatccttgcaaaattcaaactcaaacaaaccgtttatctcacgcgccgccgtactcgccacgatccgtctttggagaccaatttatggagccgccgaagggagataccgtagtgaagactgaggtcccggtgaaggatccatcgctaagcgtcgtcgattcgaaaacgaagggagtcgaggatgcgaacactgagatagccttgtccgatgaggttgaaatcgagacgaagggaagcgattcgacaccggtgaaagctccgagtcgaacatcgtctggatcgaagaaatctgtacattggagccccgaattggtgtctggatctcaggaaccggatcagaaagctgcatcgtcttcttcggctggatctaatccgtatattgctcgttctccagctgagacttcagatgcttcgttgaaagatacgatggagactgtgaaaggagtgcttggtagatggggaaagagggttgcagaagcagcaaagaagacggagagccttgccgggaacacatggcaacacctgagaactgctccgagttttgcggatgctgcaatgggaagaattgcacagagtacaaaggtctttgcagaaggaggatatgagaagatattccgacaaacctttgagacagatcccgaagaacagttgctaaattcttttgcatgttacttgtcaacatcagctggcctagttatgggagttctatatatatccagtgccaaacttgcttactgtagtgacaaccctctctcctataaaaacggtgatcaaaccgaatggagctattacaaggtagtaattccattacatcaacttaaagcagtgaatccatcagcgagcatagtcaatcctgcagagaagtacatacaggtgatttcggtagacaatcatgagttttggttcatgggttttttaaactacgacggcgctgtcacgtctctgcaagattctttgcaagccggtgctttaaggtcggtgtgatacataactggatgactgatgaccataaaagcatgttgatctccacctcttcttgcttagtcatatcagaagactcaaatttttacattattttgcatttaatctcaatatcctatttactacagaaactagctgaattttacaaatttactttaaaatgttttatcttttgatatttttatgagaagacagcttaattgcg

SEQ ID NO: 22067 - protein, 339 aa, Arabidopsis thaliana
  peptide (1)..(339): Ceres Seq. ID no. 13500057
  misc_feature (215)..(292): Pfam Name: GRAM domain Pfam Description: GRAM domain
  misc_feature (41)..(339): Homolog of NCBI NO: 21592789 NR Description: unknown [Arabidopsis thaliana]
  misc_feature (41)..(339): Homolog of NCBI NO: 18399985 NR Description: GRAM domain-containing protein [Arabidopsis
  misc_feature (131)..(335): Homolog of NCBI NO: 29788871 NR Description: putative ABA-responsive protein
  misc_feature (123)..(333): Homolog of NCBI NO: 15217869 NR Description: GRAM domain-containing protein [Arabidopsis
  misc_feature (278)..(335): Homolog of NCBI NO: 15236123 NR Description: GRAM domain-containing protein [Arabidopsis
  misc_feature (107)..(250): Homolog of NCBI NO: 15236123 NR Description: GRAM domain-containing protein [Arabidopsis
  misc_feature (90)..(338): Homolog of NCBI NO: 34902414 NR Description: Putative FH protein interacting protein FIP1
  misc_feature (156)..(334): Homolog of NCBI NO: 34906818 NR Description: contains EST C91668(E31216)~similar to FH protein
  misc_feature (198)..(334): Homolog of NCBI NO: 33146631 NR Description: putative FH protein interacting protein FIP1
  misc_feature (41)..(339): Homolog of NCBI NO: 26452129 NR Description: unknown protein [Arabidopsis thaliana]
KSKGNDTISPNTNPCKIQTQTNRLSHAPPYSPRSVFGDQFMEPPKGDTVVKTEVPVKDPSLSVVDSKTKGVEDANTEIALSDEVEIETKGSDSTPVKAPSRTSSGSKKSVHWSPELVSGSQEPDQKAASSSSAGSNPYIARSPAETSDASLKDTMETVKGVLGRWGKRVAEAAKKTESLAGNTWQHLRTAPSFADAAMGRIAQSTKVFAEGGYEKIFRQTFETDPEEQLLNSFACYLSTSAGLVMGVLYISSAKLAYCSDNPLSYKNGDQTEWSYYKVVIPLHQLKAVNPSASIVNPAEKYIQVISVDNHEFWFMGFLNYDGAVTSLQDSLQAGALRSV

SEQ ID NO: 22068 - protein, 299 aa, Arabidopsis thaliana
  peptide (1)..(299): Ceres Seq. ID no. 13500058
  misc_feature (175)..(252): Pfam Name: GRAM domain Pfam Description: GRAM domain
  misc_feature (158)..(294): Homolog of NCBI NO: 33146631 NR Description: putative FH protein interacting protein FIP1
  misc_feature (91)..(295): Homolog of NCBI NO: 29788871 NR Description: putative ABA-responsive protein
  misc_feature (116)..(294): Homolog of NCBI NO: 34906818 NR Description: contains EST C91668(E31216)~similar to FH protein
  misc_feature (83)..(293): Homolog of NCBI NO: 15217869 NR Description: GRAM domain-containing protein [Arabidopsis
  misc_feature (50)..(298): Homolog of NCBI NO: 34902414 NR Description: Putative FH protein interacting protein FIP1
  misc_feature (238)..(295): Homolog of NCBI NO: 15236123 NR Description: GRAM domain-containing protein [Arabidopsis
  misc_feature (67)..(210): Homolog of NCBI NO: 15236123 NR Description: GRAM domain-containing protein [Arabidopsis
  misc_feature (1)..(299): Homolog of NCBI NO: 21592789 NR Description: unknown [Arabidopsis thaliana]
  misc_feature (1)..(299): Homolog of NCBI NO: 18399985 NR Description: GRAM domain-containing protein [Arabidopsis
  misc_feature (1)..(299): Homolog of NCBI NO: 26452129 NR Description: unknown protein [Arabidopsis thaliana]
MEPPKGDTVVKTEVPVKDPSLSVVDSKTKGVEDANTEIALSDEVEIETKGSDSTPVKAPSRTSSGSKKSVHWSPELVSGSQEPDQKAASSSSAGSNPYIARSPAETSDASLKDTMETVKGVLGRWGKRVAEAAKKTESLAGNTWQHLRTAPSFADAAMGRIAQSTKVFAEGGYEKIFRQTFETDPEEQLLNSFACYLSTSAGLVMGVLYISSAKLAYCSDNPLSYKNGDQTEWSYYKVVIPLHQLKAVNPSASIVNPAEKYIQVISVDNHEFWFMGFLNYDGAVTSLQDSLQAGALRSV

SEQ ID NO: 22069 - protein, 185 aa, Arabidopsis thaliana
  peptide (1)..(185): Ceres Seq. ID no. 13500059
  misc_feature (61)..(138): Pfam Name: GRAM domain Pfam Description: GRAM domain
  misc_feature (44)..(180): Homolog of NCBI NO: 33146631 NR Description: putative FH protein interacting protein FIP1
  misc_feature (1)..(181): Homolog of NCBI NO: 29788871 NR Description: putative ABA-responsive protein
  misc_feature (2)..(180): Homolog of NCBI NO: 34906818 NR Description: contains EST C91668(E31216)~similar to FH protein
  misc_feature (1)..(179): Homolog of NCBI NO: 15217869 NR Description: GRAM domain-containing protein [Arabidopsis
  misc_feature (1)..(184): Homolog of NCBI NO: 34902414 NR Description: Putative FH protein interacting protein FIP1
  misc_feature (124)..(181): Homolog of NCBI NO: 15236123 NR Description: GRAM domain-containing protein [Arabidopsis
  misc_feature (1)..(96): Homolog of NCBI NO: 15236123 NR Description: GRAM domain-containing protein [Arabidopsis
  misc_feature (1)..(185): Homolog of NCBI NO: 21592789 NR Description: unknown [Arabidopsis thaliana]
  misc_feature (1)..(185): Homolog of NCBI NO: 18399985 NR Description: GRAM domain-containing protein [Arabidopsis
  misc_feature (1)..(185): Homolog of NCBI NO: 26452129 NR Description: unknown protein [Arabidopsis thaliana]
METVKGVLGRWGKRVAEAAKKTESLAGNTWQHLRTAPSFADAAMGRIAQSTKVFAEGGYEKIFRQTFETDPEEQLLNSFACYLSTSAGLVMGVLYISSAKLAYCSDNPLSYKNGDQTEWSYYKVVIPLHQLKAVNPSASIVNPAEKYIQVISVDNHEFWFMGFLNYDGAVTSLQDSLQAGALRSV

SEQ ID NO: 22070 - DNA, 1696 bp, Arabidopsis thaliana
  misc_feature (1)..(1696): Ceres Seq. ID no. 12371981
  misc_feature: MA Experiment ID: 108434 Result: Down-regulated in Transcription
  misc_feature: MA Experiment 108434 PARAMETER Experiment Name: At_Root_Tips_cDNA_P Parameter: Tissue Value: Root Tips
  misc_feature: MA Experiment ID: 108435 Result: Down-regulated in Transcription
  misc_feature: MA Experiment 108435 PARAMETER Experiment Name: At_stm_Mutants_cDNA_P Parameter: Plant Line Value: wt Landsburg vs stm
  misc_feature: MA Experiment 108435 PARAMETER Experiment Name: At_stm_Mutants_cDNA_P Parameter: Tissue Value: Shoot Apical Meristem Region
  misc_feature: MA Experiment ID: 20000111 Result: Down-regulated in Transcription
  misc_feature: MA Experiment 20000111 PARAMETER Experiment Name: At_42deg_Heat_cDNA_P Parameter: Temperature (deg C) Value: 42 vs. 22
  misc_feature: MA Experiment 20000111 PARAMETER Experiment Name: At_42deg_Heat_cDNA_P Parameter: Timepoint (hr) Value: 6
  misc_feature: MA Experiment 20000111 PARAMETER Experiment Name: At_42deg_Heat_cDNA_P Parameter: Tissue Value: Aerial
  misc_feature: MA Experiment ID: 20000113 Result: Down-regulated in Transcription
  misc_feature: MA Experiment 20000113 PARAMETER Experiment Name: At_42deg_Heat_cDNA_P Parameter: Temperature (deg C) Value: 42 vs. 22
  misc_feature: MA Experiment 20000113 PARAMETER Experiment Name: At_42deg_Heat_cDNA_P Parameter: Timepoint (hr) Value: 8
  misc_feature: MA Experiment 20000113 PARAMETER Experiment Name: At_42deg_Heat_cDNA_P Parameter: Tissue Value: Aerial
  misc_feature: MA Experiment ID: 20000173 Result: Down-regulated in Transcription
  misc_feature: MA Experiment 20000173 PARAMETER Experiment Name: At_42deg_Heat_P Parameter: Age (day) Value: 14
  misc_feature: MA Experiment 20000173 PARAMETER Experiment Name: At_42deg_Heat_P Parameter: Organism Value: A. thaliana
  misc_feature: MA Experiment 20000173 PARAMETER Experiment Name: At_42deg_Heat_P Parameter: Plant Line Value: WS
  misc_feature: MA Experiment 20000173 PARAMETER Experiment Name: At_42deg_Heat_P Parameter: Temperature (deg C) Value: 42 vs. 22
  misc_feature: MA Experiment 20000173 PARAMETER Experiment Name: At_42deg_Heat_P Parameter: Timepoint (hr) Value: 6
  misc_feature: MA Experiment 20000173 PARAMETER Experiment Name: At_42deg_Heat_P Parameter: Tissue Value: Aerial
  misc_feature: MA Experiment ID: 20000224 Result: Up-regulated in Transcription
  misc_feature: MA Experiment ID: 20000264 Result: Down-regulated in Transcription
  misc_feature: MA Experiment 20000264 PARAMETER Experiment Name: At_Open_Flower_P Parameter: Age (day) Value: 21
  misc_feature: MA Experiment 20000264 PARAMETER Experiment Name: At_Open_Flower_P Parameter: Plant Line Value: WS
  misc_feature: MA Experiment 20000264 PARAMETER Experiment Name: At_Open_Flower_P Parameter: Tissue Value: Open Flower vs. Whole Plant
  misc_feature: MA Experiment ID: 20000437 Result: Up-regulated in Transcription
  misc_feature: MA Experiment 20000437 PARAMETER Experiment Name: At_Drought_P Parameter: Age (day) Value: 8
  misc_feature: MA Experiment 20000437 PARAMETER Experiment Name: At_Drought_P Parameter: Organism Value: A. thaliana
  misc_feature: MA Experiment 20000437 PARAMETER Experiment Name: At_Drought_P Parameter: Plant Line Value: WS
  misc_feature: MA Experiment 20000437 PARAMETER Experiment Name: At_Drought_P Parameter: Timepoint (hr) Value: 24
  misc_feature: MA Experiment 20000437 PARAMETER Experiment Name: At_Drought_P Parameter: Tissue Value: Whole Plant
  misc_feature: MA Experiment 20000437 PARAMETER Experiment Name: At_Drought_P Parameter: Treatment Value: Drought vs. No Drought
  misc_feature: MA Experiment ID: 20000496 Result: Down-regulated in Transcription
  misc_feature: MA Experiment 20000496 PARAMETER Experiment Name: At_Guard_Cells_P Parameter: Harvest Date Value: 7/19/2002
  misc_feature: MA Experiment 20000496 PARAMETER Experiment Name: At_Guard_Cells_P Parameter: Organism Value: Canola
  misc_feature: MA Experiment 20000496 PARAMETER Experiment Name: At_Guard_Cells_P Parameter: Tissue Value: Guard Cells vs. Leaves
  misc_feature: MA Experiment ID: 20000709 Result: Up-regulated in Transcription
  misc_feature: MA Experiment 20000709 PARAMETER Experiment Name: At_15mM_NH4NO3_L-to-H_P Parameter: Age (hr) Value: 14
  misc_feature: MA Experiment 20000709 PARAMETER Experiment Name: At_15mM_NH4NO3_L-to-H_P Parameter: Organism Value: A. thaliana
  misc_feature: MA Experiment 20000709 PARAMETER Experiment Name: At_15mM_NH4NO3_L-to-H_P Parameter: Plant Line Value: WS
  misc_feature: MA Experiment 20000709 PARAMETER Experiment Name: At_15mM_NH4NO3_L-to-H_P Parameter: Timepoint (hr) Value: 4
  misc_feature: MA Experiment 20000709 PARAMETER Experiment Name: At_15mM_NH4NO3_L-to-H_P Parameter: Tissue Value: Aerial
  misc_feature: MA Experiment 20000709 PARAMETER Experiment Name: At_15mM_NH4NO3_L-to-H_P Parameter: Treatment Value: 15mM NH4NO3 vs. 30mM Mannitol
  misc_feature: MA Experiment ID: 20000794 Result: Down-regulated in Transcription
  misc_feature: MA Experiment 20000794 PARAMETER Experiment Name: At_Petals_P Parameter: Age (day) Value: 23-25 days
  misc_feature: MA Experiment 20000794 PARAMETER Experiment Name: At_Petals_P Parameter: Plant Line Value: WS
  misc_feature: MA Experiment 20000794 PARAMETER Experiment Name: At_Petals_P Parameter: Tissue Value: Petals vs. Whole plant
  misc_feature: MA Experiment ID: 20001911 Result: Up-regulated in Transcription
  misc_feature: MA Experiment 20001911 PARAMETER Experiment Name: At_Drought_Reproduction_P Parameter: Age (day) Value: 40
  misc_feature: MA Experiment 20001911 PARAMETER Experiment Name: At_Drought_Reproduction_P Parameter: Organism Value: A. thaliana
  misc_feature: MA Experiment 20001911 PARAMETER Experiment Name: At_Drought_Reproduction_P Parameter: Plant Line Value: WS
  misc_feature: MA Experiment 20001911 PARAMETER Experiment Name: At_Drought_Reproduction_P Parameter: Timepoint (day) Value: 10
  misc_feature: MA Experiment 20001911 PARAMETER Experiment Name: At_Drought_Reproduction_P Parameter: Tissue Value: Flowers
  misc_feature: MA Experiment 20001911 PARAMETER Experiment Name: At_Drought_Reproduction_P Parameter: Treatment Value: Drought vs. No Drought
  misc_feature: Phenotype: WHOLE PLANT Size-Small
  misc_feature: Phenotype: WHOLE PLANT Size-Small
  misc_feature: Phenotype: WHOLE PLANT Size-Small
  misc_feature: Phenotype: WHOLE PLANT Size-Small
  misc_feature: Phenotype: WHOLE PLANT Size-Small
atcctgagaatggtcacaaattctctacctctctctctctctctctctggtagagaaaatggagatatcagttgcatcggtaacagtttctgtagctgtagttgttgtgtcatggtgggtatggagaactttacagtgggtttggcttaaaccaaagatgcttgagagttacctgagaagacaaggtcttgccggaactccttacacgcctcttgtcggtgatttgaagagaaattttagcatgctggctgaggcaagatccaaacccatcaacctaacagatgatatcacaccacgtatcgtgccttatccgttgcaaatgctcaagactcatgggaggactttctttacatggtttggacccataccaacaatcaccataatggatcctgagcaaatcaaagaagtgttcaacaaagtttatgatttccagaaggcacatacgtttcctctgggcagattaatagcggctggactcgttagttatgatggtgataaatggacaaaacaccgaagaatcatcaacccggctttccaccttgagaagatcaaaaatatggtacctgcgttccaccagagctgcagcgagattgttggcgaatgggacaagttagtgacggataaacagtcatcctgtgaggtggatatttggccttggcttgtgagtatgactgcagatgtgatctcccgtactgcatttggcagcagctacaaagaagggcagaggatatttgagctccaagcggaattagcacagctcatcattcaagcttttcggaaagctattatccctggatatcgttatcttcctacaaagggtaatagaaggatgaaagcagcagctagagaaatcaaatttatactgagagggatcgttaacaaaaggcttagggcaagagacctggggaagcaccaagtgacgatttgctgggtatacttcttgaatcgaatttgggacaaacaaaaggaaatggaatgagtaccgaggaactgatggaggagtgcaagttgttctatttcgctgggcaagagactactacagtacttctggtttggacaatggtgttgttaagccaacaccaagattggcaggctcgtgcaagagaagaagtgaagcaagtttttggcgataaagaacctgatgcagaaggcttgaaccagctcaaagttgtaagtaaaccgaaccaaaaaccttcaagtgacgtgagttctttcgttgcattgaagctgaaagatttgatccctcacagatgacgatgatattatatgaagtccttaggctatatcctccagtagtccagctgacccgagccattcacaaagagatgcagctaggtgacctgacactaccaggcggcgttcagataagtctaccaattctgctaatccaacgcgacagggagctgtggggaaacgatgcaggggagttcaagccagatagattcaaagacggtctctcaaaggcaacaaagaaccaagtctccttctttccttttgcgtggggaccgaggatctgcattggccaaaattttgcactgcttgaggcaaagatggcaatgacactgattctacggaaattctcctttgagctttctccttcttatgtttcacgcgccttacacagtcctcactactcacccacagttcggtgctcctctcatcttgcacaagctctaatcgtataaaccccttgttc

SEQ ID NO: 22071 - protein, 306 aa, Arabidopsis thaliana
  peptide (1)..(306): Ceres Seq. ID no. 12371982
  misc_feature (90)..(284): Pfam Name: Cytochrome P450 Pfam Description: Cytochrome P450
  misc_feature (1)..(56): Homolog of NCBI NO: 9294385 NR Description: cytochrome P450-like protein [Arabidopsis
  misc_feature (114)..(284): Homolog of NCBI NO: 9294385 NR Description: cytochrome P450-like protein [Arabidopsis
  misc_feature (1)..(284): Homolog of NCBI NO: 15231897 NR Description: cytochrome P450, putative; protein id:
  misc_feature (5)..(284): Homolog of NCBI NO: 15231889 NR Description: cytochrome P450, putative
  misc_feature (1)..(284): Homolog of NCBI NO: 9294386 NR Description: cytochrome P450 [Arabidopsis thaliana]
  misc_feature (1)..(284): Homolog of NCBI NO: 15231899 NR Description: cytochrome P450, putative; protein id:
  misc_feature (1)..(284): Homolog of NCBI NO: 15231906 NR Description: cytochrome P450, putative
  misc_feature (1)..(284): Homolog of NCBI NO: 15231907 NR Description: cytochrome P450, putative
  misc_feature (1)..(284): Homolog of NCBI NO: 15231901 NR Description: cytochrome P450, putative; protein id:
  misc_feature (1)..(284): Homolog of NCBI NO: 15231903 NR Description: cytochrome P450, putative
MEISVASVTVSVAVVVVSWWVWRTLQWVWLKPKMLESYLRRQGLAGTPYTPLVGDLKRNFSMLAEARSKPINLTDDITPRIVPYPLQMLKTHGRTFFTWFGPIPTITIMDPEQIKEVFNKVYDFQKAHTFPLGRLIAAGLVSYDGDKWTKHRRIINPAFHLEKIKNMVPAFHQSCSEIVGEWDKLVTDKQSSCEVDIWPWLVSMTADVISRTAFGSSYKEGQRIFELQAELAQLIIQAFRKAIIPGYRYLPTKGNRRMKAAAREIKFILRGIVNKRLRARDLGKHQVTICWVYFLNRIWDKQKEME

SEQ ID NO: 22072 - protein, 273 aa, Arabidopsis thaliana
  peptide (1)..(273): Ceres Seq. ID no. 12371983
  misc_feature (57)..(251): Pfam Name: Cytochrome P450 Pfam Description: Cytochrome P450
  misc_feature (1)..(23): Homolog of NCBI NO: 9294385 NR Description: cytochrome P450-like protein [Arabidopsis
  misc_feature (81)..(251): Homolog of NCBI NO: 9294385 NR Description: cytochrome P450-like protein [Arabidopsis
  misc_feature (1)..(251): Homolog of NCBI NO: 15231897 NR Description: cytochrome P450, putative; protein id:
  misc_feature (1)..(251): Homolog of NCBI NO: 15231889 NR Description: cytochrome P450, putative
  misc_feature (1)..(251): Homolog of NCBI NO: 9294386 NR Description: cytochrome P450 [Arabidopsis thaliana]
  misc_feature (1)..(251): Homolog of NCBI NO: 15231899 NR Description: cytochrome P450, putative; protein id:
  misc_feature (1)..(251): Homolog of NCBI NO: 15231906 NR Description: cytochrome P450, putative
  misc_feature (1)..(251): Homolog of NCBI NO: 15231907 NR Description: cytochrome P450, putative
  misc_feature (1)..(251): Homolog of NCBI NO: 15231901 NR Description: cytochrome P450, putative; protein id:
  misc_feature (1)..(251): Homolog of NCBI NO: 15231903 NR Description: cytochrome P450, putative
MLESYLRRQGLAGTPYTPLVGDLKRNFSMLAEARSKPINLTDDITPRIVPYPLQMLKTHGRTFFTWFGPIPTITIMDPEQIKEVFNKVYDFQKAHTFPLGRLIAAGLVSYDGDKWTKHRRIINPAFHLEKIKNMVPAFHQSCSEIVGEWDKLVTDKQSSCEVDIWPWLVSMTADVISRTAFGSSYKEGQRIFELQAELAQLIIQAFRKAIIPGYRYLPTKGNRRMKAAAREIKFILRGIVNKRLRARDLGKHQVTICWVYFLNRIWDKQKEME

SEQ ID NO: 22073 - protein, 245 aa, Arabidopsis thaliana
  peptide (1)..(245): Ceres Seq. ID no. 12371984
  misc_feature (29)..(223): Pfam Name: Cytochrome P450 Pfam Description: Cytochrome P450
  misc_feature (1)..(223): Homolog of NCBI NO: 15231895 NR Description: cytochrome P450, putative
  misc_feature (53)..(223): Homolog of NCBI NO: 9294385 NR Description: cytochrome P450-like protein [Arabidopsis
  misc_feature (1)..(223): Homolog of NCBI NO: 15231897 NR Description: cytochrome P450, putative; protein id:
  misc_feature (1)..(223): Homolog of NCBI NO: 15231889 NR Description: cytochrome P450, putative
  misc_feature (1)..(223): Homolog of NCBI NO: 9294386 NR Description: cytochrome P450 [Arabidopsis thaliana]
  misc_feature (1)..(223): Homolog of NCBI NO: 15231899 NR Description: cytochrome P450, putative; protein id:
  misc_feature (1)..(223): Homolog of NCBI NO: 15231906 NR Description: cytochrome P450, putative
  misc_feature (1)..(223): Homolog of NCBI NO: 15231907 NR Description: cytochrome P450, putative
  misc_feature (1)..(223): Homolog of NCBI NO: 15231901 NR Description: cytochrome P450, putative; protein id:
  misc_feature (1)..(223): Homolog of NCBI NO: 15231903 NR Description: cytochrome P450, putative
MLAEARSKPINLTDDITPRIVPYPLQMLKTHGRTFFTWFGPIPTITIMDPEQIKEVFNKVYDFQKAHTFPLGRLIAAGLVSYDGDKWTKHRRIINPAFHLEKIKNMVPAFHQSCSEIVGEWDKLVTDKQSSCEVDIWPWLVSMTADVISRTAFGSSYKEGQRIFELQAELAQLIIQAFRKAIIPGYRYLPTKGNRRMKAAAREIKFILRGIVNKRLRARDLGKHQVTICWVYFLNRIWDKQKEME

SEQ ID NO: 22074 - DNA, 1034 bp, Arabidopsis thaliana
  misc_feature (1)..(1034): Ceres Seq. ID no. 12338375
  misc_feature: MA Experiment ID: 108462 Result: Down-regulated in Transcription
  misc_feature: MA Experiment 108462 PARAMETER Experiment Name: At_Germinating_Seeds_cDNA_P Parameter: Age (day) Value: 2 vs. 0
  misc_feature: MA Experiment 108462 PARAMETER Experiment Name: At_Germinating_Seeds_cDNA_P Parameter: Tissue Value: Germinating Seeds
  misc_feature: MA Experiment ID: 108464 Result: Down-regulated in Transcription
  misc_feature: MA Experiment 108464 PARAMETER Experiment Name: At_Germinating_Seeds_cDNA_P Parameter: Age (day) Value: 4 vs. 0
  misc_feature: MA Experiment 108464 PARAMETER Experiment Name: At_Germinating_Seeds_cDNA_P Parameter: Tissue Value: Germinating Seeds
  misc_feature: MA Experiment ID: 108488 Result: Up-regulated in Transcription
  misc_feature: MA Experiment ID: 20000069 Result: Up-regulated in Transcription
  misc_feature: MA Experiment 20000069 PARAMETER Experiment Name: At_100uM_ABA_Mutants_cDNA_P Parameter: Plant Line Value: CS23
  misc_feature: MA Experiment 20000069 PARAMETER Experiment Name: At_100uM_ABA_Mutants_cDNA_P Parameter: Timepoint (hr) Value: 6
  misc_feature: MA Experiment 20000069 PARAMETER Experiment Name: At_100uM_ABA_Mutants_cDNA_P Parameter: Tissue Value: Aerial
  misc_feature: MA Experiment 20000069 PARAMETER Experiment Name: At_100uM_ABA_Mutants_cDNA_P Parameter: Treatment Value: 100uM ABA vs. No Treatment
  misc_feature: MA Experiment ID: 20000072 Result: Up-regulated in Transcription
  misc_feature: MA Experiment 20000072 PARAMETER Experiment Name: At_100uM_ABA_Mutants_cDNA_P Parameter: Plant Line Value: CS8105
  misc_feature: MA Experiment 20000072 PARAMETER Experiment Name: At_100uM_ABA_Mutants_cDNA_P Parameter: Timepoint (hr) Value: 6
  misc_feature: MA Experiment 20000072 PARAMETER Experiment Name: At_100uM_ABA_Mutants_cDNA_P Parameter: Tissue Value: Aerial
  misc_feature: MA Experiment 20000072 PARAMETER Experiment Name: At_100uM_ABA_Mutants_cDNA_P Parameter: Treatment Value: 100uM ABA vs. No Treatment
  misc_feature: MA Experiment ID: 20000086 Result: Up-regulated in Transcription
  misc_feature: MA Experiment 20000086 PARAMETER Experiment Name: At_100uM_ABA_Mutants_cDNA_P Parameter: Plant Line Value: CS22
  misc_feature: MA Experiment 20000086 PARAMETER Experiment Name: At_100uM_ABA_Mutants_cDNA_P Parameter: Timepoint (hr) Value: 6
  misc_feature: MA Experiment 20000086 PARAMETER Experiment Name: At_100uM_ABA_Mutants_cDNA_P Parameter: Tissue Value: Aerial
  misc_feature: MA Experiment 20000086 PARAMETER Experiment Name: At_100uM_ABA_Mutants_cDNA_P Parameter: Treatment Value: 100uM ABA vs. No Treatment
  misc_feature: MA Experiment ID: 20000087 Result: Up-regulated in Transcription
  misc_feature: MA Experiment 20000087 PARAMETER Experiment Name: At_100uM_ABA_Mutants_cDNA_P Parameter: Plant Line Value: WS
  misc_feature: MA Experiment 20000087 PARAMETER Experiment Name: At_100uM_ABA_Mutants_cDNA_P Parameter: Timepoint (hr) Value: 6
  misc_feature: MA Experiment 20000087 PARAMETER Experiment Name: At_100uM_ABA_Mutants_cDNA_P Parameter: Tissue Value: Aerial
  misc_feature: MA Experiment 20000087 PARAMETER Experiment Name: At_100uM_ABA_Mutants_cDNA_P Parameter: Treatment Value: 100uM ABA vs. No Treatment
  misc_feature: MA Experiment ID: 20000088 Result: Up-regulated in Transcription
  misc_feature: MA Experiment 20000088 PARAMETER Experiment Name: At_100uM_ABA_Mutants_cDNA_P Parameter: Plant Line Value: Landsberg
  misc_feature: MA Experiment 20000088 PARAMETER Experiment Name: At_100uM_ABA_Mutants_cDNA_P Parameter: Timepoint (hr) Value: 6
  misc_feature: MA Experiment 20000088 PARAMETER Experiment Name: At_100uM_ABA_Mutants_cDNA_P Parameter: Tissue Value: Aerial
  misc_feature: MA Experiment 20000088 PARAMETER Experiment Name: At_100uM_ABA_Mutants_cDNA_P Parameter: Treatment Value: 100uM ABA vs. No Treatment
  misc_feature: MA Experiment ID: 20000090 Result: Up-regulated in Transcription
  misc_feature: MA Experiment ID: 20000113 Result: Down-regulated in Transcription
  misc_feature: MA Experiment 20000113 PARAMETER Experiment Name: At_42deg_Heat_cDNA_P Parameter: Temperature (deg C) Value: 42 vs. 22
  misc_feature: MA Experiment 20000113 PARAMETER Experiment Name: At_42deg_Heat_cDNA_P Parameter: Timepoint (hr) Value: 8
  misc_feature: MA Experiment 20000113 PARAMETER Experiment Name: At_42deg_Heat_cDNA_P Parameter: Tissue Value: Aerial
  misc_feature: MA Experiment ID: 20000117 Result: Up-regulated in Transcription
  misc_feature: MA Experiment 20000117 PARAMETER Experiment Name: At_100uM_ABA_Mutants_cDNA_P Parameter: Plant Line Value: Columbia
  misc_feature: MA Experiment 20000117 PARAMETER Experiment Name: At_100uM_ABA_Mutants_cDNA_P Parameter: Timepoint (hr) Value: 6
  misc_feature: MA Experiment 20000117 PARAMETER Experiment Name: At_100uM_ABA_Mutants_cDNA_P Parameter: Tissue Value: Aerial
  misc_feature: MA Experiment 20000117 PARAMETER Experiment Name: At_100uM_ABA_Mutants_cDNA_P Parameter: Treatment Value: 100uM ABA vs. No Treatment
  misc_feature: MA Experiment ID: 20000173 Result: Down-regulated in Transcription
  misc_feature: MA Experiment 20000173 PARAMETER Experiment Name: At_42deg_Heat_P Parameter: Age (day) Value: 14
  misc_feature: MA Experiment 20000173 PARAMETER Experiment Name: At_42deg_Heat_P Parameter: Organism Value: A. thaliana
  misc_feature: MA Experiment 20000173 PARAMETER Experiment Name: At_42deg_Heat_P Parameter: Plant Line Value: WS
  misc_feature: MA Experiment 20000173 PARAMETER Experiment Name: At_42deg_Heat_P Parameter: Temperature (deg C) Value: 42 vs. 22
  misc_feature: MA Experiment 20000173 PARAMETER Experiment Name: At_42deg_Heat_P Parameter: Timepoint (hr) Value: 6
  misc_feature: MA Experiment 20000173 PARAMETER Experiment Name: At_42deg_Heat_P Parameter: Tissue Value: Aerial
  misc_feature: MA Experiment ID: 20000185 Result: Down-regulated in Transcription
  misc_feature: MA Experiment 20000185 PARAMETER Experiment Name: At_Roots__P Parameter: Age (day) Value: 7 vs. 21
  misc_feature: MA Experiment 20000185 PARAMETER Experiment Name: At_Roots__P Parameter: Organism Value: A. thaliana
  misc_feature: MA Experiment 20000185 PARAMETER Experiment Name: At_Roots__P Parameter: Tissue Value: Roots vs. Whole Plant
  misc_feature: MA Experiment ID: 20000224 Result: Down-regulated in Transcription
  misc_feature: MA Experiment ID: 20000267 Result: Down-regulated in Transcription
  misc_feature: MA Experiment 20000267 PARAMETER Experiment Name: At_Drought_P Parameter: Age (day) Value: 7
  misc_feature: MA Experiment 20000267 PARAMETER Experiment Name: At_Drought_P Parameter: Organism Value: A. thaliana
  misc_feature: MA Experiment 20000267 PARAMETER Experiment Name: At_Drought_P Parameter: Plant Line Value: WS
  misc_feature: MA Experiment 20000267 PARAMETER Experiment Name: At_Drought_P Parameter: Timepoint (hr) Value: 6
  misc_feature: MA Experiment 20000267 PARAMETER Experiment Name: At_Drought_P Parameter: Tissue Value: Whole Plant
  misc_feature: MA Experiment 20000267 PARAMETER Experiment Name: At_Drought_P Parameter: Treatment Value: Drought vs. No Drought
  misc_feature: MA Experiment ID: 20000308 Result: Up-regulated in Transcription
  misc_feature: MA Experiment 20000308 PARAMETER Experiment Name: At_100mM_NaCl__P Parameter: Age (day) Value: 17
  misc_feature: MA Experiment 20000308 PARAMETER Experiment Name: At_100mM_NaCl__P Parameter: Organism Value: A. thaliana
  misc_feature: MA Experiment 20000308 PARAMETER Experiment Name: At_100mM_NaCl__P Parameter: Plant Line Value: WS
  misc_feature: MA Experiment 20000308 PARAMETER Experiment Name: At_100mM_NaCl__P Parameter: Timepoint (hr) Value: 72
  misc_feature: MA Experiment 20000308 PARAMETER Experiment Name: At_100mM_NaCl__P Parameter: Tissue Value: Whole Plant
  misc_feature: MA Experiment 20000308 PARAMETER Experiment Name: At_100mM_NaCl__P Parameter: Treatment Value: 100mM NaCl vs. No Treatment
  misc_feature: MA Experiment ID: 20000436 Result: Down-regulated in Transcription
  misc_feature: MA Experiment 20000436 PARAMETER Experiment Name: At_Drought_P Parameter: Age (day) Value: 7
  misc_feature: MA Experiment 20000436 PARAMETER Experiment Name: At_Drought_P Parameter: Organism Value: A. thaliana
  misc_feature: MA Experiment 20000436 PARAMETER Experiment Name: At_Drought_P Parameter: Plant Line Value: WS
  misc_feature: MA Experiment 20000436 PARAMETER Experiment Name: At_Drought_P Parameter: Timepoint (hr) Value: 12
  misc_feature: MA Experiment 20000436 PARAMETER Experiment Name: At_Drought_P Parameter: Tissue Value: Whole Plant
  misc_feature: MA Experiment 20000436 PARAMETER Experiment Name: At_Drought_P Parameter: Treatment Value: Drought vs. No Drought
  misc_feature: MA Experiment ID: 20000439 Result: Down-regulated in Transcription
  misc_feature: MA Experiment 20000439 PARAMETER Experiment Name: At_Roots__P Parameter: Age (day) Value: 14 vs. 21
  misc_feature: MA Experiment 20000439 PARAMETER Experiment Name: At_Roots__P Parameter: Organism Value: A. thaliana
  misc_feature: MA Experiment 20000439 PARAMETER Experiment Name: At_Roots__P Parameter: Tissue Value: Roots vs. Whole Plant
  misc_feature: MA Experiment ID: 20000443 Result: Up-regulated in Transcription
  misc_feature: MA Experiment 20000443 PARAMETER Experiment Name: At_1uM_BR-BRZ__P Parameter: Tissue Value: Shoot Apices
  misc_feature: MA Experiment 20000443 PARAMETER Experiment Name: At_1uM_BR-BRZ__P Parameter: Treatment Value: 1uM BRZ vs. No Treatment
  misc_feature: MA Experiment ID: 20000453 Result: Up-regulated in Transcription
  misc_feature: MA Experiment 20000453 PARAMETER Experiment Name: At_100uM_ABA_P Parameter: Age (day) Value: 15
  misc_feature: MA Experiment 20000453 PARAMETER Experiment Name: At_100uM_ABA_P Parameter: Organism Value: A. thaliana
  misc_feature: MA Experiment 20000453 PARAMETER Experiment Name: At_100uM_ABA_P Parameter: Plant Line Value: WS
  misc_feature: MA Experiment 20000453 PARAMETER Experiment Name: At_100uM_ABA_P Parameter: Timepoint (hr) Value: 24
  misc_feature: MA Experiment 20000453 PARAMETER Experiment Name: At_100uM_ABA_P Parameter: Tissue Value: Aerial
  misc_feature: MA Experiment 20000453 PARAMETER Experiment Name: At_100uM_ABA_P Parameter: Treatment Value: 100uM ABA vs. No Treatment
  misc_feature: MA Experiment ID: 20000495 Result: Up-regulated in Transcription
  misc_feature: MA Experiment 20000495 PARAMETER Experiment Name: At_Guard_Cells_P Parameter: Harvest Date Value: 8/2/2002
  misc_feature: MA Experiment 20000495 PARAMETER Experiment Name: At_Guard_Cells_P Parameter: Organism Value: A. thaliana
  misc_feature: MA Experiment 20000495 PARAMETER Experiment Name: At_Guard_Cells_P Parameter: Tissue Value: Guard Cells vs. Leaves
  misc_feature: MA Experiment ID: 20000573 Result: Up-regulated in Transcription
  misc_feature: MA Experiment 20000573 PARAMETER Experiment Name: At_100uM_ABA_Mutants__P Parameter: Organism Value: A. thaliana
  misc_feature: MA Experiment 20000573 PARAMETER Experiment Name: At_100uM_ABA_Mutants__P Parameter: Plant Line Value: CS22 vs. Ler wt
  misc_feature: MA Experiment 20000573 PARAMETER Experiment Name: At_100uM_ABA_Mutants__P Parameter: Timepoint (hr) Value: N/A
  misc_feature: MA Experiment 20000573 PARAMETER Experiment Name: At_100uM_ABA_Mutants__P Parameter: Tissue Value: Whole Plant
  misc_feature: MA Experiment 20000573 PARAMETER Experiment Name: At_100uM_ABA_Mutants__P Parameter: Treatment Value: None
  misc_feature: MA Experiment ID: 20000574 Result: Up-regulated in Transcription
  misc_feature: MA Experiment 20000574 PARAMETER Experiment Name: At_100uM_ABA_Mutants__P Parameter: Organism Value: A. thaliana
  misc_feature: MA Experiment 20000574 PARAMETER Experiment Name: At_100uM_ABA_Mutants__P Parameter: Plant Line Value: CS23 vs. Ler wt
  misc_feature: MA Experiment 20000574 PARAMETER Experiment Name: At_100uM_ABA_Mutants__P Parameter: Timepoint (hr) Value: N/A
  misc_feature: MA Experiment 20000574 PARAMETER Experiment Name: At_100uM_ABA_Mutants__P Parameter: Tissue Value: Whole Plant
  misc_feature: MA Experiment 20000574 PARAMETER Experiment Name: At_100uM_ABA_Mutants__P Parameter: Treatment Value: None
  misc_feature: MA Experiment ID: 20000794 Result: Down-regulated in Transcription
  misc_feature: MA Experiment 20000794 PARAMETER Experiment Name: At_Petals_P Parameter: Age (day) Value: 23-25 days
  misc_feature: MA Experiment 20000794 PARAMETER Experiment Name: At_Petals_P Parameter: Plant Line Value: WS
  misc_feature: MA Experiment 20000794 PARAMETER Experiment Name: At_Petals_P Parameter: Tissue Value: Petals vs. Whole plant
  misc_feature: MA Experiment ID: 20001248 Result: Up-regulated in Transcription
  misc_feature: MA Experiment 20001248 PARAMETER Experiment Name: At_Far-red-induction_P Parameter: Age (day) Value: 7
  misc_feature: MA Experiment 20001248 PARAMETER Experiment Name: At_Far-red-induction_P Parameter: Light Value: Far-red vs. White
  misc_feature: MA Experiment 20001248 PARAMETER Experiment Name: At_Far-red-induction_P Parameter: Organism Value: A. thaliana
  misc_feature: MA Experiment 20001248 PARAMETER Experiment Name: At_Far-red-induction_P Parameter: Plant Line Value: Columbia
  misc_feature: MA Experiment 20001248 PARAMETER Experiment Name: At_Far-red-induction_P Parameter: Timepoint (hr) Value: 4
  misc_feature: MA Experiment 20001248 PARAMETER Experiment Name: At_Far-red-induction_P Parameter: Tissue Value: Whole Plant
  misc_feature: MA Experiment ID: 20001450 Result: Up-regulated in Transcription
  misc_feature: MA Experiment 20001450 PARAMETER Experiment Name: At_Far-red-induction_P Parameter: Age (day) Value: 7
  misc_feature: MA Experiment 20001450 PARAMETER Experiment Name: At_Far-red-induction_P Parameter: Light Value: Far-red vs. White
  misc_feature: MA Experiment 20001450 PARAMETER Experiment Name: At_Far-red-induction_P Parameter: Organism Value: A. thaliana
  misc_feature: MA Experiment 20001450 PARAMETER Experiment Name: At_Far-red-induction_P Parameter: Plant Line Value: Columbia
  misc_feature: MA Experiment 20001450 PARAMETER Experiment Name: At_Far-red-induction_P Parameter: Timepoint (hr) Value: 8
  misc_feature: MA Experiment 20001450 PARAMETER Experiment Name: At_Far-red-induction_P Parameter: Tissue Value: Whole Plant
  misc_feature: MA Experiment ID: 20001557 Result: Up-regulated in Transcription
  misc_feature: MA Experiment 20001557 PARAMETER Experiment Name: At_Drought_Soil_Dry_P Parameter: Age (day) Value: 27
  misc_feature: MA Experiment 20001557 PARAMETER Experiment Name: At_Drought_Soil_Dry_P Parameter: Organism Value: A. thaliana
  misc_feature: MA Experiment 20001557 PARAMETER Experiment Name: At_Drought_Soil_Dry_P Parameter: Plant Line Value: WS
  misc_feature: MA Experiment 20001557 PARAMETER Experiment Name: At_Drought_Soil_Dry_P Parameter: Post Timepoint (hr) Value: 3
  misc_feature: MA Experiment 20001557 PARAMETER Experiment Name: At_Drought_Soil_Dry_P Parameter: Post-Treatment Value: Re-Water vs. No Drought
  misc_feature: MA Experiment 20001557 PARAMETER Experiment Name: At_Drought_Soil_Dry_P Parameter: Timepoint (day) Value: 13
  misc_feature: MA Experiment 20001557 PARAMETER Experiment Name: At_Drought_Soil_Dry_P Parameter: Treatment Value: Drought vs. No Drought
  misc_feature: MA Experiment ID: 20001560 Result: Up-regulated in Transcription
  misc_feature: MA Experiment 20001560 PARAMETER Experiment Name: At_Drought_Soil_Dry_P Parameter: Age (day) Value: 28
  misc_feature: MA Experiment 20001560 PARAMETER Experiment Name: At_Drought_Soil_Dry_P Parameter: Organism Value: A. thaliana
  misc_feature: MA Experiment 20001560 PARAMETER Experiment Name: At_Drought_Soil_Dry_P Parameter: Plant Line Value: WS
  misc_feature: MA Experiment 20001560 PARAMETER Experiment Name: At_Drought_Soil_Dry_P Parameter: Post Timepoint (hr) Value: None
  misc_feature: MA Experiment 20001560 PARAMETER Experiment Name: At_Drought_Soil_Dry_P Parameter: Post-Treatment Value: None
  misc_feature: MA Experiment 20001560 PARAMETER Experiment Name: At_Drought_Soil_Dry_P Parameter: Timepoint (day) Value: 14
  misc_feature: MA Experiment 20001560 PARAMETER Experiment Name: At_Drought_Soil_Dry_P Parameter: Treatment Value: Drought vs. No Drought
  misc_feature: MA Experiment ID: 20001757 Result: Up-regulated in Transcription
  misc_feature: MA Experiment 20001757 PARAMETER Experiment Name: At_50mM_NH4NO3_L-to-H_P Parameter: Timepoint (hr) Value: 6
  misc_feature: MA Experiment 20001757 PARAMETER Experiment Name: At_50mM_NH4NO3_L-to-H_P Parameter: Tissue Value: Leaf
  misc_feature: MA Experiment 20001757 PARAMETER Experiment Name: At_50mM_NH4NO3_L-to-H_P Parameter: Treatment Value: 50mM NH4NO3 vs 100mM Mannitol
  misc_feature: MA Experiment ID: 20001904 Result: Down-regulated in Transcription
  misc_feature: MA Experiment 20001904 PARAMETER Experiment Name: At_Drought_Reproduction_P Parameter: Age (day) Value: 37
  misc_feature: MA Experiment 20001904 PARAMETER Experiment Name: At_Drought_Reproduction_P Parameter: Organism Value: A. thaliana
  misc_feature: MA Experiment 20001904 PARAMETER Experiment Name: At_Drought_Reproduction_P Parameter: Plant Line Value: WS
  misc_feature: MA Experiment 20001904 PARAMETER Experiment Name: At_Drought_Reproduction_P Parameter: Timepoint (day) Value: 7
  misc_feature: MA Experiment 20001904 PARAMETER Experiment Name: At_Drought_Reproduction_P Parameter: Tissue Value: Rosettes
  misc_feature: MA Experiment 20001904 PARAMETER Experiment Name: At_Drought_Reproduction_P Parameter: Treatment Value: Drought vs. No Drought
  misc_feature: MA Experiment ID: 20001905 Result: Down-regulated in Transcription
  misc_feature: MA Experiment 20001905 PARAMETER Experiment Name: At_Drought_Reproduction_P Parameter: Age (day) Value: 40
  misc_feature: MA Experiment 20001905 PARAMETER Experiment Name: At_Drought_Reproduction_P Parameter: Organism Value: A. thaliana
  misc_feature: MA Experiment 20001905 PARAMETER Experiment Name: At_Drought_Reproduction_P Parameter: Plant Line Value: WS
  misc_feature: MA Experiment 20001905 PARAMETER Experiment Name: At_Drought_Reproduction_P Parameter: Timepoint (day) Value: 10
  misc_feature: MA Experiment 20001905 PARAMETER Experiment Name: At_Drought_Reproduction_P Parameter: Tissue Value: Rosettes
  misc_feature: MA Experiment 20001905 PARAMETER Experiment Name: At_Drought_Reproduction_P Parameter: Treatment Value: Drought vs. No Drought
aaaaaggtcactggtcttcttcgtgtgacttcaccactttctcatctcccacaaaaatggctctctcacttctttcagtctttatctttttccatgtctttaccaatgttgtttttgctgcttcaaatgaggaatccaaggccttagtttctttaccaacgccaacacttccatcgccatctccggctaccaaaccgccgtcgccagctctcaaaccgccgacgccgtcgtacaagccacccacgctgccaactactcctattaaaccacccaccacaaaacctccggtcaaacctccaactacttcggttacaccagtaaaacctccggtttcaactcctccgatcaaactaccgccggtacaaccacctacgtacaaacccccaacgccaacagttaaaccaccgtccgtccaaccacctacgtacaaacccccaactccaacggttaaaccacccactacatcaccggttaaaccacccactacgccaccagtccaatcaccgccggtccaaccacctacgtacaaacccccaacgtcaccggttaaaccacccaccacaactccaccggttaaaccccccaccacgacgccaccggtccaaccacctacgtacaatcccccaactacaccggttaaaccacctacagcgccgcctgtcaaacctccaacaccacctcccgtaagaactcggatagattgcgtgcctttatgtgggacgaggtgtgggcaacactcgaggaagaacgtatgtatgagagcgtgcgtcacgtgctgctaccgctgcaagtgtgttcccccaggcacctacggtaataaggagaagtgtggatcttgttacgccaacatgaagacacgtggtggaaaatccaaatgtccttgaacctttatatgacgatggttgttaaacgaaataatttaaatcaatggagtttttataagtttgtaatgcgtttgtttttgttatagtaatattgagttggatctttgtttacgggacgtagaatactaaataatgaaaaaaaccttctcg

SEQ ID NO: 22075 - protein, 293 aa, Arabidopsis thaliana
  peptide (1)..(293): Ceres Seq. ID no. 12338376
  misc_feature (228)..(293): Pfam Name: Gibberellin regulated protein Pfam Description: Gibberellin regulated protein
  misc_feature (54)..(229): Homolog of NCBI NO: 15225875 NR Description: hypothetical protein; protein id: At2g27380.1
  misc_feature (54)..(229): Homolog of NCBI NO: 15225875 NR Description: hypothetical protein; protein id: At2g27380.1
  misc_feature (54)..(229): Homolog of NCBI NO: 15225875 NR Description: hypothetical protein; protein id: At2g27380.1
  misc_feature (54)..(229): Homolog of NCBI NO: 15225875 NR Description: hypothetical protein; protein id: At2g27380.1
  misc_feature (52)..(230): Homolog of NCBI NO: 7446482 NR Description: probable cell wall-plasma membrane linker protein
  misc_feature (54)..(229): Homolog of NCBI NO: 15225875 NR Description: hypothetical protein; protein id: At2g27380.1
  misc_feature (52)..(228): Homolog of NCBI NO: 15217879 NR Description: prolin-rich protein, putative; protein id:
  misc_feature (54)..(229): Homolog of NCBI NO: 15225875 NR Description: hypothetical protein; protein id: At2g27380.1
  misc_feature (19)..(293): Homolog of NCBI NO: 15242165 NR Description: putative protein
  misc_feature (19)..(293): Homolog of NCBI NO: 21592790 NR Description: unknown [Arabidopsis thaliana]
KGHWSSSCDFTTFSSPTKMALSLLSVFIFFHVFTNVVFAASNEESKALVSLPTPTLPSPSPATKPPSPALKPPTPSYKPPTLPTTPIKPPTTKPPVKPPTTSVTPVKPPVSTPPIKLPPVQPPTYKPPTPTVKPPSVQPPTYKPPTPTVKPPTTSPVKPPTTPPVQSPPVQPPTYKPPTSPVKPPTTTPPVKPPTTTPPVQPPTYNPPTTPVKPPTAPPVKPPTPPPVRTRIDCVPLCGTRCGQHSRKNVCMRACVTCCYRCKCVPPGTYGNKEKCGSCYANMKTRGGKSKCP

SEQ ID NO: 22076 - protein, 275 aa, Arabidopsis thaliana
  peptide (1)..(275): Ceres Seq. ID no. 12338377
  misc_feature (210)..(275): Pfam Name: Gibberellin regulated protein Pfam Description: Gibberellin regulated protein
  misc_feature (34)..(212): Homolog of NCBI NO: 7446482 NR Description: probable cell wall-plasma membrane linker protein
  misc_feature (36)..(211): Homolog of NCBI NO: 15225875 NR Description: hypothetical protein; protein id: At2g27380.1
  misc_feature (34)..(210): Homolog of NCBI NO: 15217879 NR Description: prolin-rich protein, putative; protein id:
  misc_feature (36)..(211): Homolog of NCBI NO: 15225875 NR Description: hypothetical protein; protein id: At2g27380.1
  misc_feature (36)..(211): Homolog of NCBI NO: 15225875 NR Description: hypothetical protein; protein id: At2g27380.1
  misc_feature (36)..(211): Homolog of NCBI NO: 15225875 NR Description: hypothetical protein; protein id: At2g27380.1
  misc_feature (36)..(211): Homolog of NCBI NO: 15225875 NR Description: hypothetical protein; protein id: At2g27380.1
  misc_feature (36)..(211): Homolog of NCBI NO: 15225875 NR Description: hypothetical protein; protein id: At2g27380.1
  misc_feature (1)..(275): Homolog of NCBI NO: 15242165 NR Description: putative protein
  misc_feature (1)..(275): Homolog of NCBI NO: 21592790 NR Description: unknown [Arabidopsis thaliana]
MALSLLSVFIFFHVFTNVVFAASNEESKALVSLPTPTLPSPSPATKPPSPALKPPTPSYKPPTLPTTPIKPPTTKPPVKPPTTSVTPVKPPVSTPPIKLPPVQPPTYKPPTPTVKPPSVQPPTYKPPTPTVKPPTTSPVKPPTTPPVQSPPVQPPTYKPPTSPVKPPTTTPPVKPPTTTPPVQPPTYNPPTTPVKPPTAPPVKPPTPPPVRTRIDCVPLCGTRCGQHSRKNVCMRACVTCCYRCKCVPPGTYGNKEKCGSCYANMKTRGGKSKCP

SEQ ID NO: 22077 - DNA, 1442 bp, Arabidopsis thaliana
  misc_feature (1)..(1442): Ceres Seq. ID no. 12372071
  misc_feature: MA Experiment ID: 108595 Result: Up-regulated in Transcription
  misc_feature: MA Experiment 108595 PARAMETER Experiment Name: At_Ler-pi_Ovule_cDNA_P Parameter: Plant Line Value: null
  misc_feature: MA Experiment ID: 20000179 Result: Down-regulated in Transcription
  misc_feature: MA Experiment 20000179 PARAMETER Experiment Name: At_Germinating_Seeds_P Parameter: Age (hr) Value: 6 vs. 0
  misc_feature: MA Experiment 20000179 PARAMETER Experiment Name: At_Germinating_Seeds_P Parameter: Tissue Value: Germinating Seeds
  misc_feature: MA Experiment ID: 20000180 Result: Down-regulated in Transcription
  misc_feature: MA Experiment 20000180 PARAMETER Experiment Name: At_Germinating_Seeds_P Parameter: Age (hr) Value: 24 vs. 0
  misc_feature: MA Experiment 20000180 PARAMETER Experiment Name: At_Germinating_Seeds_P Parameter: Tissue Value: Germinating Seeds
  misc_feature: MA Experiment ID: 20001557 Result: Up-regulated in Transcription
  misc_feature: MA Experiment 20001557 PARAMETER Experiment Name: At_Drought_Soil_Dry_P Parameter: Age (day) Value: 27
  misc_feature: MA Experiment 20001557 PARAMETER Experiment Name: At_Drought_Soil_Dry_P Parameter: Organism Value: A. thaliana
  misc_feature: MA Experiment 20001557 PARAMETER Experiment Name: At_Drought_Soil_Dry_P Parameter: Plant Line Value: WS
  misc_feature: MA Experiment 20001557 PARAMETER Experiment Name: At_Drought_Soil_Dry_P Parameter: Post Timepoint (hr) Value: 3
  misc_feature: MA Experiment 20001557 PARAMETER Experiment Name: At_Drought_Soil_Dry_P Parameter: Post-Treatment Value: Re-Water vs. No Drought
  misc_feature: MA Experiment 20001557 PARAMETER Experiment Name: At_Drought_Soil_Dry_P Parameter: Timepoint (day) Value: 13
  misc_feature: MA Experiment 20001557 PARAMETER Experiment Name: At_Drought_Soil_Dry_P Parameter: Treatment Value: Drought vs. No Drought
  misc_feature: MA Experiment ID: 20001558 Result: Up-regulated in Transcription
  misc_feature: MA Experiment 20001558 PARAMETER Experiment Name: At_Drought_Soil_Dry_P Parameter: Age (day) Value: 27
  misc_feature: MA Experiment 20001558 PARAMETER Experiment Name: At_Drought_Soil_Dry_P Parameter: Organism Value: A. thaliana
  misc_feature: MA Experiment 20001558 PARAMETER Experiment Name: At_Drought_Soil_Dry_P Parameter: Plant Line Value: WS
  misc_feature: MA Experiment 20001558 PARAMETER Experiment Name: At_Drought_Soil_Dry_P Parameter: Post Timepoint (hr) Value: 6
  misc_feature: MA Experiment 20001558 PARAMETER Experiment Name: At_Drought_Soil_Dry_P Parameter: Post-Treatment Value: Re-Water vs. No Drought
  misc_feature: MA Experiment 20001558 PARAMETER Experiment Name: At_Drought_Soil_Dry_P Parameter: Timepoint (day) Value: 13
  misc_feature: MA Experiment 20001558 PARAMETER Experiment Name: At_Drought_Soil_Dry_P Parameter: Treatment Value: Drought vs. No Drought
  misc_feature: MA Experiment ID: 20001560 Result: Up-regulated in Transcription
  misc_feature: MA Experiment 20001560 PARAMETER Experiment Name: At_Drought_Soil_Dry_P Parameter: Age (day) Value: 28
  misc_feature: MA Experiment 20001560 PARAMETER Experiment Name: At_Drought_Soil_Dry_P Parameter: Organism Value: A. thaliana
  misc_feature: MA Experiment 20001560 PARAMETER Experiment Name: At_Drought_Soil_Dry_P Parameter: Plant Line Value: WS
  misc_feature: MA Experiment 20001560 PARAMETER Experiment Name: At_Drought_Soil_Dry_P Parameter: Post Timepoint (hr) Value: None
  misc_feature: MA Experiment 20001560 PARAMETER Experiment Name: At_Drought_Soil_Dry_P Parameter: Post-Treatment Value: None
  misc_feature: MA Experiment 20001560 PARAMETER Experiment Name: At_Drought_Soil_Dry_P Parameter: Timepoint (day) Value: 14
  misc_feature: MA Experiment 20001560 PARAMETER Experiment Name: At_Drought_Soil_Dry_P Parameter: Treatment Value: Drought vs. No Drought
acatgttttgctctgcttctctctttatcttcttcttcatcttttgtcactcttttcttctgctctaaactttttcttttcgctgcaaaaaattttcccaggaatatttcttaaaagaaatttcatccctaaataagaaaaaagcatctccttctttagtgtcctccttcaccaaactcttgattccataagcatatattaaaaaagctctctgctttcttcaactttcccgggaaaatcttcttgttacaaagcatcaatctcttgttttaccagttttctctctttattccttttttgccctttacttttcctaactttggtctttatatataaacacacgacacaaagaagaacacacataagttaaaactattacaacagttttaaagagagagatttaaaaaatggagacagagaagaaagtttctctcccaagaatcttacgaatctctgttactgatccttacgcaacagattcgtcaagcgacgaagaagaagaagttgattttgatgcattatctacaaaacgacgtcgtgttaagaagtacgtgaaggaagtggtgcttgattcggtggtttctgataaagagaagccgatgaagaagaagagaaagaagcgcgttgttactgttccagtggttgttacgacagcgacgaggaagtttcgtggagtgaggcaaagaccgtggggaaaatgggcggcggagattagagatccgagtagacgtgttagggtttggttaggtacttttgacacggcggaggaagctgccattgtttacgataacgcagctattcagctacgtggtcctaacgcagagcttaacttccctcctgctccggtgacggagaatgttgaagaagcttcgacggaggtgaaaggagtttcggattttatcattggcggtggagaatatcttcgttcgccggtttctgttctcgaatctccgttctccggcgagtctactgcggttaaagaggagtttgtcggtgtatcgacggcggagattgtggttaaaaaggagccgtcttttaacggttcagatttctcggcgccgttgttctcggacgacgacgtttttggtttctcgacgtcgatgagtgaaagtttcggcggcgatttatttggagataatctttttgcggatatgagttttggatccgggtttggattcgggtctgggtctggattctccagctggcacgttgaggaccattttcaagatattggggatttattcgagtcggatcctgtcttaactgtttaagaaataactggccgtttaacggcgtttagtgaagttttgttaccggcgacggcgaggattaaaaaaaaacggcgatttattttttgaatgaagatttgttaaatatattaaacttttttgtaacttaattaatggtgattttatttttaaataaaactaatggtaaatggt

SEQ ID NO: 22078 - protein, 287 aa, Arabidopsis thaliana
  peptide (1)..(287): Ceres Seq. ID no. 12372072
  misc_feature (84)..(148): Pfam Name: AP2 domain Pfam Description: AP2 domain
  misc_feature (143)..(287): Homolog of NCBI NO: 22655200 NR Description: putative Ap2 domain protein [Arabidopsis thaliana]
  misc_feature (143)..(287): Homolog of NCBI NO: 15236595 NR Description: putative Ap2 domain protein
  misc_feature (1)..(179): Homolog of NCBI NO: 7531181 NR Description: PATHOGENESIS-RELATED GENES TRANSCRIPTIONAL
  misc_feature (1)..(236): Homolog of NCBI NO: 15238705 NR Description: putative protein; protein id: At5g53290.1
  misc_feature (10)..(223): Homolog of NCBI NO: 15233169 NR Description: putative protein
  misc_feature (10)..(274): Homolog of NCBI NO: 15225959 NR Description: putative AP2 domain transcription factor
  misc_feature (1)..(219): Homolog of NCBI NO: 15234337 NR Description: putative protein; protein id: At4g27950.1
  misc_feature (1)..(252): Homolog of NCBI NO: 22655200 NR Description: putative Ap2 domain protein [Arabidopsis thaliana]
  misc_feature (1)..(252): Homolog of NCBI NO: 15236595 NR Description: putative Ap2 domain protein
  misc_feature (1)..(287): Homolog of NCBI NO: 15237053 NR Description: putative Ap2 domain protein; protein id:
METEKKVSLPRILRISVTDPYATDSSSDEEEEVDFDALSTKRRRVKKYVKEVVLDSVVSDKEKPMKKKRKKRVVTVPVVVTTATRKFRGVRQRPWGKWAAEIRDPSRRVRVWLGTFDTAEEAAIVYDNAAIQLRGPNAELNFPPAPVTENVEEASTEVKGVSDFIIGGGEYLRSPVSVLESPFSGESTAVKEEFVGVSTAEIVVKKEPSFNGSDFSAPLFSDDDVFGFSTSMSESFGGDLFGDNLFADMSFGSGFGFGSGSGFSSWHVEDHFQDIGDLFESDPVLTV

SEQ ID NO: 22079 - protein, 223 aa, Arabidopsis thaliana
  peptide (1)..(223): Ceres Seq. ID no. 12372073
  misc_feature (20)..(84): Pfam Name: AP2 domain Pfam Description: AP2 domain
  misc_feature (79)..(223): Homolog of NCBI NO: 22655200 NR Description: putative Ap2 domain protein [Arabidopsis thaliana]
  misc_feature (79)..(223): Homolog of NCBI NO: 15236595 NR Description: putative Ap2 domain protein
  misc_feature (1)..(115): Homolog of NCBI NO: 7531181 NR Description: PATHOGENESIS-RELATED GENES TRANSCRIPTIONAL
  misc_feature (1)..(172): Homolog of NCBI NO: 15238705 NR Description: putative protein; protein id: At5g53290.1
  misc_feature (1)..(159): Homolog of NCBI NO: 15233169 NR Description: putative protein
  misc_feature (1)..(210): Homolog of NCBI NO: 15225959 NR Description: putative AP2 domain transcription factor
  misc_feature (1)..(155): Homolog of NCBI NO: 15234337 NR Description: putative protein; protein id: At4g27950.1
  misc_feature (1)..(188): Homolog of NCBI NO: 22655200 NR Description: putative Ap2 domain protein [Arabidopsis thaliana]
  misc_feature (1)..(188): Homolog of NCBI NO: 15236595 NR Description: putative Ap2 domain protein
  misc_feature (1)..(223): Homolog of NCBI NO: 15237053 NR Description: putative Ap2 domain protein; protein id:
MKKKRKKRVVTVPVVVTTATRKFRGVRQRPWGKWAAEIRDPSRRVRVWLGTFDTAEEAAIVYDNAAIQLRGPNAELNFPPAPVTENVEEASTEVKGVSDFIIGGGEYLRSPVSVLESPFSGESTAVKEEFVGVSTAEIVVKKEPSFNGSDFSAPLFSDDDVFGFSTSMSESFGGDLFGDNLFADMSFGSGFGFGSGSGFSSWHVEDHFQDIGDLFESDPVLTV

SEQ ID NO: 22080 - DNA, 972 bp, Arabidopsis thaliana
  misc_feature (1)..(972): Ceres Seq. ID no. 13494544
  misc_feature: MA Experiment ID: 108433 Result: Up-regulated in Transcription
  misc_feature: MA Experiment 108433 PARAMETER Experiment Name: At_rhl_Mutant2_cDNA_P Parameter: Age (day) Value: 7
  misc_feature: MA Experiment 108433 PARAMETER Experiment Name: At_rhl_Mutant2_cDNA_P Parameter: Organism Value: A. thaliana
  misc_feature: MA Experiment 108433 PARAMETER Experiment Name: At_rhl_Mutant2_cDNA_P Parameter: Plant Line Value: rhl Mutant vs. wt landsburg
  misc_feature: MA Experiment 108433 PARAMETER Experiment Name: At_rhl_Mutant2_cDNA_P Parameter: Tissue Value: Roots
  misc_feature: MA Experiment ID: 108569 Result: Up-regulated in Transcription
  misc_feature: MA Experiment 108569 PARAMETER Experiment Name: At_0.001%_MeJA__cDNA_P Parameter: Timepoint (hr) Value: 6
  misc_feature: MA Experiment 108569 PARAMETER Experiment Name: At_0.001%_MeJA__cDNA_P Parameter: Tissue Value: Aerial
  misc_feature: MA Experiment 108569 PARAMETER Experiment Name: At_0.001%_MeJA__cDNA_P Parameter: Treatment Value: 0.001% MeJA vs. No Treatment
  misc_feature: MA Experiment ID: 108572 Result: Up-regulated in Transcription
  misc_feature: MA Experiment 108572 PARAMETER Experiment Name: At_Drought_cDNA_P Parameter: Timepoint (hr) Value: 1
  misc_feature: MA Experiment 108572 PARAMETER Experiment Name: At_Drought_cDNA_P Parameter: Tissue Value: Aerial
  misc_feature: MA Experiment 108572 PARAMETER Experiment Name: At_Drought_cDNA_P Parameter: Treatment Value: Drought vs. No Drought
  misc_feature: MA Experiment ID: 108573 Result: Up-regulated in Transcription
  misc_feature: MA Experiment 108573 PARAMETER Experiment Name: At_Drought_cDNA_P Parameter: Timepoint (hr) Value: 6
  misc_feature: MA Experiment 108573 PARAMETER Experiment Name: At_Drought_cDNA_P Parameter: Tissue Value: Aerial
  misc_feature: MA Experiment 108573 PARAMETER Experiment Name: At_Drought_cDNA_P Parameter: Treatment Value: Drought vs. No Drought
  misc_feature: MA Experiment ID: 108595 Result: Up-regulated in Transcription
  misc_feature: MA Experiment 108595 PARAMETER Experiment Name: At_Ler-pi_Ovule_cDNA_P Parameter: Plant Line Value: null
  misc_feature: MA Experiment ID: 20000069 Result: Up-regulated in Transcription
  misc_feature: MA Experiment 20000069 PARAMETER Experiment Name: At_100uM_ABA_Mutants_cDNA_P Parameter: Plant Line Value: CS23
  misc_feature: MA Experiment 20000069 PARAMETER Experiment Name: At_100uM_ABA_Mutants_cDNA_P Parameter: Timepoint (hr) Value: 6
  misc_feature: MA Experiment 20000069 PARAMETER Experiment Name: At_100uM_ABA_Mutants_cDNA_P Parameter: Tissue Value: Aerial
  misc_feature: MA Experiment 20000069 PARAMETER Experiment Name: At_100uM_ABA_Mutants_cDNA_P Parameter: Treatment Value: 100uM ABA vs. No Treatment
  misc_feature: MA Experiment ID: 20000070 Result: Up-regulated in Transcription
  misc_feature: MA Experiment 20000070 PARAMETER Experiment Name: At_100uM_ABA_Mutants_cDNA_P Parameter: Plant Line Value: CS24
  misc_feature: MA Experiment 20000070 PARAMETER Experiment Name: At_100uM_ABA_Mutants_cDNA_P Parameter: Timepoint (hr) Value: 6
  misc_feature: MA Experiment 20000070 PARAMETER Experiment Name: At_100uM_ABA_Mutants_cDNA_P Parameter: Tissue Value: Aerial
  misc_feature: MA Experiment 20000070 PARAMETER Experiment Name: At_100uM_ABA_Mutants_cDNA_P Parameter: Treatment Value: 100uM ABA vs. No Treatment
  misc_feature: MA Experiment ID: 20000071 Result: Up-regulated in Transcription
  misc_feature: MA Experiment 20000071 PARAMETER Experiment Name: At_100uM_ABA_Mutants_cDNA_P Parameter: Plant Line Value: CS8104
  misc_feature: MA Experiment 20000071 PARAMETER Experiment Name: At_100uM_ABA_Mutants_cDNA_P Parameter: Timepoint (hr) Value: 6
  misc_feature: MA Experiment 20000071 PARAMETER Experiment Name: At_100uM_ABA_Mutants_cDNA_P Parameter: Tissue Value: Aerial
  misc_feature: MA Experiment 20000071 PARAMETER Experiment Name: At_100uM_ABA_Mutants_cDNA_P Parameter: Treatment Value: 100uM ABA vs. No Treatment
  misc_feature: MA Experiment ID: 20000088 Result: Up-regulated in Transcription
  misc_feature: MA Experiment 20000088 PARAMETER Experiment Name: At_100uM_ABA_Mutants_cDNA_P Parameter: Plant Line Value: Landsberg
  misc_feature: MA Experiment 20000088 PARAMETER Experiment Name: At_100uM_ABA_Mutants_cDNA_P Parameter: Timepoint (hr) Value: 6
  misc_feature: MA Experiment 20000088 PARAMETER Experiment Name: At_100uM_ABA_Mutants_cDNA_P Parameter: Tissue Value: Aerial
  misc_feature: MA Experiment 20000088 PARAMETER Experiment Name: At_100uM_ABA_Mutants_cDNA_P Parameter: Treatment Value: 100uM ABA vs. No Treatment
  misc_feature: MA Experiment ID: 20000169 Result: Up-regulated in Transcription
  misc_feature: MA Experiment 20000169 PARAMETER Experiment Name: At_100uM_ABA_P Parameter: Age (day) Value: 14
  misc_feature: MA Experiment 20000169 PARAMETER Experiment Name: At_100uM_ABA_P Parameter: Organism Value: A. thaliana
  misc_feature: MA Experiment 20000169 PARAMETER Experiment Name: At_100uM_ABA_P Parameter: Plant Line Value: WS
  misc_feature: MA Experiment 20000169 PARAMETER Experiment Name: At_100uM_ABA_P Parameter: Timepoint (hr) Value: 6
  misc_feature: MA Experiment 20000169 PARAMETER Experiment Name: At_100uM_ABA_P Parameter: Tissue Value: Aerial
  misc_feature: MA Experiment 20000169 PARAMETER Experiment Name: At_100uM_ABA_P Parameter: Treatment Value: 100uM ABA vs. No Treatment
  misc_feature: MA Experiment ID: 20000184 Result: Down-regulated in Transcription
  misc_feature: MA Experiment 20000184 PARAMETER Experiment Name: At_Shoots__P Parameter: Age (day) Value: 7
  misc_feature: MA Experiment 20000184 PARAMETER Experiment Name: At_Shoots__P Parameter: Tissue Value: Shoots vs. Whole Plant
  misc_feature: MA Experiment ID: 20000185 Result: Down-regulated in Transcription
  misc_feature: MA Experiment 20000185 PARAMETER Experiment Name: At_Roots__P Parameter: Age (day) Value: 7 vs. 21
  misc_feature: MA Experiment 20000185 PARAMETER Experiment Name: At_Roots__P Parameter: Organism Value: A. thaliana
  misc_feature: MA Experiment 20000185 PARAMETER Experiment Name: At_Roots__P Parameter: Tissue Value: Roots vs. Whole Plant
  misc_feature: MA Experiment ID: 20000211 Result: Up-regulated in Transcription
  misc_feature: MA Experiment 20000211 PARAMETER Experiment Name: At_0.001percent_MeJA__P Parameter: Age (day) Value: 14
  misc_feature: MA Experiment 20000211 PARAMETER Experiment Name: At_0.001percent_MeJA__P Parameter: Organism Value: A. thaliana
  misc_feature: MA Experiment 20000211 PARAMETER Experiment Name: At_0.001percent_MeJA__P Parameter: Plant Line Value: WS
  misc_feature: MA Experiment 20000211 PARAMETER Experiment Name: At_0.001percent_MeJA__P Parameter: Timepoint (hr) Value: 1
  misc_feature: MA Experiment 20000211 PARAMETER Experiment Name: At_0.001percent_MeJA__P Parameter: Tissue Value: Aerial
  misc_feature: MA Experiment 20000211 PARAMETER Experiment Name: At_0.001percent_MeJA__P Parameter: Treatment Value: 0.001percent MeJA vs. No Treatment
  misc_feature: MA Experiment ID: 20000227 Result: Down-regulated in Transcription
  misc_feature: MA Experiment 20000227 PARAMETER Experiment Name: At_Root-Tips-vs-Tops_P Parameter: Tissue Value: Root Tips vs. Root Tops
  misc_feature: MA Experiment ID: 20000264 Result: Up-regulated in Transcription
  misc_feature: MA Experiment 20000264 PARAMETER Experiment Name: At_Open_Flower_P Parameter: Age (day) Value: 21
  misc_feature: MA Experiment 20000264 PARAMETER Experiment Name: At_Open_Flower_P Parameter: Plant Line Value: WS
  misc_feature: MA Experiment 20000264 PARAMETER Experiment Name: At_Open_Flower_P Parameter: Tissue Value: Open Flower vs. Whole Plant
  misc_feature: MA Experiment ID: 20000286 Result: Up-regulated in Transcription
  misc_feature: MA Experiment 20000286 PARAMETER Experiment Name: At_Open_Flower_P Parameter: Age (day) Value: 21
  misc_feature: MA Experiment 20000286 PARAMETER Experiment Name: At_Open_Flower_P Parameter: Plant Line Value: WS
  misc_feature: MA Experiment 20000286 PARAMETER Experiment Name: At_Open_Flower_P Parameter: Tissue Value: Half Open vs. Whole Plant
  misc_feature: MA Experiment ID: 20000308 Result: Up-regulated in Transcription
  misc_feature: MA Experiment 20000308 PARAMETER Experiment Name: At_100mM_NaCl__P Parameter: Age (day) Value: 17
  misc_feature: MA Experiment 20000308 PARAMETER Experiment Name: At_100mM_NaCl__P Parameter: Organism Value: A. thaliana
  misc_feature: MA Experiment 20000308 PARAMETER Experiment Name: At_100mM_NaCl__P Parameter: Plant Line Value: WS
  misc_feature: MA Experiment 20000308 PARAMETER Experiment Name: At_100mM_NaCl__P Parameter: Timepoint (hr) Value: 72
  misc_feature: MA Experiment 20000308 PARAMETER Experiment Name: At_100mM_NaCl__P Parameter: Tissue Value: Whole Plant
  misc_feature: MA Experiment 20000308 PARAMETER Experiment Name: At_100mM_NaCl__P Parameter: Treatment Value: 100mM NaCl vs. No Treatment
  misc_feature: MA Experiment ID: 20000436 Result: Up-regulated in Transcription
  misc_feature: MA Experiment 20000436 PARAMETER Experiment Name: At_Drought_P Parameter: Age (day) Value: 7
  misc_feature: MA Experiment 20000436 PARAMETER Experiment Name: At_Drought_P Parameter: Organism Value: A. thaliana
  misc_feature: MA Experiment 20000436 PARAMETER Experiment Name: At_Drought_P Parameter: Plant Line Value: WS
  misc_feature: MA Experiment 20000436 PARAMETER Experiment Name: At_Drought_P Parameter: Timepoint (hr) Value: 12
  misc_feature: MA Experiment 20000436 PARAMETER Experiment Name: At_Drought_P Parameter: Tissue Value: Whole Plant
  misc_feature: MA Experiment 20000436 PARAMETER Experiment Name: At_Drought_P Parameter: Treatment Value: Drought vs. No Drought
  misc_feature: MA Experiment ID: 20000438 Result: Down-regulated in Transcription
  misc_feature: MA Experiment 20000438 PARAMETER Experiment Name: At_Shoots__P Parameter: Age (day) Value: 14
  misc_feature: MA Experiment 20000438 PARAMETER Experiment Name: At_Shoots__P Parameter: Tissue Value: Shoots vs. Whole Plant
  misc_feature: MA Experiment ID: 20000439 Result: Down-regulated in Transcription
  misc_feature: MA Experiment 20000439 PARAMETER Experiment Name: At_Roots__P Parameter: Age (day) Value: 14 vs. 21
  misc_feature: MA Experiment 20000439 PARAMETER Experiment Name: At_Roots__P Parameter: Organism Value: A. thaliana
  misc_feature: MA Experiment 20000439 PARAMETER Experiment Name: At_Roots__P Parameter: Tissue Value: Roots vs. Whole Plant
  misc_feature: MA Experiment ID: 20000453 Result: Up-regulated in Transcription
  misc_feature: MA Experiment 20000453 PARAMETER Experiment Name: At_100uM_ABA_P Parameter: Age (day) Value: 15
  misc_feature: MA Experiment 20000453 PARAMETER Experiment Name: At_100uM_ABA_P Parameter: Organism Value: A. thaliana
  misc_feature: MA Experiment 20000453 PARAMETER Experiment Name: At_100uM_ABA_P Parameter: Plant Line Value: WS
  misc_feature: MA Experiment 20000453 PARAMETER Experiment Name: At_100uM_ABA_P Parameter: Timepoint (hr) Value: 24
  misc_feature: MA Experiment 20000453 PARAMETER Experiment Name: At_100uM_ABA_P Parameter: Tissue Value: Aerial
  misc_feature: MA Experiment 20000453 PARAMETER Experiment Name: At_100uM_ABA_P Parameter: Treatment Value: 100uM ABA vs. No Treatment
  misc_feature: MA Experiment ID: 20000455 Result: Up-regulated in Transcription
  misc_feature: MA Experiment 20000455 PARAMETER Experiment Name: At_100uM_ABA_P Parameter: Age (day) Value: 16
  misc_feature: MA Experiment 20000455 PARAMETER Experiment Name: At_100uM_ABA_P Parameter: Organism Value: A. thaliana
  misc_feature: MA Experiment 20000455 PARAMETER Experiment Name: At_100uM_ABA_P Parameter: Plant Line Value: WS
  misc_feature: MA Experiment 20000455 PARAMETER Experiment Name: At_100uM_ABA_P Parameter: Timepoint (hr) Value: 48
  misc_feature: MA Experiment 20000455 PARAMETER Experiment Name: At_100uM_ABA_P Parameter: Tissue Value: Aerial
  misc_feature: MA Experiment 20000455 PARAMETER Experiment Name: At_100uM_ABA_P Parameter: Treatment Value: 100uM ABA vs. No Treatment
  misc_feature: MA Experiment ID: 20000506 Result: Up-regulated in Transcription
  misc_feature: MA Experiment 20000506 PARAMETER Experiment Name: At_Wounding_P Parameter: Organism Value: A. thaliana
  misc_feature: MA Experiment 20000506 PARAMETER Experiment Name: At_Wounding_P Parameter: Plant Line Value: WS
  misc_feature: MA Experiment 20000506 PARAMETER Experiment Name: At_Wounding_P Parameter: Timepoint (hr) Value: 6
  misc_feature: MA Experiment 20000506 PARAMETER Experiment Name: At_Wounding_P Parameter: Tissue Value: Aerial
  misc_feature: MA Experiment 20000506 PARAMETER Experiment Name: At_Wounding_P Parameter: Treatment Value: Wounding vs. No Wounding
  misc_feature: MA Experiment ID: 20000527 Result: Down-regulated in Transcription
  misc_feature: MA Experiment 20000527 PARAMETER Experiment Name: At_10percent_PEG_P Parameter: Age (day) Value: 20
  misc_feature: MA Experiment 20000527 PARAMETER Experiment Name: At_10percent_PEG_P Parameter: Organism Value: A. thaliana
  misc_feature: MA Experiment 20000527 PARAMETER Experiment Name: At_10percent_PEG_P Parameter: Plant Line Value: WS
  misc_feature: MA Experiment 20000527 PARAMETER Experiment Name: At_10percent_PEG_P Parameter: Timepoint (day) Value: 20
  misc_feature: MA Experiment 20000527 PARAMETER Experiment Name: At_10percent_PEG_P Parameter: Tissue Value: Whole Plant
  misc_feature: MA Experiment 20000527 PARAMETER Experiment Name: At_10percent_PEG_P Parameter: Treatment Value: 10percent PEG vs. No Treatment
  misc_feature: MA Experiment ID: 20000574 Result: Down-regulated in Transcription
  misc_feature: MA Experiment 20000574 PARAMETER Experiment Name: At_100uM_ABA_Mutants__P Parameter: Organism Value: A. thaliana
  misc_feature: MA Experiment 20000574 PARAMETER Experiment Name: At_100uM_ABA_Mutants__P Parameter: Plant Line Value: CS23 vs. Ler wt
  misc_feature: MA Experiment 20000574 PARAMETER Experiment Name: At_100uM_ABA_Mutants__P Parameter: Timepoint (hr) Value: N/A
  misc_feature: MA Experiment 20000574 PARAMETER Experiment Name: At_100uM_ABA_Mutants__P Parameter: Tissue Value: Whole Plant
  misc_feature: MA Experiment 20000574 PARAMETER Experiment Name: At_100uM_ABA_Mutants__P Parameter: Treatment Value: None
  misc_feature: MA Experiment ID: 20000575 Result: Down-regulated in Transcription
  misc_feature: MA Experiment 20000575 PARAMETER Experiment Name: At_100uM_ABA_Mutants__P Parameter: Organism Value: A. thaliana
  misc_feature: MA Experiment 20000575 PARAMETER Experiment Name: At_100uM_ABA_Mutants__P Parameter: Plant Line Value: CS22
  misc_feature: MA Experiment 20000575 PARAMETER Experiment Name: At_100uM_ABA_Mutants__P Parameter: Timepoint (hr) Value: 6
  misc_feature: MA Experiment 20000575 PARAMETER Experiment Name: At_100uM_ABA_Mutants__P Parameter: Tissue Value: Whole Plant
  misc_feature: MA Experiment 20000575 PARAMETER Experiment Name: At_100uM_ABA_Mutants__P Parameter: Treatment Value: 1uM ABA vs. No Treatment
  misc_feature: MA Experiment ID: 20000576 Result: Down-regulated in Transcription
  misc_feature: MA Experiment 20000576 PARAMETER Experiment Name: At_100uM_ABA_Mutants__P Parameter: Organism Value: A. thaliana
  misc_feature: MA Experiment 20000576 PARAMETER Experiment Name: At_100uM_ABA_Mutants__P Parameter: Plant Line Value: CS23
  misc_feature: MA Experiment 20000576 PARAMETER Experiment Name: At_100uM_ABA_Mutants__P Parameter: Timepoint (hr) Value: 6
  misc_feature: MA Experiment 20000576 PARAMETER Experiment Name: At_100uM_ABA_Mutants__P Parameter: Tissue Value: Whole Plant
  misc_feature: MA Experiment 20000576 PARAMETER Experiment Name: At_100uM_ABA_Mutants__P Parameter: Treatment Value: 1uM ABA vs. No Treatment
  misc_feature: MA Experiment ID: 20000794 Result: Down-regulated in Transcription
  misc_feature: MA Experiment 20000794 PARAMETER Experiment Name: At_Petals_P Parameter: Age (day) Value: 23-25 days
  misc_feature: MA Experiment 20000794 PARAMETER Experiment Name: At_Petals_P Parameter: Plant Line Value: WS
  misc_feature: MA Experiment 20000794 PARAMETER Experiment Name: At_Petals_P Parameter: Tissue Value: Petals vs. Whole plant
  misc_feature: MA Experiment ID: 20001248 Result: Down-regulated in Transcription
  misc_feature: MA Experiment 20001248 PARAMETER Experiment Name: At_Far-red-induction_P Parameter: Age (day) Value: 7
  misc_feature: MA Experiment 20001248 PARAMETER Experiment Name: At_Far-red-induction_P Parameter: Light Value: Far-red vs. White
  misc_feature: MA Experiment 20001248 PARAMETER Experiment Name: At_Far-red-induction_P Parameter: Organism Value: A. thaliana
  misc_feature: MA Experiment 20001248 PARAMETER Experiment Name: At_Far-red-induction_P Parameter: Plant Line Value: Columbia
  misc_feature: MA Experiment 20001248 PARAMETER Experiment Name: At_Far-red-induction_P Parameter: Timepoint (hr) Value: 4
  misc_feature: MA Experiment 20001248 PARAMETER Experiment Name: At_Far-red-induction_P Parameter: Tissue Value: Whole Plant
  misc_feature: MA Experiment ID: 20001450 Result: Down-regulated in Transcription
  misc_feature: MA Experiment 20001450 PARAMETER Experiment Name: At_Far-red-induction_P Parameter: Age (day) Value: 7
  misc_feature: MA Experiment 20001450 PARAMETER Experiment Name: At_Far-red-induction_P Parameter: Light Value: Far-red vs. White
  misc_feature: MA Experiment 20001450 PARAMETER Experiment Name: At_Far-red-induction_P Parameter: Organism Value: A. thaliana
  misc_feature: MA Experiment 20001450 PARAMETER Experiment Name: At_Far-red-induction_P Parameter: Plant Line Value: Columbia
  misc_feature: MA Experiment 20001450 PARAMETER Experiment Name: At_Far-red-induction_P Parameter: Timepoint (hr) Value: 8
  misc_feature: MA Experiment 20001450 PARAMETER Experiment Name: At_Far-red-induction_P Parameter: Tissue Value: Whole Plant
  misc_feature: MA Experiment ID: 20001451 Result: Down-regulated in Transcription
  misc_feature: MA Experiment 20001451 PARAMETER Experiment Name: At_Far-red-induction_P Parameter: Age (day) Value: 7
  misc_feature: MA Experiment 20001451 PARAMETER Experiment Name: At_Far-red-induction_P Parameter: Light Value: Far-red vs. White
  misc_feature: MA Experiment 20001451 PARAMETER Experiment Name: At_Far-red-induction_P Parameter: Organism Value: A. thaliana
  misc_feature: MA Experiment 20001451 PARAMETER Experiment Name: At_Far-red-induction_P Parameter: Plant Line Value: Columbia
  misc_feature: MA Experiment 20001451 PARAMETER Experiment Name: At_Far-red-induction_P Parameter: Timepoint (hr) Value: 24
  misc_feature: MA Experiment 20001451 PARAMETER Experiment Name: At_Far-red-induction_P Parameter: Tissue Value: Whole Plant
  misc_feature: MA Experiment ID: 20001504 Result: Up-regulated in Transcription
  misc_feature: MA Experiment 20001504 PARAMETER Experiment Name: At_Far-red-enriched_P Parameter: Age (day) Value: 10
  misc_feature: MA Experiment 20001504 PARAMETER Experiment Name: At_Far-red-enriched_P Parameter: Light Value: Far-red enriched vs. White
  misc_feature: MA Experiment 20001504 PARAMETER Experiment Name: At_Far-red-enriched_P Parameter: Organism Value: A. thaliana
  misc_feature: MA Experiment 20001504 PARAMETER Experiment Name: At_Far-red-enriched_P Parameter: Plant Line Value: Columbia
  misc_feature: MA Experiment 20001504 PARAMETER Experiment Name: At_Far-red-enriched_P Parameter: Timepoint (day) Value: 6
  misc_feature: MA Experiment 20001504 PARAMETER Experiment Name: At_Far-red-enriched_P Parameter: Tissue Value: Whole Plant
  misc_feature: MA Experiment ID: 20001554 Result: Up-regulated in Transcription
  misc_feature: MA Experiment 20001554 PARAMETER Experiment Name: At_Drought_Soil_Dry_P Parameter: Age (day) Value: 21
  misc_feature: MA Experiment 20001554 PARAMETER Experiment Name: At_Drought_Soil_Dry_P Parameter: Organism Value: A. thaliana
  misc_feature: MA Experiment 20001554 PARAMETER Experiment Name: At_Drought_Soil_Dry_P Parameter: Plant Line Value: WS
  misc_feature: MA Experiment 20001554 PARAMETER Experiment Name: At_Drought_Soil_Dry_P Parameter: Post Timepoint (hr) Value: None
  misc_feature: MA Experiment 20001554 PARAMETER Experiment Name: At_Drought_Soil_Dry_P Parameter: Post-Treatment Value: None
  misc_feature: MA Experiment 20001554 PARAMETER Experiment Name: At_Drought_Soil_Dry_P Parameter: Timepoint (day) Value: 7
  misc_feature: MA Experiment 20001554 PARAMETER Experiment Name: At_Drought_Soil_Dry_P Parameter: Treatment Value: Drought vs. No Drought
  misc_feature: MA Experiment ID: 20001556 Result: Up-regulated in Transcription
  misc_feature: MA Experiment 20001556 PARAMETER Experiment Name: At_Drought_Soil_Dry_P Parameter: Age (day) Value: 26
  misc_feature: MA Experiment 20001556 PARAMETER Experiment Name: At_Drought_Soil_Dry_P Parameter: Organism Value: A. thaliana
  misc_feature: MA Experiment 20001556 PARAMETER Experiment Name: At_Drought_Soil_Dry_P Parameter: Plant Line Value: WS
  misc_feature: MA Experiment 20001556 PARAMETER Experiment Name: At_Drought_Soil_Dry_P Parameter: Post Timepoint (hr) Value: None
  misc_feature: MA Experiment 20001556 PARAMETER Experiment Name: At_Drought_Soil_Dry_P Parameter: Post-Treatment Value: None
  misc_feature: MA Experiment 20001556 PARAMETER Experiment Name: At_Drought_Soil_Dry_P Parameter: Timepoint (day) Value: 12
  misc_feature: MA Experiment 20001556 PARAMETER Experiment Name: At_Drought_Soil_Dry_P Parameter: Treatment Value: Drought vs. No Drought
  misc_feature: MA Experiment ID: 20001559 Result: Up-regulated in Transcription
  misc_feature: MA Experiment 20001559 PARAMETER Experiment Name: At_Drought_Soil_Dry_P Parameter: Age (day) Value: 28
  misc_feature: MA Experiment 20001559 PARAMETER Experiment Name: At_Drought_Soil_Dry_P Parameter: Organism Value: A. thaliana
  misc_feature: MA Experiment 20001559 PARAMETER Experiment Name: At_Drought_Soil_Dry_P Parameter: Plant Line Value: WS
  misc_feature: MA Experiment 20001559 PARAMETER Experiment Name: At_Drought_Soil_Dry_P Parameter: Post Timepoint (hr) Value: 29
  misc_feature: MA Experiment 20001559 PARAMETER Experiment Name: At_Drought_Soil_Dry_P Parameter: Post-Treatment Value: Re-Water vs. No Drought
  misc_feature: MA Experiment 20001559 PARAMETER Experiment Name: At_Drought_Soil_Dry_P Parameter: Timepoint (day) Value: 14
  misc_feature: MA Experiment 20001559 PARAMETER Experiment Name: At_Drought_Soil_Dry_P Parameter: Treatment Value: Drought vs. No Drought
  misc_feature: MA Experiment ID: 20001755 Result: Down-regulated in Transcription
  misc_feature: MA Experiment 20001755 PARAMETER Experiment Name: At_50mM_NH4NO3_L-to-H_P Parameter: Timepoint (hr) Value: 2
  misc_feature: MA Experiment 20001755 PARAMETER Experiment Name: At_50mM_NH4NO3_L-to-H_P Parameter: Tissue Value: Leaf
  misc_feature: MA Experiment 20001755 PARAMETER Experiment Name: At_50mM_NH4NO3_L-to-H_P Parameter: Treatment Value: 50mM NH4NO3 vs 100mM Mannitol
  misc_feature: MA Experiment ID: 20001773 Result: Up-regulated in Transcription
  misc_feature: MA Experiment 20001773 PARAMETER Experiment Name: At_Far-red-enriched-adult_P Parameter: Age (day) Value: 30
  misc_feature: MA Experiment 20001773 PARAMETER Experiment Name: At_Far-red-enriched-adult_P Parameter: Light Value: Far-red enriched vs. White
  misc_feature: MA Experiment 20001773 PARAMETER Experiment Name: At_Far-red-enriched-adult_P Parameter: Organism Value: A. thaliana
  misc_feature: MA Experiment 20001773 PARAMETER Experiment Name: At_Far-red-enriched-adult_P Parameter: Plant Line Value: Columbia
  misc_feature: MA Experiment 20001773 PARAMETER Experiment Name: At_Far-red-enriched-adult_P Parameter: Timepoint (hr) Value: 48
  misc_feature: MA Experiment 20001773 PARAMETER Experiment Name: At_Far-red-enriched-adult_P Parameter: Tissue Value: Aerial
aaaacaccataaactaaacaataaaccatacaaaaaaatatgaaaatcctctcactttcactactcttgctcttggccgctacggtctcccacgtccagtcttcggcatccgttccagggctcatcgaactcctcgaatcgaacaccatctttgggaacgaagccgaactcttagagaaagagggactgtccatcaactaccccaactgcagaagctggcaccttggtgttgagacctctaacatcataaacttcgacacggtgcccgcaaattgcaaagcctatgttgaagactacttgatcacttccaaacagtaccaatacgactccaaaactgtaaacaaagaggcatatttctacgccaaaggacttgccctaaagaacgataccatcaatgtttggatctttgacctagacgacactctcctctctagtattccctactacgccaaatatggatatgggaccgagaacacagccccgggggcgtactggtcgtggttagagtccggagaatcaacaccaggactcccggagaccttgcatctatacgaaaacctcttggaactcgggattgaacccatcataatctctgaccgatggaaaaagttgtcagaaatcactatcgagaatctcaaggctgttggtgtgacaaaatggaagcatctcatactcaagccaaacggatcgaagttgacgcaagtggtgtacaagtcaaaggtgaggaatagccttgtgaagaaaggatacaacatcgttggcaatattggagaccaatgggctgatttggttgaggatactcctggaagggtttttaagctcccaaatccactctactacgtaccttcttaattaagcatatatcttcatggcattgtccccttgtatccatttcaaatctatgtcgtttcgtttatctttgtagccgttttggcaccactgcttataaaatgccaatcctagattcctatc

SEQ ID NO: 22081 - protein, 270 aa, Arabidopsis thaliana
  peptide (1)..(270): Ceres Seq. ID no. 15222936
  misc_feature (41)..(269): Pfam Name: HAD superfamily, subfamily IIIB (Acid phosphatase) Pfam Description: HAD superfamily, subfamily IIIB (Acid
  misc_feature (1)..(270): Homolog of NCBI NO: 2373399 NR Description: vegetative storage protein [Arabidopsis thaliana]
  misc_feature (1)..(270): Homolog of NCBI NO: 21537241 NR Description: vegetative storage protein Vsp2 [Arabidopsis
  misc_feature (1)..(270): Homolog of NCBI NO: 18420836 NR Description: vegetative storage protein Vsp2 [Arabidopsis
  misc_feature (3)..(270): Homolog of NCBI NO: 629583 NR Description: vegetative storage protein, 30K - Arabidopsis
  misc_feature (1)..(270): Homolog of NCBI NO: 2373397 NR Description: vegetative storage protein [Arabidopsis thaliana]
  misc_feature (1)..(270): Homolog of NCBI NO: 18420838 NR Description: vegetative storage protein Vsp1 [Arabidopsis
  misc_feature (1)..(270): Homolog of NCBI NO: 18206363 NR Description: Vegetative storage protein 1 precursor
MKILSLSLLLLLAATVSHVQSSASVPGLIELLESNTIFGNEAELLEKEGLSINYPNCRSWHLGVETSNIINFDTVPANCKAYVEDYLITSKQYQYDSKTVNKEAYFYAKGLALKNDTINVWIFDLDDTLLSSIPYYAKYGYGTENTAPGAYWSWLESGESTPGLPETLHLYENLLELGIEPIIISDRWKKLSEITIENLKAVGVTKWKHLILKPNGSKLTQVVYKSKVRNSLVKKGYNIVGNIGDQWADLVEDTPGRVFKLPNPLYYVPS

SEQ ID NO: 22082 - DNA, 975 bp, Arabidopsis thaliana
  misc_feature (1)..(975): Ceres Seq. ID no. 12357695
  misc_feature: MA Experiment ID: 108433 Result: Up-regulated in Transcription
  misc_feature: MA Experiment 108433 PARAMETER Experiment Name: At_rhl_Mutant2_cDNA_P Parameter: Age (day) Value: 7
  misc_feature: MA Experiment 108433 PARAMETER Experiment Name: At_rhl_Mutant2_cDNA_P Parameter: Organism Value: A. thaliana
  misc_feature: MA Experiment 108433 PARAMETER Experiment Name: At_rhl_Mutant2_cDNA_P Parameter: Plant Line Value: rhl Mutant vs. wt landsburg
  misc_feature: MA Experiment 108433 PARAMETER Experiment Name: At_rhl_Mutant2_cDNA_P Parameter: Tissue Value: Roots
  misc_feature: MA Experiment ID: 108434 Result: Down-regulated in Transcription
  misc_feature: MA Experiment 108434 PARAMETER Experiment Name: At_Root_Tips_cDNA_P Parameter: Tissue Value: Root Tips
  misc_feature: MA Experiment ID: 108462 Result: Up-regulated in Transcription
  misc_feature: MA Experiment 108462 PARAMETER Experiment Name: At_Germinating_Seeds_cDNA_P Parameter: Age (day) Value: 2 vs. 0
  misc_feature: MA Experiment 108462 PARAMETER Experiment Name: At_Germinating_Seeds_cDNA_P Parameter: Tissue Value: Germinating Seeds
  misc_feature: MA Experiment ID: 108463 Result: Up-regulated in Transcription
  misc_feature: MA Experiment 108463 PARAMETER Experiment Name: At_Germinating_Seeds_cDNA_P Parameter: Age (day) Value: 3 vs. 0
  misc_feature: MA Experiment 108463 PARAMETER Experiment Name: At_Germinating_Seeds_cDNA_P Parameter: Tissue Value: Germinating Seeds
  misc_feature: MA Experiment ID: 108464 Result: Up-regulated in Transcription
  misc_feature: MA Experiment 108464 PARAMETER Experiment Name: At_Germinating_Seeds_cDNA_P Parameter: Age (day) Value: 4 vs. 0
  misc_feature: MA Experiment 108464 PARAMETER Experiment Name: At_Germinating_Seeds_cDNA_P Parameter: Tissue Value: Germinating Seeds
  misc_feature: MA Experiment ID: 108473 Result: Up-regulated in Transcription
  misc_feature: MA Experiment 108473 PARAMETER Experiment Name: At_Drought_Flowers_cDNA_P Parameter: Timepoint (hr) Value: 7 d
  misc_feature: MA Experiment 108473 PARAMETER Experiment Name: At_Drought_Flowers_cDNA_P Parameter: Tissue Value: Flower
  misc_feature: MA Experiment 108473 PARAMETER Experiment Name: At_Drought_Flowers_cDNA_P Parameter: Treatment Value: Drought vs. No Drought
  misc_feature: MA Experiment ID: 108488 Result: Down-regulated in Transcription
  misc_feature: MA Experiment ID: 108561 Result: Up-regulated in Transcription
  misc_feature: MA Experiment 108561 PARAMETER Experiment Name: At_100uM_ABA_cDNA_P Parameter: Timepoint (hr) Value: 6
  misc_feature: MA Experiment 108561 PARAMETER Experiment Name: At_100uM_ABA_cDNA_P Parameter: Tissue Value: Aerial
  misc_feature: MA Experiment 108561 PARAMETER Experiment Name: At_100uM_ABA_cDNA_P Parameter: Treatment Value: 100uM ABA vs. No Treatment
  misc_feature: MA Experiment ID: 108572 Result: Up-regulated in Transcription
  misc_feature: MA Experiment 108572 PARAMETER Experiment Name: At_Drought_cDNA_P Parameter: Timepoint (hr) Value: 1
  misc_feature: MA Experiment 108572 PARAMETER Experiment Name: At_Drought_cDNA_P Parameter: Tissue Value: Aerial
  misc_feature: MA Experiment 108572 PARAMETER Experiment Name: At_Drought_cDNA_P Parameter: Treatment Value: Drought vs. No Drought
  misc_feature: MA Experiment ID: 108573 Result: Up-regulated in Transcription
  misc_feature: MA Experiment 108573 PARAMETER Experiment Name: At_Drought_cDNA_P Parameter: Timepoint (hr) Value: 6
  misc_feature: MA Experiment 108573 PARAMETER Experiment Name: At_Drought_cDNA_P Parameter: Tissue Value: Aerial
  misc_feature: MA Experiment 108573 PARAMETER Experiment Name: At_Drought_cDNA_P Parameter: Treatment Value: Drought vs. No Drought
  misc_feature: MA Experiment ID: 108579 Result: Down-regulated in Transcription
  misc_feature: MA Experiment 108579 PARAMETER Experiment Name: At_4deg_Cold_cDNA_P Parameter: Temperature (deg C) Value: 4 vs. 22
  misc_feature: MA Experiment 108579 PARAMETER Experiment Name: At_4deg_Cold_cDNA_P Parameter: Timepoint (hr) Value: 6
  misc_feature: MA Experiment 108579 PARAMETER Experiment Name: At_4deg_Cold_cDNA_P Parameter: Tissue Value: Aerial
  misc_feature: MA Experiment ID: 108595 Result: Up-regulated in Transcription
  misc_feature: MA Experiment 108595 PARAMETER Experiment Name: At_Ler-pi_Ovule_cDNA_P Parameter: Plant Line Value: null
  misc_feature: MA Experiment ID: 108605 Result: Up-regulated in Transcription
  misc_feature: MA Experiment 108605 PARAMETER Experiment Name: At_100uM_ABA_cDNA_P Parameter: Timepoint (hr) Value: 6
  misc_feature: MA Experiment 108605 PARAMETER Experiment Name: At_100uM_ABA_cDNA_P Parameter: Tissue Value: Aerial
  misc_feature: MA Experiment 108605 PARAMETER Experiment Name: At_100uM_ABA_cDNA_P Parameter: Treatment Value: 100uM ABA vs. No Treatment
  misc_feature: MA Experiment ID: 108607 Result: Up-regulated in Transcription
  misc_feature: MA Experiment 108607 PARAMETER Experiment Name: At_100uM_ABA_cDNA_P Parameter: Timepoint (hr) Value: 4
  misc_feature: MA Experiment 108607 PARAMETER Experiment Name: At_100uM_ABA_cDNA_P Parameter: Tissue Value: Aerial
  misc_feature: MA Experiment 108607 PARAMETER Experiment Name: At_100uM_ABA_cDNA_P Parameter: Treatment Value: 100uM ABA vs. No Treatment
  misc_feature: MA Experiment ID: 108608 Result: Up-regulated in Transcription
  misc_feature: MA Experiment 108608 PARAMETER Experiment Name: At_100uM_ABA_cDNA_P Parameter: Timepoint (hr) Value: 1
  misc_feature: MA Experiment 108608 PARAMETER Experiment Name: At_100uM_ABA_cDNA_P Parameter: Tissue Value: Aerial
  misc_feature: MA Experiment 108608 PARAMETER Experiment Name: At_100uM_ABA_cDNA_P Parameter: Treatment Value: 100uM ABA vs. No Treatment
  misc_feature: MA Experiment ID: 108609 Result: Up-regulated in Transcription
  misc_feature: MA Experiment 108609 PARAMETER Experiment Name: At_100uM_ABA_cDNA_P Parameter: Timepoint (hr) Value: 24
  misc_feature: MA Experiment 108609 PARAMETER Experiment Name: At_100uM_ABA_cDNA_P Parameter: Tissue Value: Aerial
  misc_feature: MA Experiment 108609 PARAMETER Experiment Name: At_100uM_ABA_cDNA_P Parameter: Treatment Value: 100uM ABA vs. No Treatment
  misc_feature: MA Experiment ID: 108668 Result: Up-regulated in Transcription
  misc_feature: MA Experiment 108668 PARAMETER Experiment Name: At_2mM_SA_cDNA_P Parameter: Plant Line Value: WS
  misc_feature: MA Experiment 108668 PARAMETER Experiment Name: At_2mM_SA_cDNA_P Parameter: Timepoint (hr) Value: 6
  misc_feature: MA Experiment 108668 PARAMETER Experiment Name: At_2mM_SA_cDNA_P Parameter: Treatment Value: 2mM SA vs. No Treatment
  misc_feature: MA Experiment ID: 20000070 Result: Up-regulated in Transcription
  misc_feature: MA Experiment 20000070 PARAMETER Experiment Name: At_100uM_ABA_Mutants_cDNA_P Parameter: Plant Line Value: CS24
  misc_feature: MA Experiment 20000070 PARAMETER Experiment Name: At_100uM_ABA_Mutants_cDNA_P Parameter: Timepoint (hr) Value: 6
  misc_feature: MA Experiment 20000070 PARAMETER Experiment Name: At_100uM_ABA_Mutants_cDNA_P Parameter: Tissue Value: Aerial
  misc_feature: MA Experiment 20000070 PARAMETER Experiment Name: At_100uM_ABA_Mutants_cDNA_P Parameter: Treatment Value: 100uM ABA vs. No Treatment
  misc_feature: MA Experiment ID: 20000071 Result: Up-regulated in Transcription
  misc_feature: MA Experiment 20000071 PARAMETER Experiment Name: At_100uM_ABA_Mutants_cDNA_P Parameter: Plant Line Value: CS8104
  misc_feature: MA Experiment 20000071 PARAMETER Experiment Name: At_100uM_ABA_Mutants_cDNA_P Parameter: Timepoint (hr) Value: 6
  misc_feature: MA Experiment 20000071 PARAMETER Experiment Name: At_100uM_ABA_Mutants_cDNA_P Parameter: Tissue Value: Aerial
  misc_feature: MA Experiment 20000071 PARAMETER Experiment Name: At_100uM_ABA_Mutants_cDNA_P Parameter: Treatment Value: 100uM ABA vs. No Treatment
  misc_feature: MA Experiment ID: 20000087 Result: Up-regulated in Transcription
  misc_feature: MA Experiment 20000087 PARAMETER Experiment Name: At_100uM_ABA_Mutants_cDNA_P Parameter: Plant Line Value: WS
  misc_feature: MA Experiment 20000087 PARAMETER Experiment Name: At_100uM_ABA_Mutants_cDNA_P Parameter: Timepoint (hr) Value: 6
  misc_feature: MA Experiment 20000087 PARAMETER Experiment Name: At_100uM_ABA_Mutants_cDNA_P Parameter: Tissue Value: Aerial
  misc_feature: MA Experiment 20000087 PARAMETER Experiment Name: At_100uM_ABA_Mutants_cDNA_P Parameter: Treatment Value: 100uM ABA vs. No Treatment
  misc_feature: MA Experiment ID: 20000088 Result: Up-regulated in Transcription
  misc_feature: MA Experiment 20000088 PARAMETER Experiment Name: At_100uM_ABA_Mutants_cDNA_P Parameter: Plant Line Value: Landsberg
  misc_feature: MA Experiment 20000088 PARAMETER Experiment Name: At_100uM_ABA_Mutants_cDNA_P Parameter: Timepoint (hr) Value: 6
  misc_feature: MA Experiment 20000088 PARAMETER Experiment Name: At_100uM_ABA_Mutants_cDNA_P Parameter: Tissue Value: Aerial
  misc_feature: MA Experiment 20000088 PARAMETER Experiment Name: At_100uM_ABA_Mutants_cDNA_P Parameter: Treatment Value: 100uM ABA vs. No Treatment
  misc_feature: MA Experiment ID: 20000090 Result: Down-regulated in Transcription
  misc_feature: MA Experiment ID: 20000117 Result: Up-regulated in Transcription
  misc_feature: MA Experiment 20000117 PARAMETER Experiment Name: At_100uM_ABA_Mutants_cDNA_P Parameter: Plant Line Value: Columbia
  misc_feature: MA Experiment 20000117 PARAMETER Experiment Name: At_100uM_ABA_Mutants_cDNA_P Parameter: Timepoint (hr) Value: 6
  misc_feature: MA Experiment 20000117 PARAMETER Experiment Name: At_100uM_ABA_Mutants_cDNA_P Parameter: Tissue Value: Aerial
  misc_feature: MA Experiment 20000117 PARAMETER Experiment Name: At_100uM_ABA_Mutants_cDNA_P Parameter: Treatment Value: 100uM ABA vs. No Treatment
  misc_feature: MA Experiment ID: 20000166 Result: Up-regulated in Transcription
  misc_feature: MA Experiment 20000166 PARAMETER Experiment Name: At_100uM_ABA_P Parameter: Age (day) Value: 14
  misc_feature: MA Experiment 20000166 PARAMETER Experiment Name: At_100uM_ABA_P Parameter: Organism Value: A. thaliana
  misc_feature: MA Experiment 20000166 PARAMETER Experiment Name: At_100uM_ABA_P Parameter: Plant Line Value: WS
  misc_feature: MA Experiment 20000166 PARAMETER Experiment Name: At_100uM_ABA_P Parameter: Timepoint (hr) Value: 1
  misc_feature: MA Experiment 20000166 PARAMETER Experiment Name: At_100uM_ABA_P Parameter: Tissue Value: Aerial
  misc_feature: MA Experiment 20000166 PARAMETER Experiment Name: At_100uM_ABA_P Parameter: Treatment Value: 100uM ABA vs. No Treatment
  misc_feature: MA Experiment ID: 20000169 Result: Up-regulated in Transcription
  misc_feature: MA Experiment 20000169 PARAMETER Experiment Name: At_100uM_ABA_P Parameter: Age (day) Value: 14
  misc_feature: MA Experiment 20000169 PARAMETER Experiment Name: At_100uM_ABA_P Parameter: Organism Value: A. thaliana
  misc_feature: MA Experiment 20000169 PARAMETER Experiment Name: At_100uM_ABA_P Parameter: Plant Line Value: WS
  misc_feature: MA Experiment 20000169 PARAMETER Experiment Name: At_100uM_ABA_P Parameter: Timepoint (hr) Value: 6
  misc_feature: MA Experiment 20000169 PARAMETER Experiment Name: At_100uM_ABA_P Parameter: Tissue Value: Aerial
  misc_feature: MA Experiment 20000169 PARAMETER Experiment Name: At_100uM_ABA_P Parameter: Treatment Value: 100uM ABA vs. No Treatment
  misc_feature: MA Experiment ID: 20000180 Result: Up-regulated in Transcription
  misc_feature: MA Experiment 20000180 PARAMETER Experiment Name: At_Germinating_Seeds_P Parameter: Age (hr) Value: 24 vs. 0
  misc_feature: MA Experiment 20000180 PARAMETER Experiment Name: At_Germinating_Seeds_P Parameter: Tissue Value: Germinating Seeds
  misc_feature: MA Experiment ID: 20000182 Result: Up-regulated in Transcription
  misc_feature: MA Experiment 20000182 PARAMETER Experiment Name: At_2mM_SA_P Parameter: Age (day) Value: 14
  misc_feature: MA Experiment 20000182 PARAMETER Experiment Name: At_2mM_SA_P Parameter: Organism Value: A. thaliana
  misc_feature: MA Experiment 20000182 PARAMETER Experiment Name: At_2mM_SA_P Parameter: Plant Line Value: WS
  misc_feature: MA Experiment 20000182 PARAMETER Experiment Name: At_2mM_SA_P Parameter: Timepoint (hr) Value: 6
  misc_feature: MA Experiment 20000182 PARAMETER Experiment Name: At_2mM_SA_P Parameter: Tissue Value: Aerial
  misc_feature: MA Experiment 20000182 PARAMETER Experiment Name: At_2mM_SA_P Parameter: Treatment Value: 2mM SA vs. No Treatment
  misc_feature: MA Experiment ID: 20000184 Result: Down-regulated in Transcription
  misc_feature: MA Experiment 20000184 PARAMETER Experiment Name: At_Shoots__P Parameter: Age (day) Value: 7
  misc_feature: MA Experiment 20000184 PARAMETER Experiment Name: At_Shoots__P Parameter: Tissue Value: Shoots vs. Whole Plant
  misc_feature: MA Experiment ID: 20000214 Result: Down-regulated in Transcription
  misc_feature: MA Experiment 20000214 PARAMETER Experiment Name: At_4deg_Cold_P Parameter: Timepoint (hr) Value: 6
  misc_feature: MA Experiment ID: 20000224 Result: Up-regulated in Transcription
  misc_feature: MA Experiment ID: 20000227 Result: Down-regulated in Transcription
  misc_feature: MA Experiment 20000227 PARAMETER Experiment Name: At_Root-Tips-vs-Tops_P Parameter: Tissue Value: Root Tips vs. Root Tops
  misc_feature: MA Experiment ID: 20000234 Result: Down-regulated in Transcription
  misc_feature: MA Experiment 20000234 PARAMETER Experiment Name: At_Siliques_P Parameter: Age (day) Value: 21
  misc_feature: MA Experiment 20000234 PARAMETER Experiment Name: At_Siliques_P Parameter: Organism Value: A. thaliana
  misc_feature: MA Experiment 20000234 PARAMETER Experiment Name: At_Siliques_P Parameter: Plant Line Value: WS
  misc_feature: MA Experiment 20000234 PARAMETER Experiment Name: At_Siliques_P Parameter: Tissue Value: Less Than 5mm Siliques vs. Whole Plant
  misc_feature: MA Experiment ID: 20000235 Result: Down-regulated in Transcription
  misc_feature: MA Experiment 20000235 PARAMETER Experiment Name: At_Siliques_P Parameter: Age (day) Value: 21
  misc_feature: MA Experiment 20000235 PARAMETER Experiment Name: At_Siliques_P Parameter: Organism Value: A. thaliana
  misc_feature: MA Experiment 20000235 PARAMETER Experiment Name: At_Siliques_P Parameter: Plant Line Value: WS
  misc_feature: MA Experiment 20000235 PARAMETER Experiment Name: At_Siliques_P Parameter: Tissue Value: 5-10mm Siliques vs. Whole Plant
  misc_feature: MA Experiment ID: 20000267 Result: Up-regulated in Transcription
  misc_feature: MA Experiment 20000267 PARAMETER Experiment Name: At_Drought_P Parameter: Age (day) Value: 7
  misc_feature: MA Experiment 20000267 PARAMETER Experiment Name: At_Drought_P Parameter: Organism Value: A. thaliana
  misc_feature: MA Experiment 20000267 PARAMETER Experiment Name: At_Drought_P Parameter: Plant Line Value: WS
  misc_feature: MA Experiment 20000267 PARAMETER Experiment Name: At_Drought_P Parameter: Timepoint (hr) Value: 6
  misc_feature: MA Experiment 20000267 PARAMETER Experiment Name: At_Drought_P Parameter: Tissue Value: Whole Plant
  misc_feature: MA Experiment 20000267 PARAMETER Experiment Name: At_Drought_P Parameter: Treatment Value: Drought vs. No Drought
  misc_feature: MA Experiment ID: 20000268 Result: Up-regulated in Transcription
  misc_feature: MA Experiment 20000268 PARAMETER Experiment Name: At_100mM_NaCl__P Parameter: Age (day) Value: 14
  misc_feature: MA Experiment 20000268 PARAMETER Experiment Name: At_100mM_NaCl__P Parameter: Organism Value: A. thaliana
  misc_feature: MA Experiment 20000268 PARAMETER Experiment Name: At_100mM_NaCl__P Parameter: Plant Line Value: WS
  misc_feature: MA Experiment 20000268 PARAMETER Experiment Name: At_100mM_NaCl__P Parameter: Timepoint (hr) Value: 6
  misc_feature: MA Experiment 20000268 PARAMETER Experiment Name: At_100mM_NaCl__P Parameter: Tissue Value: Whole Plant
  misc_feature: MA Experiment 20000268 PARAMETER Experiment Name: At_100mM_NaCl__P Parameter: Treatment Value: 100mM NaCl vs. No Treatment
  misc_feature: MA Experiment ID: 20000436 Result: Up-regulated in Transcription
  misc_feature: MA Experiment 20000436 PARAMETER Experiment Name: At_Drought_P Parameter: Age (day) Value: 7
  misc_feature: MA Experiment 20000436 PARAMETER Experiment Name: At_Drought_P Parameter: Organism Value: A. thaliana
  misc_feature: MA Experiment 20000436 PARAMETER Experiment Name: At_Drought_P Parameter: Plant Line Value: WS
  misc_feature: MA Experiment 20000436 PARAMETER Experiment Name: At_Drought_P Parameter: Timepoint (hr) Value: 12
  misc_feature: MA Experiment 20000436 PARAMETER Experiment Name: At_Drought_P Parameter: Tissue Value: Whole Plant
  misc_feature: MA Experiment 20000436 PARAMETER Experiment Name: At_Drought_P Parameter: Treatment Value: Drought vs. No Drought
  misc_feature: MA Experiment ID: 20000437 Result: Up-regulated in Transcription
  misc_feature: MA Experiment 20000437 PARAMETER Experiment Name: At_Drought_P Parameter: Age (day) Value: 8
  misc_feature: MA Experiment 20000437 PARAMETER Experiment Name: At_Drought_P Parameter: Organism Value: A. thaliana
  misc_feature: MA Experiment 20000437 PARAMETER Experiment Name: At_Drought_P Parameter: Plant Line Value: WS
  misc_feature: MA Experiment 20000437 PARAMETER Experiment Name: At_Drought_P Parameter: Timepoint (hr) Value: 24
  misc_feature: MA Experiment 20000437 PARAMETER Experiment Name: At_Drought_P Parameter: Tissue Value: Whole Plant
  misc_feature: MA Experiment 20000437 PARAMETER Experiment Name: At_Drought_P Parameter: Treatment Value: Drought vs. No Drought
  misc_feature: MA Experiment ID: 20000453 Result: Up-regulated in Transcription
  misc_feature: MA Experiment 20000453 PARAMETER Experiment Name: At_100uM_ABA_P Parameter: Age (day) Value: 15
  misc_feature: MA Experiment 20000453 PARAMETER Experiment Name: At_100uM_ABA_P Parameter: Organism Value: A. thaliana
  misc_feature: MA Experiment 20000453 PARAMETER Experiment Name: At_100uM_ABA_P Parameter: Plant Line Value: WS
  misc_feature: MA Experiment 20000453 PARAMETER Experiment Name: At_100uM_ABA_P Parameter: Timepoint (hr) Value: 24
  misc_feature: MA Experiment 20000453 PARAMETER Experiment Name: At_100uM_ABA_P Parameter: Tissue Value: Aerial
  misc_feature: MA Experiment 20000453 PARAMETER Experiment Name: At_100uM_ABA_P Parameter: Treatment Value: 100uM ABA vs. No Treatment
  misc_feature: MA Experiment ID: 20000496 Result: Down-regulated in Transcription
  misc_feature: MA Experiment 20000496 PARAMETER Experiment Name: At_Guard_Cells_P Parameter: Harvest Date Value: 7/19/2002
  misc_feature: MA Experiment 20000496 PARAMETER Experiment Name: At_Guard_Cells_P Parameter: Organism Value: Canola
  misc_feature: MA Experiment 20000496 PARAMETER Experiment Name: At_Guard_Cells_P Parameter: Tissue Value: Guard Cells vs. Leaves
  misc_feature: MA Experiment ID: 20000709 Result: Down-regulated in Transcription
  misc_feature: MA Experiment 20000709 PARAMETER Experiment Name: At_15mM_NH4NO3_L-to-H_P Parameter: Age (hr) Value: 14
  misc_feature: MA Experiment 20000709 PARAMETER Experiment Name: At_15mM_NH4NO3_L-to-H_P Parameter: Organism Value: A. thaliana
  misc_feature: MA Experiment 20000709 PARAMETER Experiment Name: At_15mM_NH4NO3_L-to-H_P Parameter: Plant Line Value: WS
  misc_feature: MA Experiment 20000709 PARAMETER Experiment Name: At_15mM_NH4NO3_L-to-H_P Parameter: Timepoint (hr) Value: 4
  misc_feature: MA Experiment 20000709 PARAMETER Experiment Name: At_15mM_NH4NO3_L-to-H_P Parameter: Tissue Value: Aerial
  misc_feature: MA Experiment 20000709 PARAMETER Experiment Name: At_15mM_NH4NO3_L-to-H_P Parameter: Treatment Value: 15mM NH4NO3 vs. 30mM Mannitol
  misc_feature: MA Experiment ID: 20000794 Result: Up-regulated in Transcription
  misc_feature: MA Experiment 20000794 PARAMETER Experiment Name: At_Petals_P Parameter: Age (day) Value: 23-25 days
  misc_feature: MA Experiment 20000794 PARAMETER Experiment Name: At_Petals_P Parameter: Plant Line Value: WS
  misc_feature: MA Experiment 20000794 PARAMETER Experiment Name: At_Petals_P Parameter: Tissue Value: Petals vs. Whole plant
  misc_feature: MA Experiment ID: 20001450 Result: Up-regulated in Transcription
  misc_feature: MA Experiment 20001450 PARAMETER Experiment Name: At_Far-red-induction_P Parameter: Age (day) Value: 7
  misc_feature: MA Experiment 20001450 PARAMETER Experiment Name: At_Far-red-induction_P Parameter: Light Value: Far-red vs. White
  misc_feature: MA Experiment 20001450 PARAMETER Experiment Name: At_Far-red-induction_P Parameter: Organism Value: A. thaliana
  misc_feature: MA Experiment 20001450 PARAMETER Experiment Name: At_Far-red-induction_P Parameter: Plant Line Value: Columbia
  misc_feature: MA Experiment 20001450 PARAMETER Experiment Name: At_Far-red-induction_P Parameter: Timepoint (hr) Value: 8
  misc_feature: MA Experiment 20001450 PARAMETER Experiment Name: At_Far-red-induction_P Parameter: Tissue Value: Whole Plant
  misc_feature: MA Experiment ID: 20001451 Result: Up-regulated in Transcription
  misc_feature: MA Experiment 20001451 PARAMETER Experiment Name: At_Far-red-induction_P Parameter: Age (day) Value: 7
  misc_feature: MA Experiment 20001451 PARAMETER Experiment Name: At_Far-red-induction_P Parameter: Light Value: Far-red vs. White
  misc_feature: MA Experiment 20001451 PARAMETER Experiment Name: At_Far-red-induction_P Parameter: Organism Value: A. thaliana
  misc_feature: MA Experiment 20001451 PARAMETER Experiment Name: At_Far-red-induction_P Parameter: Plant Line Value: Columbia
  misc_feature: MA Experiment 20001451 PARAMETER Experiment Name: At_Far-red-induction_P Parameter: Timepoint (hr) Value: 24
  misc_feature: MA Experiment 20001451 PARAMETER Experiment Name: At_Far-red-induction_P Parameter: Tissue Value: Whole Plant
  misc_feature: MA Experiment ID: 20001555 Result: Up-regulated in Transcription
  misc_feature: MA Experiment 20001555 PARAMETER Experiment Name: At_Drought_Soil_Dry_P Parameter: Age (day) Value: 24
  misc_feature: MA Experiment 20001555 PARAMETER Experiment Name: At_Drought_Soil_Dry_P Parameter: Organism Value: A. thaliana
  misc_feature: MA Experiment 20001555 PARAMETER Experiment Name: At_Drought_Soil_Dry_P Parameter: Plant Line Value: WS
  misc_feature: MA Experiment 20001555 PARAMETER Experiment Name: At_Drought_Soil_Dry_P Parameter: Post Timepoint (hr) Value: None
  misc_feature: MA Experiment 20001555 PARAMETER Experiment Name: At_Drought_Soil_Dry_P Parameter: Post-Treatment Value: None
  misc_feature: MA Experiment 20001555 PARAMETER Experiment Name: At_Drought_Soil_Dry_P Parameter: Timepoint (day) Value: 10
  misc_feature: MA Experiment 20001555 PARAMETER Experiment Name: At_Drought_Soil_Dry_P Parameter: Treatment Value: Drought vs. No Drought
  misc_feature: MA Experiment ID: 20001557 Result: Down-regulated in Transcription
  misc_feature: MA Experiment 20001557 PARAMETER Experiment Name: At_Drought_Soil_Dry_P Parameter: Age (day) Value: 27
  misc_feature: MA Experiment 20001557 PARAMETER Experiment Name: At_Drought_Soil_Dry_P Parameter: Organism Value: A. thaliana
  misc_feature: MA Experiment 20001557 PARAMETER Experiment Name: At_Drought_Soil_Dry_P Parameter: Plant Line Value: WS
  misc_feature: MA Experiment 20001557 PARAMETER Experiment Name: At_Drought_Soil_Dry_P Parameter: Post Timepoint (hr) Value: 3
  misc_feature: MA Experiment 20001557 PARAMETER Experiment Name: At_Drought_Soil_Dry_P Parameter: Post-Treatment Value: Re-Water vs. No Drought
  misc_feature: MA Experiment 20001557 PARAMETER Experiment Name: At_Drought_Soil_Dry_P Parameter: Timepoint (day) Value: 13
  misc_feature: MA Experiment 20001557 PARAMETER Experiment Name: At_Drought_Soil_Dry_P Parameter: Treatment Value: Drought vs. No Drought
  misc_feature: MA Experiment ID: 20001559 Result: Up-regulated in Transcription
  misc_feature: MA Experiment 20001559 PARAMETER Experiment Name: At_Drought_Soil_Dry_P Parameter: Age (day) Value: 28
  misc_feature: MA Experiment 20001559 PARAMETER Experiment Name: At_Drought_Soil_Dry_P Parameter: Organism Value: A. thaliana
  misc_feature: MA Experiment 20001559 PARAMETER Experiment Name: At_Drought_Soil_Dry_P Parameter: Plant Line Value: WS
  misc_feature: MA Experiment 20001559 PARAMETER Experiment Name: At_Drought_Soil_Dry_P Parameter: Post Timepoint (hr) Value: 29
  misc_feature: MA Experiment 20001559 PARAMETER Experiment Name: At_Drought_Soil_Dry_P Parameter: Post-Treatment Value: Re-Water vs. No Drought
  misc_feature: MA Experiment 20001559 PARAMETER Experiment Name: At_Drought_Soil_Dry_P Parameter: Timepoint (day) Value: 14
  misc_feature: MA Experiment 20001559 PARAMETER Experiment Name: At_Drought_Soil_Dry_P Parameter: Treatment Value: Drought vs. No Drought
  misc_feature: MA Experiment ID: 20001904 Result: Up-regulated in Transcription
  misc_feature: MA Experiment 20001904 PARAMETER Experiment Name: At_Drought_Reproduction_P Parameter: Age (day) Value: 37
  misc_feature: MA Experiment 20001904 PARAMETER Experiment Name: At_Drought_Reproduction_P Parameter: Organism Value: A. thaliana
  misc_feature: MA Experiment 20001904 PARAMETER Experiment Name: At_Drought_Reproduction_P Parameter: Plant Line Value: WS
  misc_feature: MA Experiment 20001904 PARAMETER Experiment Name: At_Drought_Reproduction_P Parameter: Timepoint (day) Value: 7
  misc_feature: MA Experiment 20001904 PARAMETER Experiment Name: At_Drought_Reproduction_P Parameter: Tissue Value: Rosettes
  misc_feature: MA Experiment 20001904 PARAMETER Experiment Name: At_Drought_Reproduction_P Parameter: Treatment Value: Drought vs. No Drought
  misc_feature: MA Experiment ID: 20001905 Result: Up-regulated in Transcription
  misc_feature: MA Experiment 20001905 PARAMETER Experiment Name: At_Drought_Reproduction_P Parameter: Age (day) Value: 40
  misc_feature: MA Experiment 20001905 PARAMETER Experiment Name: At_Drought_Reproduction_P Parameter: Organism Value: A. thaliana
  misc_feature: MA Experiment 20001905 PARAMETER Experiment Name: At_Drought_Reproduction_P Parameter: Plant Line Value: WS
  misc_feature: MA Experiment 20001905 PARAMETER Experiment Name: At_Drought_Reproduction_P Parameter: Timepoint (day) Value: 10
  misc_feature: MA Experiment 20001905 PARAMETER Experiment Name: At_Drought_Reproduction_P Parameter: Tissue Value: Rosettes
  misc_feature: MA Experiment 20001905 PARAMETER Experiment Name: At_Drought_Reproduction_P Parameter: Treatment Value: Drought vs. No Drought
  misc_feature: MA Experiment ID: 20001906 Result: Up-regulated in Transcription
  misc_feature: MA Experiment 20001906 PARAMETER Experiment Name: At_Drought_Reproduction_P Parameter: Age (day) Value: 35
  misc_feature: MA Experiment 20001906 PARAMETER Experiment Name: At_Drought_Reproduction_P Parameter: Organism Value: A. thaliana
  misc_feature: MA Experiment 20001906 PARAMETER Experiment Name: At_Drought_Reproduction_P Parameter: Plant Line Value: WS
  misc_feature: MA Experiment 20001906 PARAMETER Experiment Name: At_Drought_Reproduction_P Parameter: Timepoint (day) Value: 5
  misc_feature: MA Experiment 20001906 PARAMETER Experiment Name: At_Drought_Reproduction_P Parameter: Tissue Value: Siliques
  misc_feature: MA Experiment 20001906 PARAMETER Experiment Name: At_Drought_Reproduction_P Parameter: Treatment Value: Drought vs. No Drought
  misc_feature: MA Experiment ID: 20001907 Result: Up-regulated in Transcription
  misc_feature: MA Experiment 20001907 PARAMETER Experiment Name: At_Drought_Reproduction_P Parameter: Age (day) Value: 37
  misc_feature: MA Experiment 20001907 PARAMETER Experiment Name: At_Drought_Reproduction_P Parameter: Organism Value: A. thaliana
  misc_feature: MA Experiment 20001907 PARAMETER Experiment Name: At_Drought_Reproduction_P Parameter: Plant Line Value: WS
  misc_feature: MA Experiment 20001907 PARAMETER Experiment Name: At_Drought_Reproduction_P Parameter: Timepoint (day) Value: 7
  misc_feature: MA Experiment 20001907 PARAMETER Experiment Name: At_Drought_Reproduction_P Parameter: Tissue Value: Siliques
  misc_feature: MA Experiment 20001907 PARAMETER Experiment Name: At_Drought_Reproduction_P Parameter: Treatment Value: Drought vs. No Drought
  misc_feature: MA Experiment ID: 20001908 Result: Up-regulated in Transcription
  misc_feature: MA Experiment 20001908 PARAMETER Experiment Name: At_Drought_Reproduction_P Parameter: Age (day) Value: 40
  misc_feature: MA Experiment 20001908 PARAMETER Experiment Name: At_Drought_Reproduction_P Parameter: Organism Value: A. thaliana
  misc_feature: MA Experiment 20001908 PARAMETER Experiment Name: At_Drought_Reproduction_P Parameter: Plant Line Value: WS
  misc_feature: MA Experiment 20001908 PARAMETER Experiment Name: At_Drought_Reproduction_P Parameter: Timepoint (day) Value: 10
  misc_feature: MA Experiment 20001908 PARAMETER Experiment Name: At_Drought_Reproduction_P Parameter: Tissue Value: Siliques
  misc_feature: MA Experiment 20001908 PARAMETER Experiment Name: At_Drought_Reproduction_P Parameter: Treatment Value: Drought vs. No Drought
  misc_feature: MA Experiment ID: 20001909 Result: Up-regulated in Transcription
  misc_feature: MA Experiment 20001909 PARAMETER Experiment Name: At_Drought_Reproduction_P Parameter: Age (day) Value: 35
  misc_feature: MA Experiment 20001909 PARAMETER Experiment Name: At_Drought_Reproduction_P Parameter: Organism Value: A. thaliana
  misc_feature: MA Experiment 20001909 PARAMETER Experiment Name: At_Drought_Reproduction_P Parameter: Plant Line Value: WS
  misc_feature: MA Experiment 20001909 PARAMETER Experiment Name: At_Drought_Reproduction_P Parameter: Timepoint (day) Value: 5
  misc_feature: MA Experiment 20001909 PARAMETER Experiment Name: At_Drought_Reproduction_P Parameter: Tissue Value: Flowers
  misc_feature: MA Experiment 20001909 PARAMETER Experiment Name: At_Drought_Reproduction_P Parameter: Treatment Value: Drought vs. No Drought
  misc_feature: MA Experiment ID: 20001910 Result: Up-regulated in Transcription
  misc_feature: MA Experiment 20001910 PARAMETER Experiment Name: At_Drought_Reproduction_P Parameter: Age (day) Value: 37
  misc_feature: MA Experiment 20001910 PARAMETER Experiment Name: At_Drought_Reproduction_P Parameter: Organism Value: A. thaliana
  misc_feature: MA Experiment 20001910 PARAMETER Experiment Name: At_Drought_Reproduction_P Parameter: Plant Line Value: WS
  misc_feature: MA Experiment 20001910 PARAMETER Experiment Name: At_Drought_Reproduction_P Parameter: Timepoint (day) Value: 7
  misc_feature: MA Experiment 20001910 PARAMETER Experiment Name: At_Drought_Reproduction_P Parameter: Tissue Value: Flowers
  misc_feature: MA Experiment 20001910 PARAMETER Experiment Name: At_Drought_Reproduction_P Parameter: Treatment Value: Drought vs. No Drought
  misc_feature: MA Experiment ID: 20001911 Result: Up-regulated in Transcription
  misc_feature: MA Experiment 20001911 PARAMETER Experiment Name: At_Drought_Reproduction_P Parameter: Age (day) Value: 40
  misc_feature: MA Experiment 20001911 PARAMETER Experiment Name: At_Drought_Reproduction_P Parameter: Organism Value: A. thaliana
  misc_feature: MA Experiment 20001911 PARAMETER Experiment Name: At_Drought_Reproduction_P Parameter: Plant Line Value: WS
  misc_feature: MA Experiment 20001911 PARAMETER Experiment Name: At_Drought_Reproduction_P Parameter: Timepoint (day) Value: 10
  misc_feature: MA Experiment 20001911 PARAMETER Experiment Name: At_Drought_Reproduction_P Parameter: Tissue Value: Flowers
  misc_feature: MA Experiment 20001911 PARAMETER Experiment Name: At_Drought_Reproduction_P Parameter: Treatment Value: Drought vs. No Drought
aaagaaagaaaaaaaagaaacaaataattccaaaaccttctctcttaatcaaaatcaagaaacttacaagatctggtgaaaaccatggaagaaggagattttttcaactgctgtttcagcgagattagtagtggcatgaccatgaataagaagaagatgaagaagagcaataaccaaaagaggtttagcgaggaacagatcaagtcacttgagcttatatttgagtctgagacgaggcttgagccgaggaagaaggttcaggtagctagagagctagggctgcaaccaagacaagtggctatatggtttcaaaacaagagggctcgatggaaaactaagcaacttgagaaagagtataacactcttagagccaattacaacaatttggcttcacaatttgaaatcatgaagaaagaaaagcaatctctggtctctgagctgcagagactaaacgaagagatgcaaaggcctaaagaagaaaagcatcatgagtgttgtggtgatcaaggactggctctaagcagcagcacagagtcgcataatggaaagagtgagccagaagggaggttagaccaagggagtgttctatgtaatgatggtgattacaacaacaacattaaaacagagtattttgggttcgaggaagagactgatcatgagctgatgaacattgtggagaaagctgatgatagttgcttgacatcttctgagaattggggaggtttcaattctgattctctcttagaccaatctagcagcaattaccctaactggtgggagttttggtcataaaagcatataagaaaaaaacagaacataagcgaagagaaagagtgtgaatagtttgtaaattatgtgttaagaaaaataaatttagtttagtttaaatcttgtttcgatctatgtatctactatgttcaatactctttgtagctaattagtagcttataatgagactagaaaagttttgaagtc

SEQ ID NO: 22083 - protein, 235 aa, Arabidopsis thaliana
  peptide (1)..(235): Ceres Seq. ID no. 12357696
  misc_feature (31)..(84): Pfam Name: Homeobox domain Pfam Description: Homeobox domain
  misc_feature (31)..(159): Homolog of NCBI NO: 29367373 NR Description: homeodomain leucine zipper protein-like protein
  misc_feature (31)..(235): Homolog of NCBI NO: 18034441 NR Description: homeodomain leucine zipper protein CPHB-5
  misc_feature (28)..(225): Homolog of NCBI NO: 22651698 NR Description: homeodomain protein Hfi22 [Nicotiana tabacum]
  misc_feature (12)..(221): Homolog of NCBI NO: 37147908 NR Description: HD-ZIP [Capsicum annuum]
  misc_feature (28)..(140): Homolog of NCBI NO: 5006857 NR Description: homeodomain leucine zipper protein [Oryza sativa]
  misc_feature (3)..(131): Homolog of NCBI NO: 5031277 NR Description: homeobox leucine zipper protein [Prunus armeniaca]
  misc_feature (1)..(177): Homolog of NCBI NO: 15226424 NR Description: homeodomain transcription factor  (ATHB-7)
  misc_feature (1)..(177): Homolog of NCBI NO: 629527 NR Description: homeotic protein Athb-7 - Arabidopsis thaliana
  misc_feature (1)..(235): Homolog of NCBI NO: 11357332 NR Description: homeobox-leucine zipper protein ATHB-12
  misc_feature (1)..(235): Homolog of NCBI NO: 15228625 NR Description: homeobox-leucine zipper protein ATHB-12
MEEGDFFNCCFSEISSGMTMNKKKMKKSNNQKRFSEEQIKSLELIFESETRLEPRKKVQVARELGLQPRQVAIWFQNKRARWKTKQLEKEYNTLRANYNNLASQFEIMKKEKQSLVSELQRLNEEMQRPKEEKHHECCGDQGLALSSSTESHNGKSEPEGRLDQGSVLCNDGDYNNNIKTEYFGFEEETDHELMNIVEKADDSCLTSSENWGGFNSDSLLDQSSSNYPNWWEFWS

SEQ ID NO: 22084 - protein, 218 aa, Arabidopsis thaliana
  peptide (1)..(218): Ceres Seq. ID no. 12357697
  misc_feature (14)..(67): Pfam Name: Homeobox domain Pfam Description: Homeobox domain
  misc_feature (14)..(142): Homolog of NCBI NO: 29367373 NR Description: homeodomain leucine zipper protein-like protein
  misc_feature (14)..(218): Homolog of NCBI NO: 18034441 NR Description: homeodomain leucine zipper protein CPHB-5
  misc_feature (11)..(208): Homolog of NCBI NO: 22651698 NR Description: homeodomain protein Hfi22 [Nicotiana tabacum]
  misc_feature (1)..(204): Homolog of NCBI NO: 37147908 NR Description: HD-ZIP [Capsicum annuum]
  misc_feature (11)..(123): Homolog of NCBI NO: 5006857 NR Description: homeodomain leucine zipper protein [Oryza sativa]
  misc_feature (1)..(114): Homolog of NCBI NO: 5031277 NR Description: homeobox leucine zipper protein [Prunus armeniaca]
  misc_feature (1)..(160): Homolog of NCBI NO: 15226424 NR Description: homeodomain transcription factor  (ATHB-7)
  misc_feature (1)..(160): Homolog of NCBI NO: 629527 NR Description: homeotic protein Athb-7 - Arabidopsis thaliana
  misc_feature (1)..(218): Homolog of NCBI NO: 11357332 NR Description: homeobox-leucine zipper protein ATHB-12
  misc_feature (1)..(218): Homolog of NCBI NO: 15228625 NR Description: homeobox-leucine zipper protein ATHB-12
MTMNKKKMKKSNNQKRFSEEQIKSLELIFESETRLEPRKKVQVARELGLQPRQVAIWFQNKRARWKTKQLEKEYNTLRANYNNLASQFEIMKKEKQSLVSELQRLNEEMQRPKEEKHHECCGDQGLALSSSTESHNGKSEPEGRLDQGSVLCNDGDYNNNIKTEYFGFEEETDHELMNIVEKADDSCLTSSENWGGFNSDSLLDQSSSNYPNWWEFWS

SEQ ID NO: 22085 - protein, 216 aa, Arabidopsis thaliana
  peptide (1)..(216): Ceres Seq. ID no. 12357698
  misc_feature (12)..(65): Pfam Name: Homeobox domain Pfam Description: Homeobox domain
  misc_feature (12)..(140): Homolog of NCBI NO: 29367373 NR Description: homeodomain leucine zipper protein-like protein
  misc_feature (12)..(216): Homolog of NCBI NO: 18034441 NR Description: homeodomain leucine zipper protein CPHB-5
  misc_feature (9)..(206): Homolog of NCBI NO: 22651698 NR Description: homeodomain protein Hfi22 [Nicotiana tabacum]
  misc_feature (1)..(202): Homolog of NCBI NO: 37147908 NR Description: HD-ZIP [Capsicum annuum]
  misc_feature (9)..(121): Homolog of NCBI NO: 5006857 NR Description: homeodomain leucine zipper protein [Oryza sativa]
  misc_feature (1)..(112): Homolog of NCBI NO: 5031277 NR Description: homeobox leucine zipper protein [Prunus armeniaca]
  misc_feature (1)..(158): Homolog of NCBI NO: 15226424 NR Description: homeodomain transcription factor  (ATHB-7)
  misc_feature (1)..(158): Homolog of NCBI NO: 629527 NR Description: homeotic protein Athb-7 - Arabidopsis thaliana
  misc_feature (1)..(216): Homolog of NCBI NO: 11357332 NR Description: homeobox-leucine zipper protein ATHB-12
  misc_feature (1)..(216): Homolog of NCBI NO: 15228625 NR Description: homeobox-leucine zipper protein ATHB-12
MNKKKMKKSNNQKRFSEEQIKSLELIFESETRLEPRKKVQVARELGLQPRQVAIWFQNKRARWKTKQLEKEYNTLRANYNNLASQFEIMKKEKQSLVSELQRLNEEMQRPKEEKHHECCGDQGLALSSSTESHNGKSEPEGRLDQGSVLCNDGDYNNNIKTEYFGFEEETDHELMNIVEKADDSCLTSSENWGGFNSDSLLDQSSSNYPNWWEFWS

SEQ ID NO: 22086 - DNA, 921 bp, Arabidopsis thaliana
  misc_feature (1)..(921): Ceres Seq. ID no. 12334098
  misc_feature: MA Experiment ID: 108461 Result: Up-regulated in Transcription
  misc_feature: MA Experiment 108461 PARAMETER Experiment Name: At_Germinating_Seeds_cDNA_P Parameter: Age (day) Value: 1 vs. 0
  misc_feature: MA Experiment 108461 PARAMETER Experiment Name: At_Germinating_Seeds_cDNA_P Parameter: Tissue Value: Germinating Seeds
  misc_feature: MA Experiment ID: 108462 Result: Up-regulated in Transcription
  misc_feature: MA Experiment 108462 PARAMETER Experiment Name: At_Germinating_Seeds_cDNA_P Parameter: Age (day) Value: 2 vs. 0
  misc_feature: MA Experiment 108462 PARAMETER Experiment Name: At_Germinating_Seeds_cDNA_P Parameter: Tissue Value: Germinating Seeds
  misc_feature: MA Experiment ID: 108463 Result: Up-regulated in Transcription
  misc_feature: MA Experiment 108463 PARAMETER Experiment Name: At_Germinating_Seeds_cDNA_P Parameter: Age (day) Value: 3 vs. 0
  misc_feature: MA Experiment 108463 PARAMETER Experiment Name: At_Germinating_Seeds_cDNA_P Parameter: Tissue Value: Germinating Seeds
  misc_feature: MA Experiment ID: 108464 Result: Up-regulated in Transcription
  misc_feature: MA Experiment 108464 PARAMETER Experiment Name: At_Germinating_Seeds_cDNA_P Parameter: Age (day) Value: 4 vs. 0
  misc_feature: MA Experiment 108464 PARAMETER Experiment Name: At_Germinating_Seeds_cDNA_P Parameter: Tissue Value: Germinating Seeds
  misc_feature: MA Experiment ID: 108573 Result: Down-regulated in Transcription
  misc_feature: MA Experiment 108573 PARAMETER Experiment Name: At_Drought_cDNA_P Parameter: Timepoint (hr) Value: 6
  misc_feature: MA Experiment 108573 PARAMETER Experiment Name: At_Drought_cDNA_P Parameter: Tissue Value: Aerial
  misc_feature: MA Experiment 108573 PARAMETER Experiment Name: At_Drought_cDNA_P Parameter: Treatment Value: Drought vs. No Drought
  misc_feature: MA Experiment ID: 108595 Result: Down-regulated in Transcription
  misc_feature: MA Experiment 108595 PARAMETER Experiment Name: At_Ler-pi_Ovule_cDNA_P Parameter: Plant Line Value: null
  misc_feature: MA Experiment ID: 20000113 Result: Down-regulated in Transcription
  misc_feature: MA Experiment 20000113 PARAMETER Experiment Name: At_42deg_Heat_cDNA_P Parameter: Temperature (deg C) Value: 42 vs. 22
  misc_feature: MA Experiment 20000113 PARAMETER Experiment Name: At_42deg_Heat_cDNA_P Parameter: Timepoint (hr) Value: 8
  misc_feature: MA Experiment 20000113 PARAMETER Experiment Name: At_42deg_Heat_cDNA_P Parameter: Tissue Value: Aerial
  misc_feature: MA Experiment ID: 20000224 Result: Down-regulated in Transcription
aacaataataatataaccattactgaaacaaagaaaagacggataagactctttttgtgaccagccaatgttaaagaaaaacaatatcttgatttcactttcttggagatgaatcctttcacattggttgatggaaagccttatcctctggatatgaggggtgagcttgatgacaccgctgctttcaaaaactttaagaagtggggcgacattgaatttcccatgccatttggaagagtgatgagttcaacagagagcttcatccacggtctagatgagaagacaagtgcctctttgaagttcactgttctgaatcccaagggaagaatttggactatggtagctggaggaggtgcaagtgtcatctatgctgataccgttggagatctcgggtatgcatctgagcttggcaattatgctgaatacagtggagcacccaaagaagacgaggttttgcagtatgccagagttgtcattgattgtgctacagcgaatccggatggaaaaagcagggctctggtaattggaggtggaattgctaacttcaccgatgttgctgctaccttcaatggcataatccgagctctcaaggaaaaagaagcaaagctgaaagcagcaaggatgcatatatttgtgaggagaggaggaccaaactaccaaaagggacttgctaaaatgagatcacttggagatgaaatcggtgtccccatcgaggtgtatggtcctgaagcaacaatgacaggtatctgcaaggaggcaatccagtacatcaccgcggctgcataagcctttacaatcttatcatttactttcataatactctttagcgtttcttgagtttgagacttgtgtttagattatgtttcacttctaatgtattttactattcataaataaagaacaagtatcttcttttttctc

SEQ ID NO: 22087 - protein, 225 aa, Arabidopsis thaliana
  peptide (1)..(225): Ceres Seq. ID no. 12334099
  misc_feature (1)..(213): Homolog of NCBI NO: 105392 NR Description: ATP citrate (pro-S)-lyase - human
  misc_feature (1)..(218): Homolog of NCBI NO: 28372804 NR Description: LD21334p [Drosophila melanogaster]
  misc_feature (1)..(218): Homolog of NCBI NO: 24653988 NR Description: ATP citrate lyase CG8322-PA
  misc_feature (1)..(218): Homolog of NCBI NO: 9229902 NR Description: ATP citrate-lyase [Ciona intestinalis]
  misc_feature (1)..(221): Homolog of NCBI NO: 15217510 NR Description: unknown protein; protein id: At1g09430.1
  misc_feature (1)..(225): Homolog of NCBI NO: 15919089 NR Description: ATP citrate lyase b-subunit [Lupinus albus]
  misc_feature (1)..(225): Homolog of NCBI NO: 21593129 NR Description: ATP citrate-lyase, putative [Arabidopsis thaliana]
  misc_feature (1)..(225): Homolog of NCBI NO: 15220186 NR Description: ATP citrate-lyase, putative
  misc_feature (1)..(225): Homolog of NCBI NO: 19698853 NR Description: similar to ATP-citrate-lyase [Arabidopsis
  misc_feature (1)..(225): Homolog of NCBI NO: 15219818 NR Description: ATP citrate-lyase, putative
MNPFTLVDGKPYPLDMRGELDDTAAFKNFKKWGDIEFPMPFGRVMSSTESFIHGLDEKTSASLKFTVLNPKGRIWTMVAGGGASVIYADTVGDLGYASELGNYAEYSGAPKEDEVLQYARVVIDCATANPDGKSRALVIGGGIANFTDVAATFNGIIRALKEKEAKLKAARMHIFVRRGGPNYQKGLAKMRSLGDEIGVPIEVYGPEATMTGICKEAIQYITAAA

SEQ ID NO: 22088 - protein, 210 aa, Arabidopsis thaliana
  peptide (1)..(210): Ceres Seq. ID no. 12334100
  misc_feature (1)..(203): Homolog of NCBI NO: 28372804 NR Description: LD21334p [Drosophila melanogaster]
  misc_feature (1)..(203): Homolog of NCBI NO: 24653988 NR Description: ATP citrate lyase CG8322-PA
  misc_feature (1)..(203): Homolog of NCBI NO: 9229902 NR Description: ATP citrate-lyase [Ciona intestinalis]
  misc_feature (1)..(206): Homolog of NCBI NO: 15217510 NR Description: unknown protein; protein id: At1g09430.1
  misc_feature (1)..(210): Homolog of NCBI NO: 15919089 NR Description: ATP citrate lyase b-subunit [Lupinus albus]
  misc_feature (1)..(210): Homolog of NCBI NO: 21593129 NR Description: ATP citrate-lyase, putative [Arabidopsis thaliana]
  misc_feature (1)..(210): Homolog of NCBI NO: 15220186 NR Description: ATP citrate-lyase, putative
  misc_feature (1)..(210): Homolog of NCBI NO: 19698853 NR Description: similar to ATP-citrate-lyase [Arabidopsis
  misc_feature (1)..(210): Homolog of NCBI NO: 15219818 NR Description: ATP citrate-lyase, putative
  misc_feature (1)..(198): Homolog of NCBI NO: 105392 NR Description: ATP citrate (pro-S)-lyase - human
MRGELDDTAAFKNFKKWGDIEFPMPFGRVMSSTESFIHGLDEKTSASLKFTVLNPKGRIWTMVAGGGASVIYADTVGDLGYASELGNYAEYSGAPKEDEVLQYARVVIDCATANPDGKSRALVIGGGIANFTDVAATFNGIIRALKEKEAKLKAARMHIFVRRGGPNYQKGLAKMRSLGDEIGVPIEVYGPEATMTGICKEAIQYITAAA

SEQ ID NO: 22089 - protein, 187 aa, Arabidopsis thaliana
  peptide (1)..(187): Ceres Seq. ID no. 12334101
  misc_feature (1)..(175): Homolog of NCBI NO: 105392 NR Description: ATP citrate (pro-S)-lyase - human
  misc_feature (1)..(180): Homolog of NCBI NO: 28372804 NR Description: LD21334p [Drosophila melanogaster]
  misc_feature (1)..(180): Homolog of NCBI NO: 24653988 NR Description: ATP citrate lyase CG8322-PA
  misc_feature (1)..(180): Homolog of NCBI NO: 9229902 NR Description: ATP citrate-lyase [Ciona intestinalis]
  misc_feature (1)..(183): Homolog of NCBI NO: 15217510 NR Description: unknown protein; protein id: At1g09430.1
  misc_feature (1)..(187): Homolog of NCBI NO: 15919089 NR Description: ATP citrate lyase b-subunit [Lupinus albus]
  misc_feature (1)..(187): Homolog of NCBI NO: 21593129 NR Description: ATP citrate-lyase, putative [Arabidopsis thaliana]
  misc_feature (1)..(187): Homolog of NCBI NO: 15220186 NR Description: ATP citrate-lyase, putative
  misc_feature (1)..(187): Homolog of NCBI NO: 19698853 NR Description: similar to ATP-citrate-lyase [Arabidopsis
  misc_feature (1)..(187): Homolog of NCBI NO: 15219818 NR Description: ATP citrate-lyase, putative
MPFGRVMSSTESFIHGLDEKTSASLKFTVLNPKGRIWTMVAGGGASVIYADTVGDLGYASELGNYAEYSGAPKEDEVLQYARVVIDCATANPDGKSRALVIGGGIANFTDVAATFNGIIRALKEKEAKLKAARMHIFVRRGGPNYQKGLAKMRSLGDEIGVPIEVYGPEATMTGICKEAIQYITAAA

SEQ ID NO: 22090 - DNA, 1604 bp, Arabidopsis thaliana
  misc_feature (1)..(1604): Ceres Seq. ID no. 12738772
  misc_feature: MA Experiment ID: 108434 Result: Up-regulated in Transcription
  misc_feature: MA Experiment 108434 PARAMETER Experiment Name: At_Root_Tips_cDNA_P Parameter: Tissue Value: Root Tips
  misc_feature: MA Experiment ID: 108461 Result: Up-regulated in Transcription
  misc_feature: MA Experiment 108461 PARAMETER Experiment Name: At_Germinating_Seeds_cDNA_P Parameter: Age (day) Value: 1 vs. 0
  misc_feature: MA Experiment 108461 PARAMETER Experiment Name: At_Germinating_Seeds_cDNA_P Parameter: Tissue Value: Germinating Seeds
  misc_feature: MA Experiment ID: 108462 Result: Up-regulated in Transcription
  misc_feature: MA Experiment 108462 PARAMETER Experiment Name: At_Germinating_Seeds_cDNA_P Parameter: Age (day) Value: 2 vs. 0
  misc_feature: MA Experiment 108462 PARAMETER Experiment Name: At_Germinating_Seeds_cDNA_P Parameter: Tissue Value: Germinating Seeds
  misc_feature: MA Experiment ID: 108463 Result: Up-regulated in Transcription
  misc_feature: MA Experiment 108463 PARAMETER Experiment Name: At_Germinating_Seeds_cDNA_P Parameter: Age (day) Value: 3 vs. 0
  misc_feature: MA Experiment 108463 PARAMETER Experiment Name: At_Germinating_Seeds_cDNA_P Parameter: Tissue Value: Germinating Seeds
  misc_feature: MA Experiment ID: 108464 Result: Up-regulated in Transcription
  misc_feature: MA Experiment 108464 PARAMETER Experiment Name: At_Germinating_Seeds_cDNA_P Parameter: Age (day) Value: 4 vs. 0
  misc_feature: MA Experiment 108464 PARAMETER Experiment Name: At_Germinating_Seeds_cDNA_P Parameter: Tissue Value: Germinating Seeds
  misc_feature: MA Experiment ID: 108561 Result: Down-regulated in Transcription
  misc_feature: MA Experiment 108561 PARAMETER Experiment Name: At_100uM_ABA_cDNA_P Parameter: Timepoint (hr) Value: 6
  misc_feature: MA Experiment 108561 PARAMETER Experiment Name: At_100uM_ABA_cDNA_P Parameter: Tissue Value: Aerial
  misc_feature: MA Experiment 108561 PARAMETER Experiment Name: At_100uM_ABA_cDNA_P Parameter: Treatment Value: 100uM ABA vs. No Treatment
  misc_feature: MA Experiment ID: 108577 Result: Down-regulated in Transcription
  misc_feature: MA Experiment 108577 PARAMETER Experiment Name: At_42deg_Heat_cDNA_P Parameter: Temperature (deg C) Value: 42 vs. 22
  misc_feature: MA Experiment 108577 PARAMETER Experiment Name: At_42deg_Heat_cDNA_P Parameter: Timepoint (hr) Value: 6
  misc_feature: MA Experiment 108577 PARAMETER Experiment Name: At_42deg_Heat_cDNA_P Parameter: Tissue Value: Aerial
  misc_feature: MA Experiment ID: 108585 Result: Down-regulated in Transcription
  misc_feature: MA Experiment 108585 PARAMETER Experiment Name: At_5mM_NaNP_cDNA_P Parameter: Timepoint (hr) Value: 6
  misc_feature: MA Experiment 108585 PARAMETER Experiment Name: At_5mM_NaNP_cDNA_P Parameter: Tissue Value: Aerial
  misc_feature: MA Experiment 108585 PARAMETER Experiment Name: At_5mM_NaNP_cDNA_P Parameter: Treatment Value: null
  misc_feature: MA Experiment ID: 20000069 Result: Down-regulated in Transcription
  misc_feature: MA Experiment 20000069 PARAMETER Experiment Name: At_100uM_ABA_Mutants_cDNA_P Parameter: Plant Line Value: CS23
  misc_feature: MA Experiment 20000069 PARAMETER Experiment Name: At_100uM_ABA_Mutants_cDNA_P Parameter: Timepoint (hr) Value: 6
  misc_feature: MA Experiment 20000069 PARAMETER Experiment Name: At_100uM_ABA_Mutants_cDNA_P Parameter: Tissue Value: Aerial
  misc_feature: MA Experiment 20000069 PARAMETER Experiment Name: At_100uM_ABA_Mutants_cDNA_P Parameter: Treatment Value: 100uM ABA vs. No Treatment
  misc_feature: MA Experiment ID: 20000071 Result: Down-regulated in Transcription
  misc_feature: MA Experiment 20000071 PARAMETER Experiment Name: At_100uM_ABA_Mutants_cDNA_P Parameter: Plant Line Value: CS8104
  misc_feature: MA Experiment 20000071 PARAMETER Experiment Name: At_100uM_ABA_Mutants_cDNA_P Parameter: Timepoint (hr) Value: 6
  misc_feature: MA Experiment 20000071 PARAMETER Experiment Name: At_100uM_ABA_Mutants_cDNA_P Parameter: Tissue Value: Aerial
  misc_feature: MA Experiment 20000071 PARAMETER Experiment Name: At_100uM_ABA_Mutants_cDNA_P Parameter: Treatment Value: 100uM ABA vs. No Treatment
  misc_feature: MA Experiment ID: 20000111 Result: Down-regulated in Transcription
  misc_feature: MA Experiment 20000111 PARAMETER Experiment Name: At_42deg_Heat_cDNA_P Parameter: Temperature (deg C) Value: 42 vs. 22
  misc_feature: MA Experiment 20000111 PARAMETER Experiment Name: At_42deg_Heat_cDNA_P Parameter: Timepoint (hr) Value: 6
  misc_feature: MA Experiment 20000111 PARAMETER Experiment Name: At_42deg_Heat_cDNA_P Parameter: Tissue Value: Aerial
  misc_feature: MA Experiment ID: 20000113 Result: Down-regulated in Transcription
  misc_feature: MA Experiment 20000113 PARAMETER Experiment Name: At_42deg_Heat_cDNA_P Parameter: Temperature (deg C) Value: 42 vs. 22
  misc_feature: MA Experiment 20000113 PARAMETER Experiment Name: At_42deg_Heat_cDNA_P Parameter: Timepoint (hr) Value: 8
  misc_feature: MA Experiment 20000113 PARAMETER Experiment Name: At_42deg_Heat_cDNA_P Parameter: Tissue Value: Aerial
  misc_feature: MA Experiment ID: 20000117 Result: Down-regulated in Transcription
  misc_feature: MA Experiment 20000117 PARAMETER Experiment Name: At_100uM_ABA_Mutants_cDNA_P Parameter: Plant Line Value: Columbia
  misc_feature: MA Experiment 20000117 PARAMETER Experiment Name: At_100uM_ABA_Mutants_cDNA_P Parameter: Timepoint (hr) Value: 6
  misc_feature: MA Experiment 20000117 PARAMETER Experiment Name: At_100uM_ABA_Mutants_cDNA_P Parameter: Tissue Value: Aerial
  misc_feature: MA Experiment 20000117 PARAMETER Experiment Name: At_100uM_ABA_Mutants_cDNA_P Parameter: Treatment Value: 100uM ABA vs. No Treatment
  misc_feature: MA Experiment ID: 20000144 Result: Down-regulated in Transcription
  misc_feature: MA Experiment 20000144 PARAMETER Experiment Name: At_42deg_Heat_cDNA_P Parameter: Temperature (deg C) Value: 42 vs. 22
  misc_feature: MA Experiment 20000144 PARAMETER Experiment Name: At_42deg_Heat_cDNA_P Parameter: Timepoint (hr) Value: 1
  misc_feature: MA Experiment 20000144 PARAMETER Experiment Name: At_42deg_Heat_cDNA_P Parameter: Tissue Value: Aerial
  misc_feature: MA Experiment ID: 20000224 Result: Up-regulated in Transcription
  misc_feature: MA Experiment ID: 20000307 Result: Up-regulated in Transcription
  misc_feature: MA Experiment 20000307 PARAMETER Experiment Name: At_Germinating_Seeds_Sub_P Parameter: Age (hr) Value: 24 vs. 0
  misc_feature: MA Experiment 20000307 PARAMETER Experiment Name: At_Germinating_Seeds_Sub_P Parameter: Organism Value: A. thaliana
  misc_feature: MA Experiment 20000307 PARAMETER Experiment Name: At_Germinating_Seeds_Sub_P Parameter: Plant Line Value: WS
  misc_feature: MA Experiment 20000307 PARAMETER Experiment Name: At_Germinating_Seeds_Sub_P Parameter: Tissue Value: Germinating Seeds
aaatcaatggcaaaaaattagcttttagaattccccaagaacaaaaacaaaaaatgtccgagagaaattagggaaaaacaaaacaaataaaatctgggtgtaggggagagagagctcgtgctcgtgattttgatatctatctcttcgttatcgattttgaacatccacattgttcttagatctgaagaaaaaaaacacgggttctgttattacgatttgctcggcgattttgacaccaggctttcaattcttttcgttggaggtgattcgatttcagatccatcggatctaatctcggcgagtcgattcgtggtcgacatttttcaaaaactgctcgcgtggatctgaagaagagacattgttgtcttttgtatatcggcactgaatttttctgggaatctgtgtaaagatggatccaatatcagcggttagcgaagagctggctgagatcgaaggacaaatcaatgacatcttccgtgctttatcaaatggattccagaagctggagaagatcaaagatgctaataggcagagtaggcagctggaagaactcactgacaaaatgcgtgactgtaagagccttattaaagatttcgatagggaaatcaaaagcttggaaagcggtaatgatgccagcactaaccggatgttgaacgatagacgacaatctatggttaaggaactcaactcatatgttgctcttaagaagaaatactcatcaaacctagcaagcaataacaagcgagtagatcttttcgatggacctggagaagaacacatggaagaaaatgtcttattagcttcaaacatgtccaatcaagagttaatggataaaggaaactcaatgatggatgacacagatcaagctattgagagagggaaaaagattgtacaagaaactataaatgtgggaacagatacttcagcagctctcaaggctcagaccgagcaaatgagtagagttgtcaatgagctcgattctattcatttctcactcaagaaagcctccaagctggtcaaggaaattggtaggcaggttgccactgacaaatgtattatggcatttcttttccttatcgtcattggtgtcatagcaatcatcatcgtcaagattgtgaacccaaacaacaaagacattcgcgacataccgggtgtgggcctagctccaccagccatgaacagacgtctgctctggaaccattactgaaaaaaaatatctcattttcacaccattcaaaatactggtacgttgcacacttttttgtcccatacacatcttgatcctccccttagtcatgttgttgtagatgaaaccgcctcacttgagaaagtaaccagtttcgattcacatggctcttggctgctgcacgtttgagcagtcacaggaatcaaattccctttcgttaaaaacccaggatcaaaaccatcttttttagctcatgtgtttgtataaggatgactcttttgtgttctatcatatgtacgtttatttttaaaacgtcttctctgtttcatgttctggtaataaaaacttgtttcactggttcaaagttgtaactgagttgtatcatattcgatatatattagtatatgacttcactctc

SEQ ID NO: 22091 - protein, 265 aa, Arabidopsis thaliana
  peptide (1)..(265): Ceres Seq. ID no. 12738773
  misc_feature (78)..(213): Pfam Name: Vesicle transport v-SNARE protein Pfam Description: Vesicle transport v-SNARE protein
  misc_feature (7)..(210): Homolog of NCBI NO: 25370781 NR Description: F11A17.20 [imported] - Arabidopsis thaliana
  misc_feature (2)..(262): Homolog of NCBI NO: 25370781 NR Description: F11A17.20 [imported] - Arabidopsis thaliana
  misc_feature (7)..(261): Homolog of NCBI NO: 34896946 NR Description: putative vesicle soluble NSF attachment protein
  misc_feature (7)..(262): Homolog of NCBI NO: 21536876 NR Description: unknown [Arabidopsis thaliana]
  misc_feature (7)..(262): Homolog of NCBI NO: 22330102 NR Description: unknown protein
  misc_feature (7)..(261): Homolog of NCBI NO: 23237830 NR Description: contains ESTs
  misc_feature (7)..(262): Homolog of NCBI NO: 18401508 NR Description: expressed protein
  misc_feature (1)..(265): Homolog of NCBI NO: 25370780 NR Description: hypothetical protein At2g35190 [imported] -
  misc_feature (1)..(265): Homolog of NCBI NO: 27805643 NR Description: Novel plant SNARE 11 (AtNPSN11)
  misc_feature (1)..(265): Homolog of NCBI NO: 18403771 NR Description: expressed protein
MDPISAVSEELAEIEGQINDIFRALSNGFQKLEKIKDANRQSRQLEELTDKMRDCKSLIKDFDREIKSLESGNDASTNRMLNDRRQSMVKELNSYVALKKKYSSNLASNNKRVDLFDGPGEEHMEENVLLASNMSNQELMDKGNSMMDDTDQAIERGKKIVQETINVGTDTSAALKAQTEQMSRVVNELDSIHFSLKKASKLVKEIGRQVATDKCIMAFLFLIVIGVIAIIIVKIVNPNNKDIRDIPGVGLAPPAMNRRLLWNHY

SEQ ID NO: 22092 - protein, 214 aa, Arabidopsis thaliana
  peptide (1)..(214): Ceres Seq. ID no. 12738774
  misc_feature (27)..(162): Pfam Name: Vesicle transport v-SNARE protein Pfam Description: Vesicle transport v-SNARE protein
  misc_feature (1)..(159): Homolog of NCBI NO: 25370781 NR Description: F11A17.20 [imported] - Arabidopsis thaliana
  misc_feature (1)..(211): Homolog of NCBI NO: 25370781 NR Description: F11A17.20 [imported] - Arabidopsis thaliana
  misc_feature (1)..(210): Homolog of NCBI NO: 34896946 NR Description: putative vesicle soluble NSF attachment protein
  misc_feature (1)..(211): Homolog of NCBI NO: 21536876 NR Description: unknown [Arabidopsis thaliana]
  misc_feature (1)..(211): Homolog of NCBI NO: 22330102 NR Description: unknown protein
  misc_feature (1)..(210): Homolog of NCBI NO: 23237830 NR Description: contains ESTs
  misc_feature (1)..(211): Homolog of NCBI NO: 18401508 NR Description: expressed protein
  misc_feature (1)..(214): Homolog of NCBI NO: 25370780 NR Description: hypothetical protein At2g35190 [imported] -
  misc_feature (1)..(214): Homolog of NCBI NO: 27805643 NR Description: Novel plant SNARE 11 (AtNPSN11)
  misc_feature (1)..(214): Homolog of NCBI NO: 18403771 NR Description: expressed protein
MRDCKSLIKDFDREIKSLESGNDASTNRMLNDRRQSMVKELNSYVALKKKYSSNLASNNKRVDLFDGPGEEHMEENVLLASNMSNQELMDKGNSMMDDTDQAIERGKKIVQETINVGTDTSAALKAQTEQMSRVVNELDSIHFSLKKASKLVKEIGRQVATDKCIMAFLFLIVIGVIAIIIVKIVNPNNKDIRDIPGVGLAPPAMNRRLLWNHY

SEQ ID NO: 22093 - protein, 186 aa, Arabidopsis thaliana
  peptide (1)..(186): Ceres Seq. ID no. 12738775
  misc_feature (1)..(134): Pfam Name: Vesicle transport v-SNARE protein Pfam Description: Vesicle transport v-SNARE protein
  misc_feature (1)..(131): Homolog of NCBI NO: 25370781 NR Description: F11A17.20 [imported] - Arabidopsis thaliana
  misc_feature (1)..(183): Homolog of NCBI NO: 25370781 NR Description: F11A17.20 [imported] - Arabidopsis thaliana
  misc_feature (1)..(182): Homolog of NCBI NO: 34896946 NR Description: putative vesicle soluble NSF attachment protein
  misc_feature (1)..(183): Homolog of NCBI NO: 21536876 NR Description: unknown [Arabidopsis thaliana]
  misc_feature (1)..(183): Homolog of NCBI NO: 22330102 NR Description: unknown protein
  misc_feature (1)..(182): Homolog of NCBI NO: 23237830 NR Description: contains ESTs
  misc_feature (1)..(183): Homolog of NCBI NO: 18401508 NR Description: expressed protein
  misc_feature (1)..(186): Homolog of NCBI NO: 25370780 NR Description: hypothetical protein At2g35190 [imported] -
  misc_feature (1)..(186): Homolog of NCBI NO: 27805643 NR Description: Novel plant SNARE 11 (AtNPSN11)
  misc_feature (1)..(186): Homolog of NCBI NO: 18403771 NR Description: expressed protein
MLNDRRQSMVKELNSYVALKKKYSSNLASNNKRVDLFDGPGEEHMEENVLLASNMSNQELMDKGNSMMDDTDQAIERGKKIVQETINVGTDTSAALKAQTEQMSRVVNELDSIHFSLKKASKLVKEIGRQVATDKCIMAFLFLIVIGVIAIIIVKIVNPNNKDIRDIPGVGLAPPAMNRRLLWNHY

SEQ ID NO: 22094 - DNA, 1308 bp, Arabidopsis thaliana
  misc_feature (1)..(1308): Ceres Seq. ID no. 12421649
  misc_feature: MA Experiment ID: 108462 Result: Down-regulated in Transcription
  misc_feature: MA Experiment 108462 PARAMETER Experiment Name: At_Germinating_Seeds_cDNA_P Parameter: Age (day) Value: 2 vs. 0
  misc_feature: MA Experiment 108462 PARAMETER Experiment Name: At_Germinating_Seeds_cDNA_P Parameter: Tissue Value: Germinating Seeds
  misc_feature: MA Experiment ID: 108463 Result: Down-regulated in Transcription
  misc_feature: MA Experiment 108463 PARAMETER Experiment Name: At_Germinating_Seeds_cDNA_P Parameter: Age (day) Value: 3 vs. 0
  misc_feature: MA Experiment 108463 PARAMETER Experiment Name: At_Germinating_Seeds_cDNA_P Parameter: Tissue Value: Germinating Seeds
  misc_feature: MA Experiment ID: 108464 Result: Down-regulated in Transcription
  misc_feature: MA Experiment 108464 PARAMETER Experiment Name: At_Germinating_Seeds_cDNA_P Parameter: Age (day) Value: 4 vs. 0
  misc_feature: MA Experiment 108464 PARAMETER Experiment Name: At_Germinating_Seeds_cDNA_P Parameter: Tissue Value: Germinating Seeds
  misc_feature: MA Experiment ID: 108585 Result: Down-regulated in Transcription
  misc_feature: MA Experiment 108585 PARAMETER Experiment Name: At_5mM_NaNP_cDNA_P Parameter: Timepoint (hr) Value: 6
  misc_feature: MA Experiment 108585 PARAMETER Experiment Name: At_5mM_NaNP_cDNA_P Parameter: Tissue Value: Aerial
  misc_feature: MA Experiment 108585 PARAMETER Experiment Name: At_5mM_NaNP_cDNA_P Parameter: Treatment Value: null
  misc_feature: MA Experiment ID: 108595 Result: Down-regulated in Transcription
  misc_feature: MA Experiment 108595 PARAMETER Experiment Name: At_Ler-pi_Ovule_cDNA_P Parameter: Plant Line Value: null
  misc_feature: MA Experiment ID: 108668 Result: Down-regulated in Transcription
  misc_feature: MA Experiment 108668 PARAMETER Experiment Name: At_2mM_SA_cDNA_P Parameter: Plant Line Value: WS
  misc_feature: MA Experiment 108668 PARAMETER Experiment Name: At_2mM_SA_cDNA_P Parameter: Timepoint (hr) Value: 6
  misc_feature: MA Experiment 108668 PARAMETER Experiment Name: At_2mM_SA_cDNA_P Parameter: Treatment Value: 2mM SA vs. No Treatment
  misc_feature: MA Experiment ID: 20000185 Result: Down-regulated in Transcription
  misc_feature: MA Experiment 20000185 PARAMETER Experiment Name: At_Roots__P Parameter: Age (day) Value: 7 vs. 21
  misc_feature: MA Experiment 20000185 PARAMETER Experiment Name: At_Roots__P Parameter: Organism Value: A. thaliana
  misc_feature: MA Experiment 20000185 PARAMETER Experiment Name: At_Roots__P Parameter: Tissue Value: Roots vs. Whole Plant
  misc_feature: MA Experiment ID: 20000224 Result: Up-regulated in Transcription
  misc_feature: MA Experiment ID: 20000234 Result: Up-regulated in Transcription
  misc_feature: MA Experiment 20000234 PARAMETER Experiment Name: At_Siliques_P Parameter: Age (day) Value: 21
  misc_feature: MA Experiment 20000234 PARAMETER Experiment Name: At_Siliques_P Parameter: Organism Value: A. thaliana
  misc_feature: MA Experiment 20000234 PARAMETER Experiment Name: At_Siliques_P Parameter: Plant Line Value: WS
  misc_feature: MA Experiment 20000234 PARAMETER Experiment Name: At_Siliques_P Parameter: Tissue Value: Less Than 5mm Siliques vs. Whole Plant
  misc_feature: MA Experiment ID: 20000437 Result: Down-regulated in Transcription
  misc_feature: MA Experiment 20000437 PARAMETER Experiment Name: At_Drought_P Parameter: Age (day) Value: 8
  misc_feature: MA Experiment 20000437 PARAMETER Experiment Name: At_Drought_P Parameter: Organism Value: A. thaliana
  misc_feature: MA Experiment 20000437 PARAMETER Experiment Name: At_Drought_P Parameter: Plant Line Value: WS
  misc_feature: MA Experiment 20000437 PARAMETER Experiment Name: At_Drought_P Parameter: Timepoint (hr) Value: 24
  misc_feature: MA Experiment 20000437 PARAMETER Experiment Name: At_Drought_P Parameter: Tissue Value: Whole Plant
  misc_feature: MA Experiment 20000437 PARAMETER Experiment Name: At_Drought_P Parameter: Treatment Value: Drought vs. No Drought
  misc_feature: MA Experiment ID: 20000439 Result: Down-regulated in Transcription
  misc_feature: MA Experiment 20000439 PARAMETER Experiment Name: At_Roots__P Parameter: Age (day) Value: 14 vs. 21
  misc_feature: MA Experiment 20000439 PARAMETER Experiment Name: At_Roots__P Parameter: Organism Value: A. thaliana
  misc_feature: MA Experiment 20000439 PARAMETER Experiment Name: At_Roots__P Parameter: Tissue Value: Roots vs. Whole Plant
  misc_feature: MA Experiment ID: 20001556 Result: Up-regulated in Transcription
  misc_feature: MA Experiment 20001556 PARAMETER Experiment Name: At_Drought_Soil_Dry_P Parameter: Age (day) Value: 26
  misc_feature: MA Experiment 20001556 PARAMETER Experiment Name: At_Drought_Soil_Dry_P Parameter: Organism Value: A. thaliana
  misc_feature: MA Experiment 20001556 PARAMETER Experiment Name: At_Drought_Soil_Dry_P Parameter: Plant Line Value: WS
  misc_feature: MA Experiment 20001556 PARAMETER Experiment Name: At_Drought_Soil_Dry_P Parameter: Post Timepoint (hr) Value: None
  misc_feature: MA Experiment 20001556 PARAMETER Experiment Name: At_Drought_Soil_Dry_P Parameter: Post-Treatment Value: None
  misc_feature: MA Experiment 20001556 PARAMETER Experiment Name: At_Drought_Soil_Dry_P Parameter: Timepoint (day) Value: 12
  misc_feature: MA Experiment 20001556 PARAMETER Experiment Name: At_Drought_Soil_Dry_P Parameter: Treatment Value: Drought vs. No Drought
  misc_feature: MA Experiment ID: 20001558 Result: Up-regulated in Transcription
  misc_feature: MA Experiment 20001558 PARAMETER Experiment Name: At_Drought_Soil_Dry_P Parameter: Age (day) Value: 27
  misc_feature: MA Experiment 20001558 PARAMETER Experiment Name: At_Drought_Soil_Dry_P Parameter: Organism Value: A. thaliana
  misc_feature: MA Experiment 20001558 PARAMETER Experiment Name: At_Drought_Soil_Dry_P Parameter: Plant Line Value: WS
  misc_feature: MA Experiment 20001558 PARAMETER Experiment Name: At_Drought_Soil_Dry_P Parameter: Post Timepoint (hr) Value: 6
  misc_feature: MA Experiment 20001558 PARAMETER Experiment Name: At_Drought_Soil_Dry_P Parameter: Post-Treatment Value: Re-Water vs. No Drought
  misc_feature: MA Experiment 20001558 PARAMETER Experiment Name: At_Drought_Soil_Dry_P Parameter: Timepoint (day) Value: 13
  misc_feature: MA Experiment 20001558 PARAMETER Experiment Name: At_Drought_Soil_Dry_P Parameter: Treatment Value: Drought vs. No Drought
atgataaccattagacagaagcacccttggatgtttttccctgatattgtaccaattggtcatcctattttcgatatcattaactcgactgatcctgagattgattgggatatcagattagcgtgtcttctgttattctcttttgatcgagatgatcacttctggcggctctatggcgatttcctgccggctgctgatgagtgcagcagcttgcttttagctacagaggaagaccttgcggagcttcaagatccttatcttgtttcaactattagacaacaacagaaacgaatcctagatttttgggaaaagaattggcattcaggtgttcctctcaaaatcaaaaggcttgccgaggatccagaaagattcatatgggcggttagtatggcacagacacgatgcatcagtatgcaaactagggtcggtgctttggttcaggaattaaatatgatgattccttatgctgacatgctaaaccactcatttgaaccaaactgtttcctacattggcgtcctaaagatcgcatgctggaggttatgtcaaatgctggtcaagacattaagaaaggcgaagagatgacgattaattacatgccaggccagaaaaacaacatgcttatggaaagatacggcttctcaactcctgtgaatccgtgggatgctataaagttctctggagattctcgcatccatttaaattcctttttatcggtcttcaatatttatggtcttcctgaagaatattaccatgacagcgagttatcgaggggcgatacttttgttgatggagcagttatcgctgcagcaagaacattacctacttggtcagacatagatcttcctccaataccgagtgcggaaagaaaagcagttaaagaattgcaagatgaatgtcgaaagatgcttgcggaatatcccacaacagcagagcaagaccagaagttgctagattcaatgtcagaagcaaggacaacatttgcaacagcggttaagtatagaatgcacagaaagatgttcatcggaaaaattatcaaggcacttgacatctatcaagaacggttactctattgattcaagcaaaaaataattatgagctgagtgagattcatacttggtgctcactcccttgagctacttagaaactgcaccatgtaattgaaaggttcctgtttttttttttgtttagtgtaaggttatgtatttgtatggaacagttagactaagtgtgttagtttgttttaatcgcaatcacaaacaaatcataacctcttcttttcttggctgctttaatgagtttgattagtc

SEQ ID NO: 22095 - protein, 357 aa, Arabidopsis thaliana
  peptide (1)..(357): Ceres Seq. ID no. 12421650
  misc_feature (1)..(161): Homolog of NCBI NO: 7485732 NR Description: hypothetical protein F18F4.220 - Arabidopsis
  misc_feature (1)..(161): Homolog of NCBI NO: 30684996 NR Description: expressed protein [Arabidopsis thaliana]
  misc_feature (158)..(317): Homolog of NCBI NO: 7485733 NR Description: hypothetical protein F18F4.230 - Arabidopsis
  misc_feature (158)..(357): Homolog of NCBI NO: 30685001 NR Description: expressed protein [Arabidopsis thaliana]
  misc_feature (1)..(357): Homolog of NCBI NO: 28393566 NR Description: unknown protein [Arabidopsis thaliana]
MITIRQKHPWMFFPDIVPIGHPIFDIINSTDPEIDWDIRLACLLLFSFDRDDHFWRLYGDFLPAADECSSLLLATEEDLAELQDPYLVSTIRQQQKRILDFWEKNWHSGVPLKIKRLAEDPERFIWAVSMAQTRCISMQTRVGALVQELNMMIPYADMLNHSFEPNCFLHWRPKDRMLEVMSNAGQDIKKGEEMTINYMPGQKNNMLMERYGFSTPVNPWDAIKFSGDSRIHLNSFLSVFNIYGLPEEYYHDSELSRGDTFVDGAVIAAARTLPTWSDIDLPPIPSAERKAVKELQDECRKMLAEYPTTAEQDQKLLDSMSEARTTFATAVKYRMHRKMFIGKIIKALDIYQERLLY

SEQ ID NO: 22096 - protein, 347 aa, Arabidopsis thaliana
  peptide (1)..(347): Ceres Seq. ID no. 12421651
  misc_feature (1)..(151): Homolog of NCBI NO: 7485732 NR Description: hypothetical protein F18F4.220 - Arabidopsis
  misc_feature (1)..(151): Homolog of NCBI NO: 30684996 NR Description: expressed protein [Arabidopsis thaliana]
  misc_feature (148)..(307): Homolog of NCBI NO: 7485733 NR Description: hypothetical protein F18F4.230 - Arabidopsis
  misc_feature (148)..(347): Homolog of NCBI NO: 30685001 NR Description: expressed protein [Arabidopsis thaliana]
  misc_feature (1)..(347): Homolog of NCBI NO: 28393566 NR Description: unknown protein [Arabidopsis thaliana]
MFFPDIVPIGHPIFDIINSTDPEIDWDIRLACLLLFSFDRDDHFWRLYGDFLPAADECSSLLLATEEDLAELQDPYLVSTIRQQQKRILDFWEKNWHSGVPLKIKRLAEDPERFIWAVSMAQTRCISMQTRVGALVQELNMMIPYADMLNHSFEPNCFLHWRPKDRMLEVMSNAGQDIKKGEEMTINYMPGQKNNMLMERYGFSTPVNPWDAIKFSGDSRIHLNSFLSVFNIYGLPEEYYHDSELSRGDTFVDGAVIAAARTLPTWSDIDLPPIPSAERKAVKELQDECRKMLAEYPTTAEQDQKLLDSMSEARTTFATAVKYRMHRKMFIGKIIKALDIYQERLLY

SEQ ID NO: 22097 - protein, 228 aa, Arabidopsis thaliana
  peptide (1)..(228): Ceres Seq. ID no. 12421652
  misc_feature (1)..(32): Homolog of NCBI NO: 7485732 NR Description: hypothetical protein F18F4.220 - Arabidopsis
  misc_feature (1)..(32): Homolog of NCBI NO: 30684996 NR Description: expressed protein [Arabidopsis thaliana]
  misc_feature (29)..(188): Homolog of NCBI NO: 7485733 NR Description: hypothetical protein F18F4.230 - Arabidopsis
  misc_feature (29)..(228): Homolog of NCBI NO: 30685001 NR Description: expressed protein [Arabidopsis thaliana]
  misc_feature (1)..(228): Homolog of NCBI NO: 28393566 NR Description: unknown protein [Arabidopsis thaliana]
MAQTRCISMQTRVGALVQELNMMIPYADMLNHSFEPNCFLHWRPKDRMLEVMSNAGQDIKKGEEMTINYMPGQKNNMLMERYGFSTPVNPWDAIKFSGDSRIHLNSFLSVFNIYGLPEEYYHDSELSRGDTFVDGAVIAAARTLPTWSDIDLPPIPSAERKAVKELQDECRKMLAEYPTTAEQDQKLLDSMSEARTTFATAVKYRMHRKMFIGKIIKALDIYQERLLY

SEQ ID NO: 22098 - DNA, 503 bp, Arabidopsis thaliana
  misc_feature (1)..(503): Ceres Seq. ID no. 12334102
  misc_feature: MA Experiment ID: 108434 Result: Up-regulated in Transcription
  misc_feature: MA Experiment 108434 PARAMETER Experiment Name: At_Root_Tips_cDNA_P Parameter: Tissue Value: Root Tips
  misc_feature: MA Experiment ID: 108462 Result: Up-regulated in Transcription
  misc_feature: MA Experiment 108462 PARAMETER Experiment Name: At_Germinating_Seeds_cDNA_P Parameter: Age (day) Value: 2 vs. 0
  misc_feature: MA Experiment 108462 PARAMETER Experiment Name: At_Germinating_Seeds_cDNA_P Parameter: Tissue Value: Germinating Seeds
  misc_feature: MA Experiment ID: 108464 Result: Up-regulated in Transcription
  misc_feature: MA Experiment 108464 PARAMETER Experiment Name: At_Germinating_Seeds_cDNA_P Parameter: Age (day) Value: 4 vs. 0
  misc_feature: MA Experiment 108464 PARAMETER Experiment Name: At_Germinating_Seeds_cDNA_P Parameter: Tissue Value: Germinating Seeds
  misc_feature: MA Experiment ID: 108488 Result: Down-regulated in Transcription
  misc_feature: MA Experiment ID: 108573 Result: Down-regulated in Transcription
  misc_feature: MA Experiment 108573 PARAMETER Experiment Name: At_Drought_cDNA_P Parameter: Timepoint (hr) Value: 6
  misc_feature: MA Experiment 108573 PARAMETER Experiment Name: At_Drought_cDNA_P Parameter: Tissue Value: Aerial
  misc_feature: MA Experiment 108573 PARAMETER Experiment Name: At_Drought_cDNA_P Parameter: Treatment Value: Drought vs. No Drought
  misc_feature: MA Experiment ID: 108585 Result: Down-regulated in Transcription
  misc_feature: MA Experiment 108585 PARAMETER Experiment Name: At_5mM_NaNP_cDNA_P Parameter: Timepoint (hr) Value: 6
  misc_feature: MA Experiment 108585 PARAMETER Experiment Name: At_5mM_NaNP_cDNA_P Parameter: Tissue Value: Aerial
  misc_feature: MA Experiment 108585 PARAMETER Experiment Name: At_5mM_NaNP_cDNA_P Parameter: Treatment Value: null
  misc_feature: MA Experiment ID: 20000112 Result: Down-regulated in Transcription
  misc_feature: MA Experiment 20000112 PARAMETER Experiment Name: At_42deg_Heat_cDNA_P Parameter: Temperature (deg C) Value: 42 vs. 22
  misc_feature: MA Experiment 20000112 PARAMETER Experiment Name: At_42deg_Heat_cDNA_P Parameter: Timepoint (hr) Value: 2
  misc_feature: MA Experiment 20000112 PARAMETER Experiment Name: At_42deg_Heat_cDNA_P Parameter: Tissue Value: Aerial
  misc_feature: MA Experiment ID: 20000113 Result: Down-regulated in Transcription
  misc_feature: MA Experiment 20000113 PARAMETER Experiment Name: At_42deg_Heat_cDNA_P Parameter: Temperature (deg C) Value: 42 vs. 22
  misc_feature: MA Experiment 20000113 PARAMETER Experiment Name: At_42deg_Heat_cDNA_P Parameter: Timepoint (hr) Value: 8
  misc_feature: MA Experiment 20000113 PARAMETER Experiment Name: At_42deg_Heat_cDNA_P Parameter: Tissue Value: Aerial
  misc_feature: MA Experiment ID: 20000144 Result: Down-regulated in Transcription
  misc_feature: MA Experiment 20000144 PARAMETER Experiment Name: At_42deg_Heat_cDNA_P Parameter: Temperature (deg C) Value: 42 vs. 22
  misc_feature: MA Experiment 20000144 PARAMETER Experiment Name: At_42deg_Heat_cDNA_P Parameter: Timepoint (hr) Value: 1
  misc_feature: MA Experiment 20000144 PARAMETER Experiment Name: At_42deg_Heat_cDNA_P Parameter: Tissue Value: Aerial
  misc_feature: MA Experiment ID: 20000173 Result: Down-regulated in Transcription
  misc_feature: MA Experiment 20000173 PARAMETER Experiment Name: At_42deg_Heat_P Parameter: Age (day) Value: 14
  misc_feature: MA Experiment 20000173 PARAMETER Experiment Name: At_42deg_Heat_P Parameter: Organism Value: A. thaliana
  misc_feature: MA Experiment 20000173 PARAMETER Experiment Name: At_42deg_Heat_P Parameter: Plant Line Value: WS
  misc_feature: MA Experiment 20000173 PARAMETER Experiment Name: At_42deg_Heat_P Parameter: Temperature (deg C) Value: 42 vs. 22
  misc_feature: MA Experiment 20000173 PARAMETER Experiment Name: At_42deg_Heat_P Parameter: Timepoint (hr) Value: 6
  misc_feature: MA Experiment 20000173 PARAMETER Experiment Name: At_42deg_Heat_P Parameter: Tissue Value: Aerial
  misc_feature: MA Experiment ID: 20000179 Result: Up-regulated in Transcription
  misc_feature: MA Experiment 20000179 PARAMETER Experiment Name: At_Germinating_Seeds_P Parameter: Age (hr) Value: 6 vs. 0
  misc_feature: MA Experiment 20000179 PARAMETER Experiment Name: At_Germinating_Seeds_P Parameter: Tissue Value: Germinating Seeds
  misc_feature: MA Experiment ID: 20000180 Result: Up-regulated in Transcription
  misc_feature: MA Experiment 20000180 PARAMETER Experiment Name: At_Germinating_Seeds_P Parameter: Age (hr) Value: 24 vs. 0
  misc_feature: MA Experiment 20000180 PARAMETER Experiment Name: At_Germinating_Seeds_P Parameter: Tissue Value: Germinating Seeds
  misc_feature: MA Experiment ID: 20000224 Result: Up-regulated in Transcription
  misc_feature: MA Experiment ID: 20000264 Result: Up-regulated in Transcription
  misc_feature: MA Experiment 20000264 PARAMETER Experiment Name: At_Open_Flower_P Parameter: Age (day) Value: 21
  misc_feature: MA Experiment 20000264 PARAMETER Experiment Name: At_Open_Flower_P Parameter: Plant Line Value: WS
  misc_feature: MA Experiment 20000264 PARAMETER Experiment Name: At_Open_Flower_P Parameter: Tissue Value: Open Flower vs. Whole Plant
  misc_feature: MA Experiment ID: 20000265 Result: Up-regulated in Transcription
  misc_feature: MA Experiment 20000265 PARAMETER Experiment Name: At_Open_Flower_P Parameter: Age (day) Value: 21
  misc_feature: MA Experiment 20000265 PARAMETER Experiment Name: At_Open_Flower_P Parameter: Plant Line Value: WS
  misc_feature: MA Experiment 20000265 PARAMETER Experiment Name: At_Open_Flower_P Parameter: Tissue Value: Closed Flower vs. Whole Plant
  misc_feature: MA Experiment ID: 20000286 Result: Up-regulated in Transcription
  misc_feature: MA Experiment 20000286 PARAMETER Experiment Name: At_Open_Flower_P Parameter: Age (day) Value: 21
  misc_feature: MA Experiment 20000286 PARAMETER Experiment Name: At_Open_Flower_P Parameter: Plant Line Value: WS
  misc_feature: MA Experiment 20000286 PARAMETER Experiment Name: At_Open_Flower_P Parameter: Tissue Value: Half Open vs. Whole Plant
  misc_feature: MA Experiment ID: 20000437 Result: Down-regulated in Transcription
  misc_feature: MA Experiment 20000437 PARAMETER Experiment Name: At_Drought_P Parameter: Age (day) Value: 8
  misc_feature: MA Experiment 20000437 PARAMETER Experiment Name: At_Drought_P Parameter: Organism Value: A. thaliana
  misc_feature: MA Experiment 20000437 PARAMETER Experiment Name: At_Drought_P Parameter: Plant Line Value: WS
  misc_feature: MA Experiment 20000437 PARAMETER Experiment Name: At_Drought_P Parameter: Timepoint (hr) Value: 24
  misc_feature: MA Experiment 20000437 PARAMETER Experiment Name: At_Drought_P Parameter: Tissue Value: Whole Plant
  misc_feature: MA Experiment 20000437 PARAMETER Experiment Name: At_Drought_P Parameter: Treatment Value: Drought vs. No Drought
  misc_feature: MA Experiment ID: 20001557 Result: Down-regulated in Transcription
  misc_feature: MA Experiment 20001557 PARAMETER Experiment Name: At_Drought_Soil_Dry_P Parameter: Age (day) Value: 27
  misc_feature: MA Experiment 20001557 PARAMETER Experiment Name: At_Drought_Soil_Dry_P Parameter: Organism Value: A. thaliana
  misc_feature: MA Experiment 20001557 PARAMETER Experiment Name: At_Drought_Soil_Dry_P Parameter: Plant Line Value: WS
  misc_feature: MA Experiment 20001557 PARAMETER Experiment Name: At_Drought_Soil_Dry_P Parameter: Post Timepoint (hr) Value: 3
  misc_feature: MA Experiment 20001557 PARAMETER Experiment Name: At_Drought_Soil_Dry_P Parameter: Post-Treatment Value: Re-Water vs. No Drought
  misc_feature: MA Experiment 20001557 PARAMETER Experiment Name: At_Drought_Soil_Dry_P Parameter: Timepoint (day) Value: 13
  misc_feature: MA Experiment 20001557 PARAMETER Experiment Name: At_Drought_Soil_Dry_P Parameter: Treatment Value: Drought vs. No Drought
  misc_feature: MA Experiment ID: 20001905 Result: Down-regulated in Transcription
  misc_feature: MA Experiment 20001905 PARAMETER Experiment Name: At_Drought_Reproduction_P Parameter: Age (day) Value: 40
  misc_feature: MA Experiment 20001905 PARAMETER Experiment Name: At_Drought_Reproduction_P Parameter: Organism Value: A. thaliana
  misc_feature: MA Experiment 20001905 PARAMETER Experiment Name: At_Drought_Reproduction_P Parameter: Plant Line Value: WS
  misc_feature: MA Experiment 20001905 PARAMETER Experiment Name: At_Drought_Reproduction_P Parameter: Timepoint (day) Value: 10
  misc_feature: MA Experiment 20001905 PARAMETER Experiment Name: At_Drought_Reproduction_P Parameter: Tissue Value: Rosettes
  misc_feature: MA Experiment 20001905 PARAMETER Experiment Name: At_Drought_Reproduction_P Parameter: Treatment Value: Drought vs. No Drought
atcagaaaactcaaatcttaaaactttctggaaaaacaaaaatgtcaggaagaggaaaaggaggaaaagggttaggcaaaggaggagcaaagagacacagaaaggttctaagagacaacattcaaggaatcacaaagccagcgattcgtcgtcttgctcgtagaggaggtgtgaagagaatcagtggattgatctatgaagaaacgagaggtgtgttgaagatttttctggagaatgtgattagagatgctgttacttacactgagcatgcgaggaggaagacggtgactgctatggatgttgtttatgccttgaagagacaaggaagaactctatatggatttggtggttgatcaatttgagatctgggttttctggtgaatgatgatgatttaagtcttgcgatcaagaaattccagaaattgggttgaattttagggtttcgttttgtgttgtaattagggcagcattgtaatggattaatgataagtaccatttgctct

SEQ ID NO: 22099 - protein, 116 aa, Arabidopsis thaliana
  peptide (1)..(116): Ceres Seq. ID no. 12334103
  misc_feature (14)..(116): Homolog of NCBI NO: 462242 NR Description: Histone H4
  misc_feature (14)..(116): Homolog of NCBI NO: 37590121 NR Description: Hist1h4h protein [Mus musculus]
  misc_feature (14)..(116): Homolog of NCBI NO: 27692935 NR Description: Similar to germinal histone H4 gene [Mus musculus]
  misc_feature (14)..(116): Homolog of NCBI NO: 4504301 NR Description: H4 histone family, member A [Homo sapiens]
  misc_feature (14)..(116): Homolog of NCBI NO: 1806283 NR Description: Histone H4 homologue [Sesbania rostrata]
  misc_feature (14)..(116): Homolog of NCBI NO: 462243 NR Description: Histone H4
  misc_feature (11)..(116): Homolog of NCBI NO: 27692960 NR Description: Similar to germinal histone H4 gene [Mus musculus]
  misc_feature (8)..(116): Homolog of NCBI NO: 34858262 NR Description: similar to germinal histone H4 gene [Rattus
  misc_feature (14)..(116): Homolog of NCBI NO: 15226944 NR Description: histone H4
  misc_feature (13)..(116): Homolog of NCBI NO: 34876368 NR Description: similar to germinal histone H4 gene [Rattus
QKTQILKLSGKTKMSGRGKGGKGLGKGGAKRHRKVLRDNIQGITKPAIRRLARRGGVKRISGLIYEETRGVLKIFLENVIRDAVTYTEHARRKTVTAMDVVYALKRQGRTLYGFGG

SEQ ID NO: 22100 - protein, 103 aa, Arabidopsis thaliana; identical to SEQ ID NO: 7737
  peptide (1)..(103): Ceres Seq. ID no. 12334104
  misc_feature (1)..(103): Homolog of NCBI NO: 462242 NR Description: Histone H4
  misc_feature (1)..(103): Homolog of NCBI NO: 37590121 NR Description: Hist1h4h protein [Mus musculus]
  misc_feature (1)..(103): Homolog of NCBI NO: 27692935 NR Description: Similar to germinal histone H4 gene [Mus musculus]
  misc_feature (1)..(103): Homolog of NCBI NO: 4504301 NR Description: H4 histone family, member A [Homo sapiens]
  misc_feature (1)..(103): Homolog of NCBI NO: 1806283 NR Description: Histone H4 homologue [Sesbania rostrata]
  misc_feature (1)..(103): Homolog of NCBI NO: 462243 NR Description: Histone H4
  misc_feature (1)..(103): Homolog of NCBI NO: 27692960 NR Description: Similar to germinal histone H4 gene [Mus musculus]
  misc_feature (1)..(103): Homolog of NCBI NO: 34858262 NR Description: similar to germinal histone H4 gene [Rattus
  misc_feature (1)..(103): Homolog of NCBI NO: 15226944 NR Description: histone H4
  misc_feature (1)..(103): Homolog of NCBI NO: 34876368 NR Description: similar to germinal histone H4 gene [Rattus

SEQ ID NO: 22101 - DNA, 1764 bp, Arabidopsis thaliana
  misc_feature (1)..(1764): Ceres Seq. ID no. 12422350
  misc_feature: MA Experiment ID: 108434 Result: Down-regulated in Transcription
  misc_feature: MA Experiment 108434 PARAMETER Experiment Name: At_Root_Tips_cDNA_P Parameter: Tissue Value: Root Tips
  misc_feature: MA Experiment ID: 108462 Result: Up-regulated in Transcription
  misc_feature: MA Experiment 108462 PARAMETER Experiment Name: At_Germinating_Seeds_cDNA_P Parameter: Age (day) Value: 2 vs. 0
  misc_feature: MA Experiment 108462 PARAMETER Experiment Name: At_Germinating_Seeds_cDNA_P Parameter: Tissue Value: Germinating Seeds
  misc_feature: MA Experiment ID: 108463 Result: Up-regulated in Transcription
  misc_feature: MA Experiment 108463 PARAMETER Experiment Name: At_Germinating_Seeds_cDNA_P Parameter: Age (day) Value: 3 vs. 0
  misc_feature: MA Experiment 108463 PARAMETER Experiment Name: At_Germinating_Seeds_cDNA_P Parameter: Tissue Value: Germinating Seeds
  misc_feature: MA Experiment ID: 108464 Result: Up-regulated in Transcription
  misc_feature: MA Experiment 108464 PARAMETER Experiment Name: At_Germinating_Seeds_cDNA_P Parameter: Age (day) Value: 4 vs. 0
  misc_feature: MA Experiment 108464 PARAMETER Experiment Name: At_Germinating_Seeds_cDNA_P Parameter: Tissue Value: Germinating Seeds
  misc_feature: MA Experiment ID: 108577 Result: Down-regulated in Transcription
  misc_feature: MA Experiment 108577 PARAMETER Experiment Name: At_42deg_Heat_cDNA_P Parameter: Temperature (deg C) Value: 42 vs. 22
  misc_feature: MA Experiment 108577 PARAMETER Experiment Name: At_42deg_Heat_cDNA_P Parameter: Timepoint (hr) Value: 6
  misc_feature: MA Experiment 108577 PARAMETER Experiment Name: At_42deg_Heat_cDNA_P Parameter: Tissue Value: Aerial
  misc_feature: MA Experiment ID: 108595 Result: Down-regulated in Transcription
  misc_feature: MA Experiment 108595 PARAMETER Experiment Name: At_Ler-pi_Ovule_cDNA_P Parameter: Plant Line Value: null
  misc_feature: MA Experiment ID: 108609 Result: Up-regulated in Transcription
  misc_feature: MA Experiment 108609 PARAMETER Experiment Name: At_100uM_ABA_cDNA_P Parameter: Timepoint (hr) Value: 24
  misc_feature: MA Experiment 108609 PARAMETER Experiment Name: At_100uM_ABA_cDNA_P Parameter: Tissue Value: Aerial
  misc_feature: MA Experiment 108609 PARAMETER Experiment Name: At_100uM_ABA_cDNA_P Parameter: Treatment Value: 100uM ABA vs. No Treatment
  misc_feature: MA Experiment ID: 20000030 Result: Up-regulated in Transcription
  misc_feature: MA Experiment 20000030 PARAMETER Experiment Name: At_CS6630_Roots_cDNA_P Parameter: Plant Line Value: CS6630 vs. WS
  misc_feature: MA Experiment 20000030 PARAMETER Experiment Name: At_CS6630_Roots_cDNA_P Parameter: Tissue Value: Roots
  misc_feature: MA Experiment ID: 20000069 Result: Up-regulated in Transcription
  misc_feature: MA Experiment 20000069 PARAMETER Experiment Name: At_100uM_ABA_Mutants_cDNA_P Parameter: Plant Line Value: CS23
  misc_feature: MA Experiment 20000069 PARAMETER Experiment Name: At_100uM_ABA_Mutants_cDNA_P Parameter: Timepoint (hr) Value: 6
  misc_feature: MA Experiment 20000069 PARAMETER Experiment Name: At_100uM_ABA_Mutants_cDNA_P Parameter: Tissue Value: Aerial
  misc_feature: MA Experiment 20000069 PARAMETER Experiment Name: At_100uM_ABA_Mutants_cDNA_P Parameter: Treatment Value: 100uM ABA vs. No Treatment
  misc_feature: MA Experiment ID: 20000071 Result: Up-regulated in Transcription
  misc_feature: MA Experiment 20000071 PARAMETER Experiment Name: At_100uM_ABA_Mutants_cDNA_P Parameter: Plant Line Value: CS8104
  misc_feature: MA Experiment 20000071 PARAMETER Experiment Name: At_100uM_ABA_Mutants_cDNA_P Parameter: Timepoint (hr) Value: 6
  misc_feature: MA Experiment 20000071 PARAMETER Experiment Name: At_100uM_ABA_Mutants_cDNA_P Parameter: Tissue Value: Aerial
  misc_feature: MA Experiment 20000071 PARAMETER Experiment Name: At_100uM_ABA_Mutants_cDNA_P Parameter: Treatment Value: 100uM ABA vs. No Treatment
  misc_feature: MA Experiment ID: 20000072 Result: Up-regulated in Transcription
  misc_feature: MA Experiment 20000072 PARAMETER Experiment Name: At_100uM_ABA_Mutants_cDNA_P Parameter: Plant Line Value: CS8105
  misc_feature: MA Experiment 20000072 PARAMETER Experiment Name: At_100uM_ABA_Mutants_cDNA_P Parameter: Timepoint (hr) Value: 6
  misc_feature: MA Experiment 20000072 PARAMETER Experiment Name: At_100uM_ABA_Mutants_cDNA_P Parameter: Tissue Value: Aerial
  misc_feature: MA Experiment 20000072 PARAMETER Experiment Name: At_100uM_ABA_Mutants_cDNA_P Parameter: Treatment Value: 100uM ABA vs. No Treatment
  misc_feature: MA Experiment ID: 20000089 Result: Up-regulated in Transcription
  misc_feature: MA Experiment ID: 20000090 Result: Up-regulated in Transcription
  misc_feature: MA Experiment ID: 20000111 Result: Down-regulated in Transcription
  misc_feature: MA Experiment 20000111 PARAMETER Experiment Name: At_42deg_Heat_cDNA_P Parameter: Temperature (deg C) Value: 42 vs. 22
  misc_feature: MA Experiment 20000111 PARAMETER Experiment Name: At_42deg_Heat_cDNA_P Parameter: Timepoint (hr) Value: 6
  misc_feature: MA Experiment 20000111 PARAMETER Experiment Name: At_42deg_Heat_cDNA_P Parameter: Tissue Value: Aerial
  misc_feature: MA Experiment ID: 20000117 Result: Up-regulated in Transcription
  misc_feature: MA Experiment 20000117 PARAMETER Experiment Name: At_100uM_ABA_Mutants_cDNA_P Parameter: Plant Line Value: Columbia
  misc_feature: MA Experiment 20000117 PARAMETER Experiment Name: At_100uM_ABA_Mutants_cDNA_P Parameter: Timepoint (hr) Value: 6
  misc_feature: MA Experiment 20000117 PARAMETER Experiment Name: At_100uM_ABA_Mutants_cDNA_P Parameter: Tissue Value: Aerial
  misc_feature: MA Experiment 20000117 PARAMETER Experiment Name: At_100uM_ABA_Mutants_cDNA_P Parameter: Treatment Value: 100uM ABA vs. No Treatment
  misc_feature: MA Experiment ID: 20000144 Result: Down-regulated in Transcription
  misc_feature: MA Experiment 20000144 PARAMETER Experiment Name: At_42deg_Heat_cDNA_P Parameter: Temperature (deg C) Value: 42 vs. 22
  misc_feature: MA Experiment 20000144 PARAMETER Experiment Name: At_42deg_Heat_cDNA_P Parameter: Timepoint (hr) Value: 1
  misc_feature: MA Experiment 20000144 PARAMETER Experiment Name: At_42deg_Heat_cDNA_P Parameter: Tissue Value: Aerial
  misc_feature: MA Experiment ID: 20000171 Result: Down-regulated in Transcription
  misc_feature: MA Experiment 20000171 PARAMETER Experiment Name: At_42deg_Heat_P Parameter: Age (day) Value: 14
  misc_feature: MA Experiment 20000171 PARAMETER Experiment Name: At_42deg_Heat_P Parameter: Organism Value: A. thaliana
  misc_feature: MA Experiment 20000171 PARAMETER Experiment Name: At_42deg_Heat_P Parameter: Plant Line Value: WS
  misc_feature: MA Experiment 20000171 PARAMETER Experiment Name: At_42deg_Heat_P Parameter: Temperature (deg C) Value: 42 vs. 22
  misc_feature: MA Experiment 20000171 PARAMETER Experiment Name: At_42deg_Heat_P Parameter: Timepoint (hr) Value: 1
  misc_feature: MA Experiment 20000171 PARAMETER Experiment Name: At_42deg_Heat_P Parameter: Tissue Value: Aerial
  misc_feature: MA Experiment ID: 20000173 Result: Down-regulated in Transcription
  misc_feature: MA Experiment 20000173 PARAMETER Experiment Name: At_42deg_Heat_P Parameter: Age (day) Value: 14
  misc_feature: MA Experiment 20000173 PARAMETER Experiment Name: At_42deg_Heat_P Parameter: Organism Value: A. thaliana
  misc_feature: MA Experiment 20000173 PARAMETER Experiment Name: At_42deg_Heat_P Parameter: Plant Line Value: WS
  misc_feature: MA Experiment 20000173 PARAMETER Experiment Name: At_42deg_Heat_P Parameter: Temperature (deg C) Value: 42 vs. 22
  misc_feature: MA Experiment 20000173 PARAMETER Experiment Name: At_42deg_Heat_P Parameter: Timepoint (hr) Value: 6
  misc_feature: MA Experiment 20000173 PARAMETER Experiment Name: At_42deg_Heat_P Parameter: Tissue Value: Aerial
  misc_feature: MA Experiment ID: 20000184 Result: Down-regulated in Transcription
  misc_feature: MA Experiment 20000184 PARAMETER Experiment Name: At_Shoots__P Parameter: Age (day) Value: 7
  misc_feature: MA Experiment 20000184 PARAMETER Experiment Name: At_Shoots__P Parameter: Tissue Value: Shoots vs. Whole Plant
  misc_feature: MA Experiment ID: 20000185 Result: Down-regulated in Transcription
  misc_feature: MA Experiment 20000185 PARAMETER Experiment Name: At_Roots__P Parameter: Age (day) Value: 7 vs. 21
  misc_feature: MA Experiment 20000185 PARAMETER Experiment Name: At_Roots__P Parameter: Organism Value: A. thaliana
  misc_feature: MA Experiment 20000185 PARAMETER Experiment Name: At_Roots__P Parameter: Tissue Value: Roots vs. Whole Plant
  misc_feature: MA Experiment ID: 20000439 Result: Down-regulated in Transcription
  misc_feature: MA Experiment 20000439 PARAMETER Experiment Name: At_Roots__P Parameter: Age (day) Value: 14 vs. 21
  misc_feature: MA Experiment 20000439 PARAMETER Experiment Name: At_Roots__P Parameter: Organism Value: A. thaliana
  misc_feature: MA Experiment 20000439 PARAMETER Experiment Name: At_Roots__P Parameter: Tissue Value: Roots vs. Whole Plant
  misc_feature: MA Experiment ID: 20000573 Result: Down-regulated in Transcription
  misc_feature: MA Experiment 20000573 PARAMETER Experiment Name: At_100uM_ABA_Mutants__P Parameter: Organism Value: A. thaliana
  misc_feature: MA Experiment 20000573 PARAMETER Experiment Name: At_100uM_ABA_Mutants__P Parameter: Plant Line Value: CS22 vs. Ler wt
  misc_feature: MA Experiment 20000573 PARAMETER Experiment Name: At_100uM_ABA_Mutants__P Parameter: Timepoint (hr) Value: N/A
  misc_feature: MA Experiment 20000573 PARAMETER Experiment Name: At_100uM_ABA_Mutants__P Parameter: Tissue Value: Whole Plant
  misc_feature: MA Experiment 20000573 PARAMETER Experiment Name: At_100uM_ABA_Mutants__P Parameter: Treatment Value: None
  misc_feature: MA Experiment ID: 20000574 Result: Down-regulated in Transcription
  misc_feature: MA Experiment 20000574 PARAMETER Experiment Name: At_100uM_ABA_Mutants__P Parameter: Organism Value: A. thaliana
  misc_feature: MA Experiment 20000574 PARAMETER Experiment Name: At_100uM_ABA_Mutants__P Parameter: Plant Line Value: CS23 vs. Ler wt
  misc_feature: MA Experiment 20000574 PARAMETER Experiment Name: At_100uM_ABA_Mutants__P Parameter: Timepoint (hr) Value: N/A
  misc_feature: MA Experiment 20000574 PARAMETER Experiment Name: At_100uM_ABA_Mutants__P Parameter: Tissue Value: Whole Plant
  misc_feature: MA Experiment 20000574 PARAMETER Experiment Name: At_100uM_ABA_Mutants__P Parameter: Treatment Value: None
  misc_feature: MA Experiment ID: 20001248 Result: Down-regulated in Transcription
  misc_feature: MA Experiment 20001248 PARAMETER Experiment Name: At_Far-red-induction_P Parameter: Age (day) Value: 7
  misc_feature: MA Experiment 20001248 PARAMETER Experiment Name: At_Far-red-induction_P Parameter: Light Value: Far-red vs. White
  misc_feature: MA Experiment 20001248 PARAMETER Experiment Name: At_Far-red-induction_P Parameter: Organism Value: A. thaliana
  misc_feature: MA Experiment 20001248 PARAMETER Experiment Name: At_Far-red-induction_P Parameter: Plant Line Value: Columbia
  misc_feature: MA Experiment 20001248 PARAMETER Experiment Name: At_Far-red-induction_P Parameter: Timepoint (hr) Value: 4
  misc_feature: MA Experiment 20001248 PARAMETER Experiment Name: At_Far-red-induction_P Parameter: Tissue Value: Whole Plant
  misc_feature: MA Experiment ID: 20001560 Result: Down-regulated in Transcription
  misc_feature: MA Experiment 20001560 PARAMETER Experiment Name: At_Drought_Soil_Dry_P Parameter: Age (day) Value: 28
  misc_feature: MA Experiment 20001560 PARAMETER Experiment Name: At_Drought_Soil_Dry_P Parameter: Organism Value: A. thaliana
  misc_feature: MA Experiment 20001560 PARAMETER Experiment Name: At_Drought_Soil_Dry_P Parameter: Plant Line Value: WS
  misc_feature: MA Experiment 20001560 PARAMETER Experiment Name: At_Drought_Soil_Dry_P Parameter: Post Timepoint (hr) Value: None
  misc_feature: MA Experiment 20001560 PARAMETER Experiment Name: At_Drought_Soil_Dry_P Parameter: Post-Treatment Value: None
  misc_feature: MA Experiment 20001560 PARAMETER Experiment Name: At_Drought_Soil_Dry_P Parameter: Timepoint (day) Value: 14
  misc_feature: MA Experiment 20001560 PARAMETER Experiment Name: At_Drought_Soil_Dry_P Parameter: Treatment Value: Drought vs. No Drought
atttttcacttctatcgataaccaaacgaaaaaaaacatggccatctctttcctctgtttttgcctcattaccctcgcttcgttaatctttttcgccaagaagattaaacacttgaaatggaatcttcctccaagccctccaaagtttccggtcatcggaaatttacaccagattggagaattgcctcacaggtcacttcaacatctcgccgaaagatacggacctgtgatgcttcttcactttgggtttgtccctgtaactgtggtctcatcaagagaagcagctgaagaagtgctcagaactcatgacctagactgttgcagcaggcctaagcttgtcgggacaaggttactctcgcgggattttaaagatgtctgttttacgccatacggtaacgagtggaaggcgcggcgtaagtttgccctgcgtgagcttttctgtttgaaaaaggttcagtcctttaggcatatccgagaggatgaatgtaactttctggtcaagcaactgtcggaatccgcggttaatcgctctccggtcgatttgagcaaatcacttttctggctaaccgctagtatctttttcagagttgccttaggacagaattttcatgagagcaattttatcgataaagaaaagatcgaagagctcgtgttcgaagctgagactgccctagcaagtttcacttgttctgatttcttccctgttgccggacttggatggcttgttgattggttttccggacaacacaagagactcaacgatgttttttacaagctcgatgctctgtttcaacatgtcatagatgatcatttaaatccaggaagatcaaaagagcacgaagacatcatcgattcaatgttggatgcgattcataaagaaggaaaagatagttccttagagctcacaatagatcatattaaggggtttctcgcggtaatcaagagttatttaaacacattaaaattgtaattggatcgaaatctttaacttacttttcttgtgggttgttagaatatatttcttgcagggatagacacaggggccctcaccatgatatgggcaatgacggagctcgttaaaaacccgaaacttataaagaaagttcaaggcgagatccgagaacaacttggcagcaataaggcgagaatcaccgaggaagatatcgataaagttccttacttgaagatggtagtcaaagaaacattcaggttacacccggcagctcctcttatacttccaagagaaacaatggctcacatcaaagttcaagggtatgatattcctcccaagaggcggatcttggtcaatgtttcggctatcggaagagatcccaaactctggacaaacccggaagagtttgaccctgagaggtttatggatagctctgttgattataggggacaacattacgagctcttaccatttgggtccggtcgaaggatatgtcccgggatgccaatggggattgctgccgtcgaattgggactcttgaacttactttacttcttcgattggaagttgcctgatgggatgacacataaagatattgatactgaagaagctggtactcttacaatcgtcaagaaagtacctctccagctcgttccagttcgagttcagtgatcagaccaaactccaaacggtttggaccaaaccttttgaataaatatatcatgcaaatcatgtaagcttctctgatgatgtatgaagtatatttttcagtaaaatactaaattgaacgttcatttgcgtttgaggaatgc

SEQ ID NO: 22102 - protein, 322 aa, Arabidopsis thaliana
  peptide (1)..(322): Ceres Seq. ID no. 12422351
  misc_feature (43)..(313): Pfam Name: Cytochrome P450 Pfam Description: Cytochrome P450
  misc_feature (13)..(319): Homolog of NCBI NO: 15231526 NR Description: cytochrome P450 family; protein id: At3g26210.1
  misc_feature (18)..(310): Homolog of NCBI NO: 15222174 NR Description: cytochrome p450 family
  misc_feature (13)..(311): Homolog of NCBI NO: 15231525 NR Description: cytochrome p450 family
  misc_feature (46)..(264): Homolog of NCBI NO: 11994435 NR Description: cytochrome P450 [Arabidopsis thaliana]
  misc_feature (17)..(300): Homolog of NCBI NO: 37531412 NR Description: putative cytochrome P450 [Oryza sativa (japonica
  misc_feature (12)..(319): Homolog of NCBI NO: 15222182 NR Description: cytochrome p450 family
  misc_feature (13)..(313): Homolog of NCBI NO: 15231516 NR Description: cytochrome p450 family; protein id: At3g26150.1
  misc_feature (13)..(313): Homolog of NCBI NO: 15231517 NR Description: cytochrome p450 family; protein id: At3g26160.1
  misc_feature (13)..(313): Homolog of NCBI NO: 16226474 NR Description: AT3g26180/MTC11_8 [Arabidopsis thaliana]
  misc_feature (13)..(313): Homolog of NCBI NO: 15231522 NR Description: cytochrome p450 family
FFTSIDNQTKKNMAISFLCFCLITLASLIFFAKKIKHLKWNLPPSPPKFPVIGNLHQIGELPHRSLQHLAERYGPVMLLHFGFVPVTVVSSREAAEEVLRTHDLDCCSRPKLVGTRLLSRDFKDVCFTPYGNEWKARRKFALRELFCLKKVQSFRHIREDECNFLVKQLSESAVNRSPVDLSKSLFWLTASIFFRVALGQNFHESNFIDKEKIEELVFEAETALASFTCSDFFPVAGLGWLVDWFSGQHKRLNDVFYKLDALFQHVIDDHLNPGRSKEHEDIIDSMLDAIHKEGKDSSLELTIDHIKGFLAVIKSYLNTLKL

SEQ ID NO: 22103 - protein, 310 aa, Arabidopsis thaliana
  peptide (1)..(310): Ceres Seq. ID no. 12422352
  misc_feature (31)..(301): Pfam Name: Cytochrome P450 Pfam Description: Cytochrome P450
  misc_feature (5)..(288): Homolog of NCBI NO: 37531412 NR Description: putative cytochrome P450 [Oryza sativa (japonica
  misc_feature (1)..(307): Homolog of NCBI NO: 15222182 NR Description: cytochrome p450 family
  misc_feature (1)..(307): Homolog of NCBI NO: 15231526 NR Description: cytochrome P450 family; protein id: At3g26210.1
  misc_feature (6)..(298): Homolog of NCBI NO: 15222174 NR Description: cytochrome p450 family
  misc_feature (1)..(299): Homolog of NCBI NO: 15231525 NR Description: cytochrome p450 family
  misc_feature (34)..(252): Homolog of NCBI NO: 11994435 NR Description: cytochrome P450 [Arabidopsis thaliana]
  misc_feature (1)..(301): Homolog of NCBI NO: 15231516 NR Description: cytochrome p450 family; protein id: At3g26150.1
  misc_feature (1)..(301): Homolog of NCBI NO: 15231517 NR Description: cytochrome p450 family; protein id: At3g26160.1
  misc_feature (1)..(301): Homolog of NCBI NO: 16226474 NR Description: AT3g26180/MTC11_8 [Arabidopsis thaliana]
  misc_feature (1)..(301): Homolog of NCBI NO: 15231522 NR Description: cytochrome p450 family
MAISFLCFCLITLASLIFFAKKIKHLKWNLPPSPPKFPVIGNLHQIGELPHRSLQHLAERYGPVMLLHFGFVPVTVVSSREAAEEVLRTHDLDCCSRPKLVGTRLLSRDFKDVCFTPYGNEWKARRKFALRELFCLKKVQSFRHIREDECNFLVKQLSESAVNRSPVDLSKSLFWLTASIFFRVALGQNFHESNFIDKEKIEELVFEAETALASFTCSDFFPVAGLGWLVDWFSGQHKRLNDVFYKLDALFQHVIDDHLNPGRSKEHEDIIDSMLDAIHKEGKDSSLELTIDHIKGFLAVIKSYLNTLKL

SEQ ID NO: 22104 - protein, 246 aa, Arabidopsis thaliana
  peptide (1)..(246): Ceres Seq. ID no. 12422353
  misc_feature (1)..(237): Pfam Name: Cytochrome P450 Pfam Description: Cytochrome P450
  misc_feature (1)..(224): Homolog of NCBI NO: 37531412 NR Description: putative cytochrome P450 [Oryza sativa (japonica
  misc_feature (1)..(243): Homolog of NCBI NO: 15222182 NR Description: cytochrome p450 family
  misc_feature (1)..(243): Homolog of NCBI NO: 15231526 NR Description: cytochrome P450 family; protein id: At3g26210.1
  misc_feature (1)..(234): Homolog of NCBI NO: 15222174 NR Description: cytochrome p450 family
  misc_feature (1)..(235): Homolog of NCBI NO: 15231525 NR Description: cytochrome p450 family
  misc_feature (1)..(188): Homolog of NCBI NO: 11994435 NR Description: cytochrome P450 [Arabidopsis thaliana]
  misc_feature (1)..(237): Homolog of NCBI NO: 15231516 NR Description: cytochrome p450 family; protein id: At3g26150.1
  misc_feature (1)..(237): Homolog of NCBI NO: 15231517 NR Description: cytochrome p450 family; protein id: At3g26160.1
  misc_feature (1)..(237): Homolog of NCBI NO: 16226474 NR Description: AT3g26180/MTC11_8 [Arabidopsis thaliana]
  misc_feature (1)..(237): Homolog of NCBI NO: 15231522 NR Description: cytochrome p450 family
MLLHFGFVPVTVVSSREAAEEVLRTHDLDCCSRPKLVGTRLLSRDFKDVCFTPYGNEWKARRKFALRELFCLKKVQSFRHIREDECNFLVKQLSESAVNRSPVDLSKSLFWLTASIFFRVALGQNFHESNFIDKEKIEELVFEAETALASFTCSDFFPVAGLGWLVDWFSGQHKRLNDVFYKLDALFQHVIDDHLNPGRSKEHEDIIDSMLDAIHKEGKDSSLELTIDHIKGFLAVIKSYLNTLKL

SEQ ID NO: 22105 - DNA, 1588 bp, Arabidopsis thaliana
  misc_feature (1)..(1588): Ceres Seq. ID no. 13497487
  misc_feature: MA Experiment ID: 108434 Result: Down-regulated in Transcription
  misc_feature: MA Experiment 108434 PARAMETER Experiment Name: At_Root_Tips_cDNA_P Parameter: Tissue Value: Root Tips
  misc_feature: MA Experiment ID: 108462 Result: Down-regulated in Transcription
  misc_feature: MA Experiment 108462 PARAMETER Experiment Name: At_Germinating_Seeds_cDNA_P Parameter: Age (day) Value: 2 vs. 0
  misc_feature: MA Experiment 108462 PARAMETER Experiment Name: At_Germinating_Seeds_cDNA_P Parameter: Tissue Value: Germinating Seeds
  misc_feature: MA Experiment ID: 108573 Result: Up-regulated in Transcription
  misc_feature: MA Experiment 108573 PARAMETER Experiment Name: At_Drought_cDNA_P Parameter: Timepoint (hr) Value: 6
  misc_feature: MA Experiment 108573 PARAMETER Experiment Name: At_Drought_cDNA_P Parameter: Tissue Value: Aerial
  misc_feature: MA Experiment 108573 PARAMETER Experiment Name: At_Drought_cDNA_P Parameter: Treatment Value: Drought vs. No Drought
  misc_feature: MA Experiment ID: 20000315 Result: Down-regulated in Transcription
  misc_feature: MA Experiment 20000315 PARAMETER Experiment Name: At_14day_Shoots-Roots_Sub_P Parameter: Age (day) Value: 14
  misc_feature: MA Experiment 20000315 PARAMETER Experiment Name: At_14day_Shoots-Roots_Sub_P Parameter: Organism Value: A. thaliana
  misc_feature: MA Experiment 20000315 PARAMETER Experiment Name: At_14day_Shoots-Roots_Sub_P Parameter: Plant Line Value: WS
  misc_feature: MA Experiment 20000315 PARAMETER Experiment Name: At_14day_Shoots-Roots_Sub_P Parameter: Tissue Value: Shoots vs. Whole Plant
  misc_feature: MA Experiment ID: 20000355 Result: Down-regulated in Transcription
  misc_feature: MA Experiment 20000355 PARAMETER Experiment Name: At_Siliques_Sub_P Parameter: Age (day) Value: 21
  misc_feature: MA Experiment 20000355 PARAMETER Experiment Name: At_Siliques_Sub_P Parameter: Organism Value: A. thaliana
  misc_feature: MA Experiment 20000355 PARAMETER Experiment Name: At_Siliques_Sub_P Parameter: Plant Line Value: WS
  misc_feature: MA Experiment 20000355 PARAMETER Experiment Name: At_Siliques_Sub_P Parameter: Tissue Value: Less Than 5mm Siliques vs. Whole Plant
gttttttgcactcagaaaagaaacttgtactaaaacctaggagaggaggagctggcaccaccgcctaactcgccattgacacaacaccaaaaactcttctttactttttgttattctacacacatcgataaagattaagaacataattaatagaattccataaataattagatgcactaacttttcaacatcaattcaacggtttaaattcgtgaaaaagcgtttttattttattttaaaggttacaactttgtagtttttaccctaaatctctctctgattactgatactctgtctcaatctcttctttcttctaatcctttatttcttgtaagctacttctcctgaatttcgtatttgatccgtttaatccaagtttcgattttatataacaaacacatagatcctgaggttttgtgataagaaacagagagagagagaaacagagtaatggcgaacagagatgtggagagagtagggaagaaaaacagaggagctaataacaattatttctacgaggagtcttctggtgaaactcattggacttcatggctgattccggcgattgtagtggcaaatctcgctgtctttatcgctgttatgttcgttaatgattgtcctaagaaaatcaccggacctaacaaagagtgtgttgctagattcctcggaagattctcgtttcaaccacttaaagagaatcctctctttggtccttcttcttcaacattggagaaaatgggagcattggaatggaggaaagtagtacatgaacatcaaggatggagacttctctcttgtatgtggcttcacgctggtatcattcatcttcttacaaacatgttgagtttgatcttcattggtatccgccttgagcagcaatttggcttcataagagtcgggttgatatacttaatatcgggtctcggtggaagcatactttcgtcgcttttccttcaagaaagtatctctgttggtgcttcgggtgctctctttggacttcttggagcaatgttatctgaacttcttaccaattggactatctatgccaacaaggcggctgctctgatcacacttctgttcatcatcgcaatcaacttagcattaggcatgcttcctcgggttgacaactttgcacacattggagggtttttaaccggattctgcctcgggtttgtcctccttgtccgacctcagtacggttgggaagcttcgcgcaccaacacttcgcgaaccaaacgaaagtatagcatgtaccagtacgtgctgtttgtagtttcagtggtgctacttgtggttgggctaacggttgcattagtgatgcttttcaaaggagagaatgggaacaaacattgcaaatggtgtcattaccttagctgtttcccaacttctaaatggacctgctaatcatcatcatcatcatcataatcatatagtaaaagcttttatatgtgttcatgttaacatttaatctctttgatctctctagcctttgattacttatatatgtgtacattacaaaattcgtcttgtgtaaaaggggatagaaataaaagagtgtataatttggtttatagtacacactttatat

SEQ ID NO: 22106 - protein, 317 aa, Arabidopsis thaliana
  peptide (1)..(317): Ceres Seq. ID no. 13497488
  misc_feature (13)..(316): Homolog of NCBI NO: 15236387 NR Description: membrane protein, Rhomboid family [Arabidopsis
  misc_feature (31)..(317): Homolog of NCBI NO: 11357824 NR Description: hypothetical protein F5K20.80 - Arabidopsis
  misc_feature (2)..(317): Homolog of NCBI NO: 37536172 NR Description: putative membrane protein
  misc_feature (20)..(317): Homolog of NCBI NO: 38344377 NR Description: OSJNBb0032E06.11 [Oryza sativa (japonica
  misc_feature (1)..(317): Homolog of NCBI NO: 30693911 NR Description: membrane protein, Rhomboid family [Arabidopsis
  misc_feature (15)..(317): Homolog of NCBI NO: 294845 NR Description: membrane protein [Saccharum hybrid cultivar
  misc_feature (22)..(317): Homolog of NCBI NO: 15240744 NR Description: membrane protein, Rhomboid family [Arabidopsis
  misc_feature (27)..(317): Homolog of NCBI NO: 25402744 NR Description: protein T12C24.28 [imported] - Arabidopsis
  misc_feature (1)..(317): Homolog of NCBI NO: 15222058 NR Description: membrane protein, Rhomboid family [Arabidopsis
  misc_feature (1)..(317): Homolog of NCBI NO: 15221690 NR Description: membrane protein, Rhomboid family [Arabidopsis
MANRDVERVGKKNRGANNNYFYEESSGETHWTSWLIPAIVVANLAVFIAVMFVNDCPKKITGPNKECVARFLGRFSFQPLKENPLFGPSSSTLEKMGALEWRKVVHEHQGWRLLSCMWLHAGIIHLLTNMLSLIFIGIRLEQQFGFIRVGLIYLISGLGGSILSSLFLQESISVGASGALFGLLGAMLSELLTNWTIYANKAAALITLLFIIAINLALGMLPRVDNFAHIGGFLTGFCLGFVLLVRPQYGWEASRTNTSRTKRKYSMYQYVLFVVSVVLLVVGLTVALVMLFKGENGNKHCKWCHYLSCFPTSKWTC

SEQ ID NO: 22107 - protein, 267 aa, Arabidopsis thaliana
  peptide (1)..(267): Ceres Seq. ID no. 13497489
  misc_feature (1)..(266): Homolog of NCBI NO: 15236387 NR Description: membrane protein, Rhomboid family [Arabidopsis
  misc_feature (1)..(267): Homolog of NCBI NO: 11357824 NR Description: hypothetical protein F5K20.80 - Arabidopsis
  misc_feature (1)..(267): Homolog of NCBI NO: 37536172 NR Description: putative membrane protein
  misc_feature (1)..(267): Homolog of NCBI NO: 38344377 NR Description: OSJNBb0032E06.11 [Oryza sativa (japonica
  misc_feature (1)..(267): Homolog of NCBI NO: 30693911 NR Description: membrane protein, Rhomboid family [Arabidopsis
  misc_feature (1)..(267): Homolog of NCBI NO: 294845 NR Description: membrane protein [Saccharum hybrid cultivar
  misc_feature (1)..(267): Homolog of NCBI NO: 15240744 NR Description: membrane protein, Rhomboid family [Arabidopsis
  misc_feature (1)..(267): Homolog of NCBI NO: 25402744 NR Description: protein T12C24.28 [imported] - Arabidopsis
  misc_feature (1)..(267): Homolog of NCBI NO: 15222058 NR Description: membrane protein, Rhomboid family [Arabidopsis
  misc_feature (1)..(267): Homolog of NCBI NO: 15221690 NR Description: membrane protein, Rhomboid family [Arabidopsis
MFVNDCPKKITGPNKECVARFLGRFSFQPLKENPLFGPSSSTLEKMGALEWRKVVHEHQGWRLLSCMWLHAGIIHLLTNMLSLIFIGIRLEQQFGFIRVGLIYLISGLGGSILSSLFLQESISVGASGALFGLLGAMLSELLTNWTIYANKAAALITLLFIIAINLALGMLPRVDNFAHIGGFLTGFCLGFVLLVRPQYGWEASRTNTSRTKRKYSMYQYVLFVVSVVLLVVGLTVALVMLFKGENGNKHCKWCHYLSCFPTSKWTC

SEQ ID NO: 22108 - protein, 222 aa, Arabidopsis thaliana
  peptide (1)..(222): Ceres Seq. ID no. 13497490
  misc_feature (1)..(221): Homolog of NCBI NO: 15236387 NR Description: membrane protein, Rhomboid family [Arabidopsis
  misc_feature (1)..(222): Homolog of NCBI NO: 11357824 NR Description: hypothetical protein F5K20.80 - Arabidopsis
  misc_feature (1)..(222): Homolog of NCBI NO: 37536172 NR Description: putative membrane protein
  misc_feature (1)..(222): Homolog of NCBI NO: 38344377 NR Description: OSJNBb0032E06.11 [Oryza sativa (japonica
  misc_feature (1)..(222): Homolog of NCBI NO: 30693911 NR Description: membrane protein, Rhomboid family [Arabidopsis
  misc_feature (1)..(222): Homolog of NCBI NO: 294845 NR Description: membrane protein [Saccharum hybrid cultivar
  misc_feature (1)..(222): Homolog of NCBI NO: 15240744 NR Description: membrane protein, Rhomboid family [Arabidopsis
  misc_feature (1)..(222): Homolog of NCBI NO: 25402744 NR Description: protein T12C24.28 [imported] - Arabidopsis
  misc_feature (1)..(222): Homolog of NCBI NO: 15222058 NR Description: membrane protein, Rhomboid family [Arabidopsis
  misc_feature (1)..(222): Homolog of NCBI NO: 15221690 NR Description: membrane protein, Rhomboid family [Arabidopsis
MGALEWRKVVHEHQGWRLLSCMWLHAGIIHLLTNMLSLIFIGIRLEQQFGFIRVGLIYLISGLGGSILSSLFLQESISVGASGALFGLLGAMLSELLTNWTIYANKAAALITLLFIIAINLALGMLPRVDNFAHIGGFLTGFCLGFVLLVRPQYGWEASRTNTSRTKRKYSMYQYVLFVVSVVLLVVGLTVALVMLFKGENGNKHCKWCHYLSCFPTSKWTC

SEQ ID NO: 22109 - DNA, 1115 bp, Arabidopsis thaliana
  misc_feature (1)..(1115): Ceres Seq. ID no. 12738698
  misc_feature: MA Experiment ID: 20000169 Result: Down-regulated in Transcription
  misc_feature: MA Experiment 20000169 PARAMETER Experiment Name: At_100uM_ABA_P Parameter: Age (day) Value: 14
  misc_feature: MA Experiment 20000169 PARAMETER Experiment Name: At_100uM_ABA_P Parameter: Organism Value: A. thaliana
  misc_feature: MA Experiment 20000169 PARAMETER Experiment Name: At_100uM_ABA_P Parameter: Plant Line Value: WS
  misc_feature: MA Experiment 20000169 PARAMETER Experiment Name: At_100uM_ABA_P Parameter: Timepoint (hr) Value: 6
  misc_feature: MA Experiment 20000169 PARAMETER Experiment Name: At_100uM_ABA_P Parameter: Tissue Value: Aerial
  misc_feature: MA Experiment 20000169 PARAMETER Experiment Name: At_100uM_ABA_P Parameter: Treatment Value: 100uM ABA vs. No Treatment
  misc_feature: MA Experiment ID: 20000180 Result: Up-regulated in Transcription
  misc_feature: MA Experiment 20000180 PARAMETER Experiment Name: At_Germinating_Seeds_P Parameter: Age (hr) Value: 24 vs. 0
  misc_feature: MA Experiment 20000180 PARAMETER Experiment Name: At_Germinating_Seeds_P Parameter: Tissue Value: Germinating Seeds
  misc_feature: MA Experiment ID: 20000182 Result: Down-regulated in Transcription
  misc_feature: MA Experiment 20000182 PARAMETER Experiment Name: At_2mM_SA_P Parameter: Age (day) Value: 14
  misc_feature: MA Experiment 20000182 PARAMETER Experiment Name: At_2mM_SA_P Parameter: Organism Value: A. thaliana
  misc_feature: MA Experiment 20000182 PARAMETER Experiment Name: At_2mM_SA_P Parameter: Plant Line Value: WS
  misc_feature: MA Experiment 20000182 PARAMETER Experiment Name: At_2mM_SA_P Parameter: Timepoint (hr) Value: 6
  misc_feature: MA Experiment 20000182 PARAMETER Experiment Name: At_2mM_SA_P Parameter: Tissue Value: Aerial
  misc_feature: MA Experiment 20000182 PARAMETER Experiment Name: At_2mM_SA_P Parameter: Treatment Value: 2mM SA vs. No Treatment
  misc_feature: MA Experiment ID: 20000184 Result: Up-regulated in Transcription
  misc_feature: MA Experiment 20000184 PARAMETER Experiment Name: At_Shoots__P Parameter: Age (day) Value: 7
  misc_feature: MA Experiment 20000184 PARAMETER Experiment Name: At_Shoots__P Parameter: Tissue Value: Shoots vs. Whole Plant
  misc_feature: MA Experiment ID: 20000185 Result: Down-regulated in Transcription
  misc_feature: MA Experiment 20000185 PARAMETER Experiment Name: At_Roots__P Parameter: Age (day) Value: 7 vs. 21
  misc_feature: MA Experiment 20000185 PARAMETER Experiment Name: At_Roots__P Parameter: Organism Value: A. thaliana
  misc_feature: MA Experiment 20000185 PARAMETER Experiment Name: At_Roots__P Parameter: Tissue Value: Roots vs. Whole Plant
  misc_feature: MA Experiment ID: 20000214 Result: Up-regulated in Transcription
  misc_feature: MA Experiment 20000214 PARAMETER Experiment Name: At_4deg_Cold_P Parameter: Timepoint (hr) Value: 6
  misc_feature: MA Experiment ID: 20000234 Result: Up-regulated in Transcription
  misc_feature: MA Experiment 20000234 PARAMETER Experiment Name: At_Siliques_P Parameter: Age (day) Value: 21
  misc_feature: MA Experiment 20000234 PARAMETER Experiment Name: At_Siliques_P Parameter: Organism Value: A. thaliana
  misc_feature: MA Experiment 20000234 PARAMETER Experiment Name: At_Siliques_P Parameter: Plant Line Value: WS
  misc_feature: MA Experiment 20000234 PARAMETER Experiment Name: At_Siliques_P Parameter: Tissue Value: Less Than 5mm Siliques vs. Whole Plant
  misc_feature: MA Experiment ID: 20000267 Result: Down-regulated in Transcription
  misc_feature: MA Experiment 20000267 PARAMETER Experiment Name: At_Drought_P Parameter: Age (day) Value: 7
  misc_feature: MA Experiment 20000267 PARAMETER Experiment Name: At_Drought_P Parameter: Organism Value: A. thaliana
  misc_feature: MA Experiment 20000267 PARAMETER Experiment Name: At_Drought_P Parameter: Plant Line Value: WS
  misc_feature: MA Experiment 20000267 PARAMETER Experiment Name: At_Drought_P Parameter: Timepoint (hr) Value: 6
  misc_feature: MA Experiment 20000267 PARAMETER Experiment Name: At_Drought_P Parameter: Tissue Value: Whole Plant
  misc_feature: MA Experiment 20000267 PARAMETER Experiment Name: At_Drought_P Parameter: Treatment Value: Drought vs. No Drought
  misc_feature: MA Experiment ID: 20000268 Result: Down-regulated in Transcription
  misc_feature: MA Experiment 20000268 PARAMETER Experiment Name: At_100mM_NaCl__P Parameter: Age (day) Value: 14
  misc_feature: MA Experiment 20000268 PARAMETER Experiment Name: At_100mM_NaCl__P Parameter: Organism Value: A. thaliana
  misc_feature: MA Experiment 20000268 PARAMETER Experiment Name: At_100mM_NaCl__P Parameter: Plant Line Value: WS
  misc_feature: MA Experiment 20000268 PARAMETER Experiment Name: At_100mM_NaCl__P Parameter: Timepoint (hr) Value: 6
  misc_feature: MA Experiment 20000268 PARAMETER Experiment Name: At_100mM_NaCl__P Parameter: Tissue Value: Whole Plant
  misc_feature: MA Experiment 20000268 PARAMETER Experiment Name: At_100mM_NaCl__P Parameter: Treatment Value: 100mM NaCl vs. No Treatment
  misc_feature: MA Experiment ID: 20000286 Result: Up-regulated in Transcription
  misc_feature: MA Experiment 20000286 PARAMETER Experiment Name: At_Open_Flower_P Parameter: Age (day) Value: 21
  misc_feature: MA Experiment 20000286 PARAMETER Experiment Name: At_Open_Flower_P Parameter: Plant Line Value: WS
  misc_feature: MA Experiment 20000286 PARAMETER Experiment Name: At_Open_Flower_P Parameter: Tissue Value: Half Open vs. Whole Plant
  misc_feature: MA Experiment ID: 20000436 Result: Down-regulated in Transcription
  misc_feature: MA Experiment 20000436 PARAMETER Experiment Name: At_Drought_P Parameter: Age (day) Value: 7
  misc_feature: MA Experiment 20000436 PARAMETER Experiment Name: At_Drought_P Parameter: Organism Value: A. thaliana
  misc_feature: MA Experiment 20000436 PARAMETER Experiment Name: At_Drought_P Parameter: Plant Line Value: WS
  misc_feature: MA Experiment 20000436 PARAMETER Experiment Name: At_Drought_P Parameter: Timepoint (hr) Value: 12
  misc_feature: MA Experiment 20000436 PARAMETER Experiment Name: At_Drought_P Parameter: Tissue Value: Whole Plant
  misc_feature: MA Experiment 20000436 PARAMETER Experiment Name: At_Drought_P Parameter: Treatment Value: Drought vs. No Drought
  misc_feature: MA Experiment ID: 20000438 Result: Up-regulated in Transcription
  misc_feature: MA Experiment 20000438 PARAMETER Experiment Name: At_Shoots__P Parameter: Age (day) Value: 14
  misc_feature: MA Experiment 20000438 PARAMETER Experiment Name: At_Shoots__P Parameter: Tissue Value: Shoots vs. Whole Plant
  misc_feature: MA Experiment ID: 20000439 Result: Down-regulated in Transcription
  misc_feature: MA Experiment 20000439 PARAMETER Experiment Name: At_Roots__P Parameter: Age (day) Value: 14 vs. 21
  misc_feature: MA Experiment 20000439 PARAMETER Experiment Name: At_Roots__P Parameter: Organism Value: A. thaliana
  misc_feature: MA Experiment 20000439 PARAMETER Experiment Name: At_Roots__P Parameter: Tissue Value: Roots vs. Whole Plant
  misc_feature: MA Experiment ID: 20000451 Result: Up-regulated in Transcription
  misc_feature: MA Experiment 20000451 PARAMETER Experiment Name: At_CS6879_Shoots-Roots_P Parameter: Age (day) Value: 14
  misc_feature: MA Experiment 20000451 PARAMETER Experiment Name: At_CS6879_Shoots-Roots_P Parameter: Organism Value: A. thaliana
  misc_feature: MA Experiment 20000451 PARAMETER Experiment Name: At_CS6879_Shoots-Roots_P Parameter: Plant Line Value: CS6879 vs. WS
  misc_feature: MA Experiment 20000451 PARAMETER Experiment Name: At_CS6879_Shoots-Roots_P Parameter: Tissue Value: Roots
  misc_feature: MA Experiment ID: 20001247 Result: Up-regulated in Transcription
  misc_feature: MA Experiment 20001247 PARAMETER Experiment Name: At_Far-red-induction_P Parameter: Age (day) Value: 7
  misc_feature: MA Experiment 20001247 PARAMETER Experiment Name: At_Far-red-induction_P Parameter: Light Value: Far-red vs. White
  misc_feature: MA Experiment 20001247 PARAMETER Experiment Name: At_Far-red-induction_P Parameter: Organism Value: A. thaliana
  misc_feature: MA Experiment 20001247 PARAMETER Experiment Name: At_Far-red-induction_P Parameter: Plant Line Value: Columbia
  misc_feature: MA Experiment 20001247 PARAMETER Experiment Name: At_Far-red-induction_P Parameter: Timepoint (hr) Value: 1
  misc_feature: MA Experiment 20001247 PARAMETER Experiment Name: At_Far-red-induction_P Parameter: Tissue Value: Whole Plant
  misc_feature: MA Experiment ID: 20001554 Result: Down-regulated in Transcription
  misc_feature: MA Experiment 20001554 PARAMETER Experiment Name: At_Drought_Soil_Dry_P Parameter: Age (day) Value: 21
  misc_feature: MA Experiment 20001554 PARAMETER Experiment Name: At_Drought_Soil_Dry_P Parameter: Organism Value: A. thaliana
  misc_feature: MA Experiment 20001554 PARAMETER Experiment Name: At_Drought_Soil_Dry_P Parameter: Plant Line Value: WS
  misc_feature: MA Experiment 20001554 PARAMETER Experiment Name: At_Drought_Soil_Dry_P Parameter: Post Timepoint (hr) Value: None
  misc_feature: MA Experiment 20001554 PARAMETER Experiment Name: At_Drought_Soil_Dry_P Parameter: Post-Treatment Value: None
  misc_feature: MA Experiment 20001554 PARAMETER Experiment Name: At_Drought_Soil_Dry_P Parameter: Timepoint (day) Value: 7
  misc_feature: MA Experiment 20001554 PARAMETER Experiment Name: At_Drought_Soil_Dry_P Parameter: Treatment Value: Drought vs. No Drought
  misc_feature: MA Experiment ID: 20001555 Result: Down-regulated in Transcription
  misc_feature: MA Experiment 20001555 PARAMETER Experiment Name: At_Drought_Soil_Dry_P Parameter: Age (day) Value: 24
  misc_feature: MA Experiment 20001555 PARAMETER Experiment Name: At_Drought_Soil_Dry_P Parameter: Organism Value: A. thaliana
  misc_feature: MA Experiment 20001555 PARAMETER Experiment Name: At_Drought_Soil_Dry_P Parameter: Plant Line Value: WS
  misc_feature: MA Experiment 20001555 PARAMETER Experiment Name: At_Drought_Soil_Dry_P Parameter: Post Timepoint (hr) Value: None
  misc_feature: MA Experiment 20001555 PARAMETER Experiment Name: At_Drought_Soil_Dry_P Parameter: Post-Treatment Value: None
  misc_feature: MA Experiment 20001555 PARAMETER Experiment Name: At_Drought_Soil_Dry_P Parameter: Timepoint (day) Value: 10
  misc_feature: MA Experiment 20001555 PARAMETER Experiment Name: At_Drought_Soil_Dry_P Parameter: Treatment Value: Drought vs. No Drought
  misc_feature: MA Experiment ID: 20001556 Result: Down-regulated in Transcription
  misc_feature: MA Experiment 20001556 PARAMETER Experiment Name: At_Drought_Soil_Dry_P Parameter: Age (day) Value: 26
  misc_feature: MA Experiment 20001556 PARAMETER Experiment Name: At_Drought_Soil_Dry_P Parameter: Organism Value: A. thaliana
  misc_feature: MA Experiment 20001556 PARAMETER Experiment Name: At_Drought_Soil_Dry_P Parameter: Plant Line Value: WS
  misc_feature: MA Experiment 20001556 PARAMETER Experiment Name: At_Drought_Soil_Dry_P Parameter: Post Timepoint (hr) Value: None
  misc_feature: MA Experiment 20001556 PARAMETER Experiment Name: At_Drought_Soil_Dry_P Parameter: Post-Treatment Value: None
  misc_feature: MA Experiment 20001556 PARAMETER Experiment Name: At_Drought_Soil_Dry_P Parameter: Timepoint (day) Value: 12
  misc_feature: MA Experiment 20001556 PARAMETER Experiment Name: At_Drought_Soil_Dry_P Parameter: Treatment Value: Drought vs. No Drought
  misc_feature: MA Experiment ID: 20001557 Result: Up-regulated in Transcription
  misc_feature: MA Experiment 20001557 PARAMETER Experiment Name: At_Drought_Soil_Dry_P Parameter: Age (day) Value: 27
  misc_feature: MA Experiment 20001557 PARAMETER Experiment Name: At_Drought_Soil_Dry_P Parameter: Organism Value: A. thaliana
  misc_feature: MA Experiment 20001557 PARAMETER Experiment Name: At_Drought_Soil_Dry_P Parameter: Plant Line Value: WS
  misc_feature: MA Experiment 20001557 PARAMETER Experiment Name: At_Drought_Soil_Dry_P Parameter: Post Timepoint (hr) Value: 3
  misc_feature: MA Experiment 20001557 PARAMETER Experiment Name: At_Drought_Soil_Dry_P Parameter: Post-Treatment Value: Re-Water vs. No Drought
  misc_feature: MA Experiment 20001557 PARAMETER Experiment Name: At_Drought_Soil_Dry_P Parameter: Timepoint (day) Value: 13
  misc_feature: MA Experiment 20001557 PARAMETER Experiment Name: At_Drought_Soil_Dry_P Parameter: Treatment Value: Drought vs. No Drought
  misc_feature: MA Experiment ID: 20001558 Result: Up-regulated in Transcription
  misc_feature: MA Experiment 20001558 PARAMETER Experiment Name: At_Drought_Soil_Dry_P Parameter: Age (day) Value: 27
  misc_feature: MA Experiment 20001558 PARAMETER Experiment Name: At_Drought_Soil_Dry_P Parameter: Organism Value: A. thaliana
  misc_feature: MA Experiment 20001558 PARAMETER Experiment Name: At_Drought_Soil_Dry_P Parameter: Plant Line Value: WS
  misc_feature: MA Experiment 20001558 PARAMETER Experiment Name: At_Drought_Soil_Dry_P Parameter: Post Timepoint (hr) Value: 6
  misc_feature: MA Experiment 20001558 PARAMETER Experiment Name: At_Drought_Soil_Dry_P Parameter: Post-Treatment Value: Re-Water vs. No Drought
  misc_feature: MA Experiment 20001558 PARAMETER Experiment Name: At_Drought_Soil_Dry_P Parameter: Timepoint (day) Value: 13
  misc_feature: MA Experiment 20001558 PARAMETER Experiment Name: At_Drought_Soil_Dry_P Parameter: Treatment Value: Drought vs. No Drought
  misc_feature: MA Experiment ID: 20001560 Result: Up-regulated in Transcription
  misc_feature: MA Experiment 20001560 PARAMETER Experiment Name: At_Drought_Soil_Dry_P Parameter: Age (day) Value: 28
  misc_feature: MA Experiment 20001560 PARAMETER Experiment Name: At_Drought_Soil_Dry_P Parameter: Organism Value: A. thaliana
  misc_feature: MA Experiment 20001560 PARAMETER Experiment Name: At_Drought_Soil_Dry_P Parameter: Plant Line Value: WS
  misc_feature: MA Experiment 20001560 PARAMETER Experiment Name: At_Drought_Soil_Dry_P Parameter: Post Timepoint (hr) Value: None
  misc_feature: MA Experiment 20001560 PARAMETER Experiment Name: At_Drought_Soil_Dry_P Parameter: Post-Treatment Value: None
  misc_feature: MA Experiment 20001560 PARAMETER Experiment Name: At_Drought_Soil_Dry_P Parameter: Timepoint (day) Value: 14
  misc_feature: MA Experiment 20001560 PARAMETER Experiment Name: At_Drought_Soil_Dry_P Parameter: Treatment Value: Drought vs. No Drought
  misc_feature: MA Experiment ID: 20001904 Result: Down-regulated in Transcription
  misc_feature: MA Experiment 20001904 PARAMETER Experiment Name: At_Drought_Reproduction_P Parameter: Age (day) Value: 37
  misc_feature: MA Experiment 20001904 PARAMETER Experiment Name: At_Drought_Reproduction_P Parameter: Organism Value: A. thaliana
  misc_feature: MA Experiment 20001904 PARAMETER Experiment Name: At_Drought_Reproduction_P Parameter: Plant Line Value: WS
  misc_feature: MA Experiment 20001904 PARAMETER Experiment Name: At_Drought_Reproduction_P Parameter: Timepoint (day) Value: 7
  misc_feature: MA Experiment 20001904 PARAMETER Experiment Name: At_Drought_Reproduction_P Parameter: Tissue Value: Rosettes
  misc_feature: MA Experiment 20001904 PARAMETER Experiment Name: At_Drought_Reproduction_P Parameter: Treatment Value: Drought vs. No Drought
  misc_feature: MA Experiment ID: 20001906 Result: Down-regulated in Transcription
  misc_feature: MA Experiment 20001906 PARAMETER Experiment Name: At_Drought_Reproduction_P Parameter: Age (day) Value: 35
  misc_feature: MA Experiment 20001906 PARAMETER Experiment Name: At_Drought_Reproduction_P Parameter: Organism Value: A. thaliana
  misc_feature: MA Experiment 20001906 PARAMETER Experiment Name: At_Drought_Reproduction_P Parameter: Plant Line Value: WS
  misc_feature: MA Experiment 20001906 PARAMETER Experiment Name: At_Drought_Reproduction_P Parameter: Timepoint (day) Value: 5
  misc_feature: MA Experiment 20001906 PARAMETER Experiment Name: At_Drought_Reproduction_P Parameter: Tissue Value: Siliques
  misc_feature: MA Experiment 20001906 PARAMETER Experiment Name: At_Drought_Reproduction_P Parameter: Treatment Value: Drought vs. No Drought
  misc_feature: MA Experiment ID: 20001907 Result: Down-regulated in Transcription
  misc_feature: MA Experiment 20001907 PARAMETER Experiment Name: At_Drought_Reproduction_P Parameter: Age (day) Value: 37
  misc_feature: MA Experiment 20001907 PARAMETER Experiment Name: At_Drought_Reproduction_P Parameter: Organism Value: A. thaliana
  misc_feature: MA Experiment 20001907 PARAMETER Experiment Name: At_Drought_Reproduction_P Parameter: Plant Line Value: WS
  misc_feature: MA Experiment 20001907 PARAMETER Experiment Name: At_Drought_Reproduction_P Parameter: Timepoint (day) Value: 7
  misc_feature: MA Experiment 20001907 PARAMETER Experiment Name: At_Drought_Reproduction_P Parameter: Tissue Value: Siliques
  misc_feature: MA Experiment 20001907 PARAMETER Experiment Name: At_Drought_Reproduction_P Parameter: Treatment Value: Drought vs. No Drought
  misc_feature: MA Experiment ID: 20001908 Result: Down-regulated in Transcription
  misc_feature: MA Experiment 20001908 PARAMETER Experiment Name: At_Drought_Reproduction_P Parameter: Age (day) Value: 40
  misc_feature: MA Experiment 20001908 PARAMETER Experiment Name: At_Drought_Reproduction_P Parameter: Organism Value: A. thaliana
  misc_feature: MA Experiment 20001908 PARAMETER Experiment Name: At_Drought_Reproduction_P Parameter: Plant Line Value: WS
  misc_feature: MA Experiment 20001908 PARAMETER Experiment Name: At_Drought_Reproduction_P Parameter: Timepoint (day) Value: 10
  misc_feature: MA Experiment 20001908 PARAMETER Experiment Name: At_Drought_Reproduction_P Parameter: Tissue Value: Siliques
  misc_feature: MA Experiment 20001908 PARAMETER Experiment Name: At_Drought_Reproduction_P Parameter: Treatment Value: Drought vs. No Drought
  misc_feature: MA Experiment ID: 20001911 Result: Down-regulated in Transcription
  misc_feature: MA Experiment 20001911 PARAMETER Experiment Name: At_Drought_Reproduction_P Parameter: Age (day) Value: 40
  misc_feature: MA Experiment 20001911 PARAMETER Experiment Name: At_Drought_Reproduction_P Parameter: Organism Value: A. thaliana
  misc_feature: MA Experiment 20001911 PARAMETER Experiment Name: At_Drought_Reproduction_P Parameter: Plant Line Value: WS
  misc_feature: MA Experiment 20001911 PARAMETER Experiment Name: At_Drought_Reproduction_P Parameter: Timepoint (day) Value: 10
  misc_feature: MA Experiment 20001911 PARAMETER Experiment Name: At_Drought_Reproduction_P Parameter: Tissue Value: Flowers
  misc_feature: MA Experiment 20001911 PARAMETER Experiment Name: At_Drought_Reproduction_P Parameter: Treatment Value: Drought vs. No Drought
atccactctactcaacatggactcctccaaactctcatctctctctctttgcctcttcctcatttgcattatctatctcccccaacattctctcgcatgcggctcttgcaacccacggaagggcggaaagcactcccctaaagcccctaagctaccagttcctccggtgaccgtccctaagctaccagttcctccggtgaccgtccctaccagtccctccggtgaccgtccctaagctacccgttcctcctgtgaccatccctaagctacccgttccaccagtgactgtacctaagctacccgttcctcctgtgaccgtccccaagctacccgttcctccagtgaccgtccccaagctacccgttcctccagtgacagtccctaagctacccgttcccccggtaactgtacctaagctacccgttcctccagtgaccgtccctaagctaccccttcctccgatttcagggctacccatacctccagtggtaggtccaaatctgccattgccacctttgccaattgtaggtcctattcttccaccgggaacaaccccaccagccacaggagggaaggactgtcctccaccgccagggagcgtaaagccaccatcagggggcgggaaggcgacatgtccaatagacacgctgaagttaggtgcttgcgtcgacttgttgggaggtttagtaaagatagggcttggggatccagcagttaacaaatgttgtccgttacttaaaggcctcgttgaaatcgaagccgcggcttgtctctgcactaccctcaagctcaaagctcttgacctcaatctttatgtccctgttgctcttcagcttctccttacctgtggcaaaaatccacctccgggctacacttgttccatatgataaactcactccacttataaaggatgctttggagaaaaaagtgagaagagaatggcagagctccaatctttcctgtcttggtttaccaaatacatcatatcaaatcctatccctttgattctttcctctatcgttcccttatgcttgtatcattaattaatgtgtgctttttagattaatgattcttctcttgtattaaagtatgatttgaaatcctttttttttctc

SEQ ID NO: 22110 - protein, 77 aa, Arabidopsis thaliana
  peptide (1)..(77): Ceres Seq. ID no. 12738699
  misc_feature (45)..(77): Homolog of NCBI NO: 20138131 NR Description: Vegetative cell wall protein gp1 precursor
  misc_feature (27)..(77): Homolog of NCBI NO: 12018149 NR Description: gamete-specific hydroxyproline-rich glycoprotein
  misc_feature (6)..(72): Homolog of NCBI NO: 24417264 NR Description: unknown [Arabidopsis thaliana]
  misc_feature (6)..(72): Homolog of NCBI NO: 18396941 NR Description: expressed protein
STLLNMDSSKLSSLSLCLFLICIIYLPQHSLACGSCNPRKGGKHSPKAPKLPVPPVTVPKLPVPPVTVPTSPSGDRP

SEQ ID NO: 22111 - protein, 72 aa, Arabidopsis thaliana
  peptide (1)..(72): Ceres Seq. ID no. 12738700
  misc_feature (40)..(72): Homolog of NCBI NO: 20138131 NR Description: Vegetative cell wall protein gp1 precursor
  misc_feature (22)..(72): Homolog of NCBI NO: 12018149 NR Description: gamete-specific hydroxyproline-rich glycoprotein
  misc_feature (1)..(67): Homolog of NCBI NO: 24417264 NR Description: unknown [Arabidopsis thaliana]
  misc_feature (1)..(67): Homolog of NCBI NO: 18396941 NR Description: expressed protein
MDSSKLSSLSLCLFLICIIYLPQHSLACGSCNPRKGGKHSPKAPKLPVPPVTVPKLPVPPVTVPTSPSGDRP

SEQ ID NO: 22112 - protein, 63 aa, Arabidopsis thaliana
  peptide (1)..(63): Ceres Seq. ID no. 12738701
MSLLLFSFSLPVAKIHLRATLVPYDKLTPLIKDALEKKVRREWQSSNLSCLGLPNTSYQILSL

SEQ ID NO: 22113 - DNA, 1250 bp, Arabidopsis thaliana
  misc_feature (1)..(1250): Ceres Seq. ID no. 12370541
  misc_feature: MA Experiment ID: 108434 Result: Up-regulated in Transcription
  misc_feature: MA Experiment 108434 PARAMETER Experiment Name: At_Root_Tips_cDNA_P Parameter: Tissue Value: Root Tips
  misc_feature: MA Experiment ID: 108577 Result: Up-regulated in Transcription
  misc_feature: MA Experiment 108577 PARAMETER Experiment Name: At_42deg_Heat_cDNA_P Parameter: Temperature (deg C) Value: 42 vs. 22
  misc_feature: MA Experiment 108577 PARAMETER Experiment Name: At_42deg_Heat_cDNA_P Parameter: Timepoint (hr) Value: 6
  misc_feature: MA Experiment 108577 PARAMETER Experiment Name: At_42deg_Heat_cDNA_P Parameter: Tissue Value: Aerial
  misc_feature: MA Experiment ID: 108595 Result: Down-regulated in Transcription
  misc_feature: MA Experiment 108595 PARAMETER Experiment Name: At_Ler-pi_Ovule_cDNA_P Parameter: Plant Line Value: null
  misc_feature: MA Experiment ID: 20000111 Result: Up-regulated in Transcription
  misc_feature: MA Experiment 20000111 PARAMETER Experiment Name: At_42deg_Heat_cDNA_P Parameter: Temperature (deg C) Value: 42 vs. 22
  misc_feature: MA Experiment 20000111 PARAMETER Experiment Name: At_42deg_Heat_cDNA_P Parameter: Timepoint (hr) Value: 6
  misc_feature: MA Experiment 20000111 PARAMETER Experiment Name: At_42deg_Heat_cDNA_P Parameter: Tissue Value: Aerial
  misc_feature: MA Experiment ID: 20000113 Result: Up-regulated in Transcription
  misc_feature: MA Experiment 20000113 PARAMETER Experiment Name: At_42deg_Heat_cDNA_P Parameter: Temperature (deg C) Value: 42 vs. 22
  misc_feature: MA Experiment 20000113 PARAMETER Experiment Name: At_42deg_Heat_cDNA_P Parameter: Timepoint (hr) Value: 8
  misc_feature: MA Experiment 20000113 PARAMETER Experiment Name: At_42deg_Heat_cDNA_P Parameter: Tissue Value: Aerial
  misc_feature: MA Experiment ID: 20000117 Result: Down-regulated in Transcription
  misc_feature: MA Experiment 20000117 PARAMETER Experiment Name: At_100uM_ABA_Mutants_cDNA_P Parameter: Plant Line Value: Columbia
  misc_feature: MA Experiment 20000117 PARAMETER Experiment Name: At_100uM_ABA_Mutants_cDNA_P Parameter: Timepoint (hr) Value: 6
  misc_feature: MA Experiment 20000117 PARAMETER Experiment Name: At_100uM_ABA_Mutants_cDNA_P Parameter: Tissue Value: Aerial
  misc_feature: MA Experiment 20000117 PARAMETER Experiment Name: At_100uM_ABA_Mutants_cDNA_P Parameter: Treatment Value: 100uM ABA vs. No Treatment
  misc_feature: MA Experiment ID: 20000184 Result: Up-regulated in Transcription
  misc_feature: MA Experiment 20000184 PARAMETER Experiment Name: At_Shoots__P Parameter: Age (day) Value: 7
  misc_feature: MA Experiment 20000184 PARAMETER Experiment Name: At_Shoots__P Parameter: Tissue Value: Shoots vs. Whole Plant
  misc_feature: MA Experiment ID: 20000227 Result: Down-regulated in Transcription
  misc_feature: MA Experiment 20000227 PARAMETER Experiment Name: At_Root-Tips-vs-Tops_P Parameter: Tissue Value: Root Tips vs. Root Tops
  misc_feature: MA Experiment ID: 20000234 Result: Up-regulated in Transcription
  misc_feature: MA Experiment 20000234 PARAMETER Experiment Name: At_Siliques_P Parameter: Age (day) Value: 21
  misc_feature: MA Experiment 20000234 PARAMETER Experiment Name: At_Siliques_P Parameter: Organism Value: A. thaliana
  misc_feature: MA Experiment 20000234 PARAMETER Experiment Name: At_Siliques_P Parameter: Plant Line Value: WS
  misc_feature: MA Experiment 20000234 PARAMETER Experiment Name: At_Siliques_P Parameter: Tissue Value: Less Than 5mm Siliques vs. Whole Plant
  misc_feature: MA Experiment ID: 20000437 Result: Down-regulated in Transcription
  misc_feature: MA Experiment 20000437 PARAMETER Experiment Name: At_Drought_P Parameter: Age (day) Value: 8
  misc_feature: MA Experiment 20000437 PARAMETER Experiment Name: At_Drought_P Parameter: Organism Value: A. thaliana
  misc_feature: MA Experiment 20000437 PARAMETER Experiment Name: At_Drought_P Parameter: Plant Line Value: WS
  misc_feature: MA Experiment 20000437 PARAMETER Experiment Name: At_Drought_P Parameter: Timepoint (hr) Value: 24
  misc_feature: MA Experiment 20000437 PARAMETER Experiment Name: At_Drought_P Parameter: Tissue Value: Whole Plant
  misc_feature: MA Experiment 20000437 PARAMETER Experiment Name: At_Drought_P Parameter: Treatment Value: Drought vs. No Drought
  misc_feature: MA Experiment ID: 20000438 Result: Up-regulated in Transcription
  misc_feature: MA Experiment 20000438 PARAMETER Experiment Name: At_Shoots__P Parameter: Age (day) Value: 14
  misc_feature: MA Experiment 20000438 PARAMETER Experiment Name: At_Shoots__P Parameter: Tissue Value: Shoots vs. Whole Plant
  misc_feature: MA Experiment ID: 20001757 Result: Up-regulated in Transcription
  misc_feature: MA Experiment 20001757 PARAMETER Experiment Name: At_50mM_NH4NO3_L-to-H_P Parameter: Timepoint (hr) Value: 6
  misc_feature: MA Experiment 20001757 PARAMETER Experiment Name: At_50mM_NH4NO3_L-to-H_P Parameter: Tissue Value: Leaf
  misc_feature: MA Experiment 20001757 PARAMETER Experiment Name: At_50mM_NH4NO3_L-to-H_P Parameter: Treatment Value: 50mM NH4NO3 vs 100mM Mannitol
aatcaatcctcttgcggagaaactttgggaagagccgaagagaagtcgaggtctctctatctctctctttcgtacacttcgcgcttctcttcctgtcagaggcgtttctcatggctcctcttactctctccgttgatgtgaagagctcttcagcgacctctcatgatgtttcgaagagggtaatgcagagttcacagctcaaaataaacaaaggcttttttgcatctgttaatacacaagaagataaaccctttgatttcttccgcactctctttgaggggtttatagcaggaggtacagctggagttgtagttgaaacagctttatacccaattgatactattaagactagacttcaggcagctcgtggaggtggaaaaattgttttgaagggtctttattcaggattagctggaaatatcgctggtgtcttaccggcttcggctttatttgttggagtttacgaacccacaaagcagaaactgctgaagacctttcctgatcatttaagcgcagttgctcacctgactgcaggggccatcggtggacttgctgcatctctgattcgagtgcctacagaggttgtgaagcaaagaatgcagaccggacagtttacatcagctcccagtgctgttcgaatgattgcatcaaaagagggatttaggggtctctatgcaggataccggtccttccttttgcgagatttgccatttgatgctatacagttctgcatatatgagcagctttgcttggggtataaaaaagccgcgcgtagagagcttagtgatcctgagaacgctctaatcggtgcatttgctggtgctctgaccggagcagtcaccactccgcttgatgttattaagacaagattaatggttcagggatcagccaaacaatatcaaggaatcgttgactgtgttcaaacaattgtaagagaggaaggagctcctgctctcttaaagggtattgggccaagagtgttgtggataggtattggaggatcaatcttctttggtgtcctcgagagcactaagagaacacttgcacagagacgtcccaatacggttaaagaaaccaaagaagaataagtttctggccgcacaagaaaatgagtgtaaggtgacaatgtaacccctttgtgagttctatgtggtgtgagtttgtttaagtaccaattcaactttcattaaaaaaaaataaaaaaaatagtgttcatttagattatataatttcttgattatttatatctg

SEQ ID NO: 22114 - protein, 361 aa, Arabidopsis thaliana
  peptide (1)..(361): Ceres Seq. ID no. 12370542
  misc_feature (89)..(352): Homolog of NCBI NO: 6324325 NR Description: Member of family of mitochondrial carrier
  misc_feature (89)..(338): Homolog of NCBI NO: 19115553 NR Description: agpet8 protein. [Schizosaccharomyces pombe]
  misc_feature (89)..(342): Homolog of NCBI NO: 3171731 NR Description: AgPET8 [Eremothecium gossypii]
  misc_feature (75)..(347): Homolog of NCBI NO: 24650120 NR Description: CG4743-PA [Drosophila melanogaster]
  misc_feature (91)..(347): Homolog of NCBI NO: 31208625 NR Description: ENSANGP00000011068 [Anopheles gambiae]
  misc_feature (95)..(349): Homolog of NCBI NO: 27754081 NR Description: RIKEN cDNA 4930433D19; expressed sequence
  misc_feature (43)..(350): Homolog of NCBI NO: 18399114 NR Description: allinase, putative; protein id: At1g34065.1
  misc_feature (80)..(356): Homolog of NCBI NO: 34394981 NR Description: mitochondrial aspartate-glutamate carrier
  misc_feature (37)..(320): Homolog of NCBI NO: 7486053 NR Description: hypothetical protein F23K16.90 - Arabidopsis
  misc_feature (37)..(361): Homolog of NCBI NO: 18420458 NR Description: mitochondrial carrier protein family
SILLRRNFGKSRREVEVSLSLSFVHFALLFLSEAFLMAPLTLSVDVKSSSATSHDVSKRVMQSSQLKINKGFFASVNTQEDKPFDFFRTLFEGFIAGGTAGVVVETALYPIDTIKTRLQAARGGGKIVLKGLYSGLAGNIAGVLPASALFVGVYEPTKQKLLKTFPDHLSAVAHLTAGAIGGLAASLIRVPTEVVKQRMQTGQFTSAPSAVRMIASKEGFRGLYAGYRSFLLRDLPFDAIQFCIYEQLCLGYKKAARRELSDPENALIGAFAGALTGAVTTPLDVIKTRLMVQGSAKQYQGIVDCVQTIVREEGAPALLKGIGPRVLWIGIGGSIFFGVLESTKRTLAQRRPNTVKETKEE

SEQ ID NO: 22115 - protein, 325 aa, Arabidopsis thaliana
  peptide (1)..(325): Ceres Seq. ID no. 12370543
  misc_feature (44)..(320): Homolog of NCBI NO: 34394981 NR Description: mitochondrial aspartate-glutamate carrier
  misc_feature (1)..(284): Homolog of NCBI NO: 7486053 NR Description: hypothetical protein F23K16.90 - Arabidopsis
  misc_feature (1)..(325): Homolog of NCBI NO: 18420458 NR Description: mitochondrial carrier protein family
  misc_feature (53)..(316): Homolog of NCBI NO: 6324325 NR Description: Member of family of mitochondrial carrier
  misc_feature (53)..(302): Homolog of NCBI NO: 19115553 NR Description: agpet8 protein. [Schizosaccharomyces pombe]
  misc_feature (53)..(306): Homolog of NCBI NO: 3171731 NR Description: AgPET8 [Eremothecium gossypii]
  misc_feature (39)..(311): Homolog of NCBI NO: 24650120 NR Description: CG4743-PA [Drosophila melanogaster]
  misc_feature (55)..(311): Homolog of NCBI NO: 31208625 NR Description: ENSANGP00000011068 [Anopheles gambiae]
  misc_feature (59)..(313): Homolog of NCBI NO: 27754081 NR Description: RIKEN cDNA 4930433D19; expressed sequence
  misc_feature (7)..(314): Homolog of NCBI NO: 18399114 NR Description: allinase, putative; protein id: At1g34065.1
MAPLTLSVDVKSSSATSHDVSKRVMQSSQLKINKGFFASVNTQEDKPFDFFRTLFEGFIAGGTAGVVVETALYPIDTIKTRLQAARGGGKIVLKGLYSGLAGNIAGVLPASALFVGVYEPTKQKLLKTFPDHLSAVAHLTAGAIGGLAASLIRVPTEVVKQRMQTGQFTSAPSAVRMIASKEGFRGLYAGYRSFLLRDLPFDAIQFCIYEQLCLGYKKAARRELSDPENALIGAFAGALTGAVTTPLDVIKTRLMVQGSAKQYQGIVDCVQTIVREEGAPALLKGIGPRVLWIGIGGSIFFGVLESTKRTLAQRRPNTVKETKEE

SEQ ID NO: 22116 - protein, 301 aa, Arabidopsis thaliana
  peptide (1)..(301): Ceres Seq. ID no. 12370544
  misc_feature (29)..(292): Homolog of NCBI NO: 6324325 NR Description: Member of family of mitochondrial carrier
  misc_feature (29)..(278): Homolog of NCBI NO: 19115553 NR Description: agpet8 protein. [Schizosaccharomyces pombe]
  misc_feature (29)..(282): Homolog of NCBI NO: 3171731 NR Description: AgPET8 [Eremothecium gossypii]
  misc_feature (15)..(287): Homolog of NCBI NO: 24650120 NR Description: CG4743-PA [Drosophila melanogaster]
  misc_feature (31)..(287): Homolog of NCBI NO: 31208625 NR Description: ENSANGP00000011068 [Anopheles gambiae]
  misc_feature (35)..(289): Homolog of NCBI NO: 27754081 NR Description: RIKEN cDNA 4930433D19; expressed sequence
  misc_feature (1)..(290): Homolog of NCBI NO: 18399114 NR Description: allinase, putative; protein id: At1g34065.1
  misc_feature (20)..(296): Homolog of NCBI NO: 34394981 NR Description: mitochondrial aspartate-glutamate carrier
  misc_feature (1)..(260): Homolog of NCBI NO: 7486053 NR Description: hypothetical protein F23K16.90 - Arabidopsis
  misc_feature (1)..(301): Homolog of NCBI NO: 18420458 NR Description: mitochondrial carrier protein family
MQSSQLKINKGFFASVNTQEDKPFDFFRTLFEGFIAGGTAGVVVETALYPIDTIKTRLQAARGGGKIVLKGLYSGLAGNIAGVLPASALFVGVYEPTKQKLLKTFPDHLSAVAHLTAGAIGGLAASLIRVPTEVVKQRMQTGQFTSAPSAVRMIASKEGFRGLYAGYRSFLLRDLPFDAIQFCIYEQLCLGYKKAARRELSDPENALIGAFAGALTGAVTTPLDVIKTRLMVQGSAKQYQGIVDCVQTIVREEGAPALLKGIGPRVLWIGIGGSIFFGVLESTKRTLAQRRPNTVKETKEE

SEQ ID NO: 22117 - DNA, 1194 bp, Arabidopsis thaliana
  misc_feature (1)..(1194): Ceres Seq. ID no. 13486672
  misc_feature: MA Experiment ID: 20000794 Result: Up-regulated in Transcription
  misc_feature: MA Experiment 20000794 PARAMETER Experiment Name: At_Petals_P Parameter: Age (day) Value: 23-25 days
  misc_feature: MA Experiment 20000794 PARAMETER Experiment Name: At_Petals_P Parameter: Plant Line Value: WS
  misc_feature: MA Experiment 20000794 PARAMETER Experiment Name: At_Petals_P Parameter: Tissue Value: Petals vs. Whole plant
attcgtaaccccgtgcaaaaaaaactgaaaaccccaaatccaacctctctcactcaaaaaccatgtcttggctcttcaaatctcgcggcgatgacgatcacgatcccgatcccgatccttccacaactcatggcggtgtcaaagaagatttatcttccttactccgtggcgtcgcagctttcctggcaccgcctccttctccacctgtaaacgaacgccgactctcctctgataattcaccaactcagctaggtcttctcgggatccgcaacgatctagccgagattcgtggaaatttctccaatttcgcatctaatttactccaatttcctagtaatctaagagatagagaaagtagtagaagatctccgttgaacgatcaagttcctggaatctctgaagaagtagtcgatttcgctgttaaaatctcgacgaaacctggttgttggacagattttccattgtcactcgatactgaatttgaactgtctgaggctcaaagggcacatgcatcagccattgaagatttggttcctggccttgtagctgtgaagaatcaagttagtagttacatggatgatgaacacttctggctgatttattttattttgctgatgccgagactgaatgggcatgattttgaactcttagcaacatgcaaggtatttgaaacaagggatcaacttttactaaagctgcaaaagaaagagacagggtcaagcaagagcactactggtcacgaaactcctgaagaaggtagcagtagggaaacagaaaccgttgagggagtcattgacaagatagagactctaaaaattgagcaaagggagataagtgatgagtcatctgaagaacaacggaggagtttcagagatgaagaggtaatctcctttagtgatttagatgtcgatgatctctcggagaagccaagtcccaacaggagtacactgaaaagaccagcatcaaacgcaagcgggtcaagctgggttcagctcagcaagagccaagttggacatagcaaggattcggaaggtgattccagtgactggcttccaattggcgattctgattaacgtttaaaggtatgaaattgaatattactgtaaagtgaagtgttagcaatgacttttaaatgaaaccatgcacatttttattaataaaaatcttactgtgtagtaatggagtcgctacttg

SEQ ID NO: 22118 - protein, 336 aa, Arabidopsis thaliana
  peptide (1)..(336): Ceres Seq. ID no. 13486673
  misc_feature (139)..(184): Pfam Name: BSD domain Pfam Description: BSD domain
  misc_feature (63)..(286): Homolog of NCBI NO: 34909848 NR Description: OSJNBb0053G03.5 [Oryza sativa (japonica
  misc_feature (111)..(332): Homolog of NCBI NO: 18391195 NR Description: expressed protein [Arabidopsis thaliana]
  misc_feature (111)..(325): Homolog of NCBI NO: 21555533 NR Description: unknown [Arabidopsis thaliana]
  misc_feature (69)..(335): Homolog of NCBI NO: 15229611 NR Description: expressed protein [Arabidopsis thaliana]
  misc_feature (15)..(86): Homolog of NCBI NO: 28273391 NR Description: putative BSD domain containing protein
  misc_feature (108)..(328): Homolog of NCBI NO: 28273391 NR Description: putative BSD domain containing protein
  misc_feature (36)..(284): Homolog of NCBI NO: 18425006 NR Description: expressed protein [Arabidopsis thaliana]
  misc_feature (1)..(308): Homolog of NCBI NO: 25411374 NR Description: hypothetical protein At2g10950 [imported] -
  misc_feature (1)..(336): Homolog of NCBI NO: 21592796 NR Description: unknown [Arabidopsis thaliana]
  misc_feature (1)..(336): Homolog of NCBI NO: 18396945 NR Description: expressed protein [Arabidopsis thaliana]
MSWLFKSRGDDDHDPDPDPSTTHGGVKEDLSSLLRGVAAFLAPPPSPPVNERRLSSDNSPTQLGLLGIRNDLAEIRGNFSNFASNLLQFPSNLRDRESSRRSPLNDQVPGISEEVVDFAVKISTKPGCWTDFPLSLDTEFELSEAQRAHASAIEDLVPGLVAVKNQVSSYMDDEHFWLIYFILLMPRLNGHDFELLATCKVFETRDQLLLKLQKKETGSSKSTTGHETPEEGSSRETETVEGVIDKIETLKIEQREISDESSEEQRRSFRDEEVISFSDLDVDDLSEKPSPNRSTLKRPASNASGSSWVQLSKSQVGHSKDSEGDSSDWLPIGDSD

SEQ ID NO: 22119 - DNA, 676 bp, Arabidopsis thaliana
  misc_feature (1)..(676): Ceres Seq. ID no. 12322467
  misc_feature: MA Experiment ID: 108435 Result: Up-regulated in Transcription
  misc_feature: MA Experiment 108435 PARAMETER Experiment Name: At_stm_Mutants_cDNA_P Parameter: Plant Line Value: wt Landsburg vs stm
  misc_feature: MA Experiment 108435 PARAMETER Experiment Name: At_stm_Mutants_cDNA_P Parameter: Tissue Value: Shoot Apical Meristem Region
  misc_feature: MA Experiment ID: 108572 Result: Down-regulated in Transcription
  misc_feature: MA Experiment 108572 PARAMETER Experiment Name: At_Drought_cDNA_P Parameter: Timepoint (hr) Value: 1
  misc_feature: MA Experiment 108572 PARAMETER Experiment Name: At_Drought_cDNA_P Parameter: Tissue Value: Aerial
  misc_feature: MA Experiment 108572 PARAMETER Experiment Name: At_Drought_cDNA_P Parameter: Treatment Value: Drought vs. No Drought
  misc_feature: MA Experiment ID: 108573 Result: Down-regulated in Transcription
  misc_feature: MA Experiment 108573 PARAMETER Experiment Name: At_Drought_cDNA_P Parameter: Timepoint (hr) Value: 6
  misc_feature: MA Experiment 108573 PARAMETER Experiment Name: At_Drought_cDNA_P Parameter: Tissue Value: Aerial
  misc_feature: MA Experiment 108573 PARAMETER Experiment Name: At_Drought_cDNA_P Parameter: Treatment Value: Drought vs. No Drought
  misc_feature: MA Experiment ID: 108579 Result: Up-regulated in Transcription
  misc_feature: MA Experiment 108579 PARAMETER Experiment Name: At_4deg_Cold_cDNA_P Parameter: Temperature (deg C) Value: 4 vs. 22
  misc_feature: MA Experiment 108579 PARAMETER Experiment Name: At_4deg_Cold_cDNA_P Parameter: Timepoint (hr) Value: 6
  misc_feature: MA Experiment 108579 PARAMETER Experiment Name: At_4deg_Cold_cDNA_P Parameter: Tissue Value: Aerial
  misc_feature: MA Experiment ID: 20000088 Result: Up-regulated in Transcription
  misc_feature: MA Experiment 20000088 PARAMETER Experiment Name: At_100uM_ABA_Mutants_cDNA_P Parameter: Plant Line Value: Landsberg
  misc_feature: MA Experiment 20000088 PARAMETER Experiment Name: At_100uM_ABA_Mutants_cDNA_P Parameter: Timepoint (hr) Value: 6
  misc_feature: MA Experiment 20000088 PARAMETER Experiment Name: At_100uM_ABA_Mutants_cDNA_P Parameter: Tissue Value: Aerial
  misc_feature: MA Experiment 20000088 PARAMETER Experiment Name: At_100uM_ABA_Mutants_cDNA_P Parameter: Treatment Value: 100uM ABA vs. No Treatment
  misc_feature: MA Experiment ID: 20000089 Result: Up-regulated in Transcription
  misc_feature: MA Experiment ID: 20000090 Result: Up-regulated in Transcription
  misc_feature: MA Experiment ID: 20000111 Result: Down-regulated in Transcription
  misc_feature: MA Experiment 20000111 PARAMETER Experiment Name: At_42deg_Heat_cDNA_P Parameter: Temperature (deg C) Value: 42 vs. 22
  misc_feature: MA Experiment 20000111 PARAMETER Experiment Name: At_42deg_Heat_cDNA_P Parameter: Timepoint (hr) Value: 6
  misc_feature: MA Experiment 20000111 PARAMETER Experiment Name: At_42deg_Heat_cDNA_P Parameter: Tissue Value: Aerial
  misc_feature: MA Experiment ID: 20000173 Result: Down-regulated in Transcription
  misc_feature: MA Experiment 20000173 PARAMETER Experiment Name: At_42deg_Heat_P Parameter: Age (day) Value: 14
  misc_feature: MA Experiment 20000173 PARAMETER Experiment Name: At_42deg_Heat_P Parameter: Organism Value: A. thaliana
  misc_feature: MA Experiment 20000173 PARAMETER Experiment Name: At_42deg_Heat_P Parameter: Plant Line Value: WS
  misc_feature: MA Experiment 20000173 PARAMETER Experiment Name: At_42deg_Heat_P Parameter: Temperature (deg C) Value: 42 vs. 22
  misc_feature: MA Experiment 20000173 PARAMETER Experiment Name: At_42deg_Heat_P Parameter: Timepoint (hr) Value: 6
  misc_feature: MA Experiment 20000173 PARAMETER Experiment Name: At_42deg_Heat_P Parameter: Tissue Value: Aerial
  misc_feature: MA Experiment ID: 20000213 Result: Up-regulated in Transcription
  misc_feature: MA Experiment 20000213 PARAMETER Experiment Name: At_4deg_Cold_P Parameter: Timepoint (hr) Value: 2
  misc_feature: MA Experiment ID: 20000453 Result: Down-regulated in Transcription
  misc_feature: MA Experiment 20000453 PARAMETER Experiment Name: At_100uM_ABA_P Parameter: Age (day) Value: 15
  misc_feature: MA Experiment 20000453 PARAMETER Experiment Name: At_100uM_ABA_P Parameter: Organism Value: A. thaliana
  misc_feature: MA Experiment 20000453 PARAMETER Experiment Name: At_100uM_ABA_P Parameter: Plant Line Value: WS
  misc_feature: MA Experiment 20000453 PARAMETER Experiment Name: At_100uM_ABA_P Parameter: Timepoint (hr) Value: 24
  misc_feature: MA Experiment 20000453 PARAMETER Experiment Name: At_100uM_ABA_P Parameter: Tissue Value: Aerial
  misc_feature: MA Experiment 20000453 PARAMETER Experiment Name: At_100uM_ABA_P Parameter: Treatment Value: 100uM ABA vs. No Treatment
  misc_feature: MA Experiment ID: 20001247 Result: Down-regulated in Transcription
  misc_feature: MA Experiment 20001247 PARAMETER Experiment Name: At_Far-red-induction_P Parameter: Age (day) Value: 7
  misc_feature: MA Experiment 20001247 PARAMETER Experiment Name: At_Far-red-induction_P Parameter: Light Value: Far-red vs. White
  misc_feature: MA Experiment 20001247 PARAMETER Experiment Name: At_Far-red-induction_P Parameter: Organism Value: A. thaliana
  misc_feature: MA Experiment 20001247 PARAMETER Experiment Name: At_Far-red-induction_P Parameter: Plant Line Value: Columbia
  misc_feature: MA Experiment 20001247 PARAMETER Experiment Name: At_Far-red-induction_P Parameter: Timepoint (hr) Value: 1
  misc_feature: MA Experiment 20001247 PARAMETER Experiment Name: At_Far-red-induction_P Parameter: Tissue Value: Whole Plant
  misc_feature: MA Experiment ID: 20001248 Result: Up-regulated in Transcription
  misc_feature: MA Experiment 20001248 PARAMETER Experiment Name: At_Far-red-induction_P Parameter: Age (day) Value: 7
  misc_feature: MA Experiment 20001248 PARAMETER Experiment Name: At_Far-red-induction_P Parameter: Light Value: Far-red vs. White
  misc_feature: MA Experiment 20001248 PARAMETER Experiment Name: At_Far-red-induction_P Parameter: Organism Value: A. thaliana
  misc_feature: MA Experiment 20001248 PARAMETER Experiment Name: At_Far-red-induction_P Parameter: Plant Line Value: Columbia
  misc_feature: MA Experiment 20001248 PARAMETER Experiment Name: At_Far-red-induction_P Parameter: Timepoint (hr) Value: 4
  misc_feature: MA Experiment 20001248 PARAMETER Experiment Name: At_Far-red-induction_P Parameter: Tissue Value: Whole Plant
  misc_feature: MA Experiment ID: 20001557 Result: Up-regulated in Transcription
  misc_feature: MA Experiment 20001557 PARAMETER Experiment Name: At_Drought_Soil_Dry_P Parameter: Age (day) Value: 27
  misc_feature: MA Experiment 20001557 PARAMETER Experiment Name: At_Drought_Soil_Dry_P Parameter: Organism Value: A. thaliana
  misc_feature: MA Experiment 20001557 PARAMETER Experiment Name: At_Drought_Soil_Dry_P Parameter: Plant Line Value: WS
  misc_feature: MA Experiment 20001557 PARAMETER Experiment Name: At_Drought_Soil_Dry_P Parameter: Post Timepoint (hr) Value: 3
  misc_feature: MA Experiment 20001557 PARAMETER Experiment Name: At_Drought_Soil_Dry_P Parameter: Post-Treatment Value: Re-Water vs. No Drought
  misc_feature: MA Experiment 20001557 PARAMETER Experiment Name: At_Drought_Soil_Dry_P Parameter: Timepoint (day) Value: 13
  misc_feature: MA Experiment 20001557 PARAMETER Experiment Name: At_Drought_Soil_Dry_P Parameter: Treatment Value: Drought vs. No Drought
acataagtctctctcttacattttgaaaccctaatttctcaaaaaaaatgtctgaagttgagtaccggtgctttgtcggcggccttgcctgggccaccaatgatgaagatcttcaaaggacgttctcacagttcggcgacgttatcgattctaagatcattaacgaccgcgagagtggaagatcaaggggattcggattcgtcaccttcaaggacgagaaagccatgagggatgcgattgaagagatgaacggtaaagagctcgatggacgtgtcatcaccgtgaacgaggctcagtcgagaggtagcggcggtggcggcggatactcaggaggaggcggtggtggttacgagagacgtagcggaggttacggatctggtggaggcggtggtggccgaggatacggtggtggtggacgccgtgagggaggtggctacggaggcggtgatggtggaagttacggcggcggtggtggcggctggtaatcaaagatagagttgtttgcgtgctgctgctctgtttttggtttagatttgggatttgtgtcaccacttctggtttggttatcgttcgtttggtttacttttttgatgaaacagtttcgtttaagtcttctttgtctggatcgaaatgttaattcgcgtgttgtttactaaatttataacgtttccttttc

SEQ ID NO: 22120 - protein, 145 aa, Arabidopsis thaliana
  peptide (1)..(145): Ceres Seq. ID no. 12322468
  misc_feature (8)..(79): Pfam Name: RNA recognition motif. (a.k.a. RRM, RBD, or RNP domain) Pfam Description: RNA recognition motif. (a.k.a. RRM, RBD, or RNP
  misc_feature (2)..(145): Homolog of NCBI NO: 20152613 NR Description: putative glycine rich protein [Rumex obtusifolius]
  misc_feature (3)..(145): Homolog of NCBI NO: 21553354 NR Description: glycine-rich RNA binding protein 7 [Arabidopsis
  misc_feature (3)..(145): Homolog of NCBI NO: 15226605 NR Description: glycine-rich RNA binding protein AtGRP7
  misc_feature (1)..(144): Homolog of NCBI NO: 544426 NR Description: Glycine-rich RNA-binding protein
  misc_feature (1)..(145): Homolog of NCBI NO: 2119042 NR Description: glycine-rich RNA-binding protein RGP-1a - wood
  misc_feature (1)..(145): Homolog of NCBI NO: 30692254 NR Description: glycine-rich RNA-binding protein 8 (GRP8) (CCR1)
  misc_feature (3)..(145): Homolog of NCBI NO: 1346181 NR Description: Glycine-rich RNA-binding protein GRP2A
  misc_feature (3)..(145): Homolog of NCBI NO: 30681492 NR Description: glycine-rich RNA-binding protein (AtGRP7)
  misc_feature (1)..(145): Homolog of NCBI NO: 544416 NR Description: Glycine-rich RNA-binding protein 10
  misc_feature (1)..(145): Homolog of NCBI NO: 15235002 NR Description: glycine-rich RNA-binding protein 8 (GRP8)
MSEVEYRCFVGGLAWATNDEDLQRTFSQFGDVIDSKIINDRESGRSRGFGFVTFKDEKAMRDAIEEMNGKELDGRVITVNEAQSRGSGGGGGYSGGGGGGYERRSGGYGSGGGGGGRGYGGGGRREGGGYGGGDGGSYGGGGGGW

SEQ ID NO: 22121 - protein, 86 aa, Arabidopsis thaliana
  peptide (1)..(86): Ceres Seq. ID no. 12322469
  misc_feature (25)..(85): Pfam Name: Herpesvirus large structural phosphoprotein UL32 Pfam Description: Herpesvirus large structural phosphoprotein UL32
  misc_feature (1)..(86): Homolog of NCBI NO: 20152613 NR Description: putative glycine rich protein [Rumex obtusifolius]
  misc_feature (1)..(86): Homolog of NCBI NO: 21553354 NR Description: glycine-rich RNA binding protein 7 [Arabidopsis
  misc_feature (1)..(86): Homolog of NCBI NO: 15226605 NR Description: glycine-rich RNA binding protein AtGRP7
  misc_feature (1)..(85): Homolog of NCBI NO: 544426 NR Description: Glycine-rich RNA-binding protein
  misc_feature (1)..(86): Homolog of NCBI NO: 2119042 NR Description: glycine-rich RNA-binding protein RGP-1a - wood
  misc_feature (1)..(86): Homolog of NCBI NO: 30692254 NR Description: glycine-rich RNA-binding protein 8 (GRP8) (CCR1)
  misc_feature (1)..(86): Homolog of NCBI NO: 1346181 NR Description: Glycine-rich RNA-binding protein GRP2A
  misc_feature (1)..(86): Homolog of NCBI NO: 30681492 NR Description: glycine-rich RNA-binding protein (AtGRP7)
  misc_feature (1)..(86): Homolog of NCBI NO: 544416 NR Description: Glycine-rich RNA-binding protein 10
  misc_feature (1)..(86): Homolog of NCBI NO: 15235002 NR Description: glycine-rich RNA-binding protein 8 (GRP8)
MRDAIEEMNGKELDGRVITVNEAQSRGSGGGGGYSGGGGGGYERRSGGYGSGGGGGGRGYGGGGRREGGGYGGGDGGSYGGGGGGW

SEQ ID NO: 22122 - protein, 79 aa, Arabidopsis thaliana
  peptide (1)..(79): Ceres Seq. ID no. 12322470
  misc_feature (18)..(78): Pfam Name: Herpesvirus large structural phosphoprotein UL32 Pfam Description: Herpesvirus large structural phosphoprotein UL32
  misc_feature (1)..(79): Homolog of NCBI NO: 20152613 NR Description: putative glycine rich protein [Rumex obtusifolius]
  misc_feature (1)..(79): Homolog of NCBI NO: 21553354 NR Description: glycine-rich RNA binding protein 7 [Arabidopsis
  misc_feature (1)..(79): Homolog of NCBI NO: 15226605 NR Description: glycine-rich RNA binding protein AtGRP7
  misc_feature (1)..(78): Homolog of NCBI NO: 544426 NR Description: Glycine-rich RNA-binding protein
  misc_feature (1)..(79): Homolog of NCBI NO: 2119042 NR Description: glycine-rich RNA-binding protein RGP-1a - wood
  misc_feature (1)..(79): Homolog of NCBI NO: 30692254 NR Description: glycine-rich RNA-binding protein 8 (GRP8) (CCR1)
  misc_feature (1)..(79): Homolog of NCBI NO: 1346181 NR Description: Glycine-rich RNA-binding protein GRP2A
  misc_feature (1)..(79): Homolog of NCBI NO: 30681492 NR Description: glycine-rich RNA-binding protein (AtGRP7)
  misc_feature (1)..(79): Homolog of NCBI NO: 544416 NR Description: Glycine-rich RNA-binding protein 10
  misc_feature (1)..(79): Homolog of NCBI NO: 15235002 NR Description: glycine-rich RNA-binding protein 8 (GRP8)
MNGKELDGRVITVNEAQSRGSGGGGGYSGGGGGGYERRSGGYGSGGGGGGRGYGGGGRREGGGYGGGDGGSYGGGGGGW

SEQ ID NO: 22123 - DNA, 1199 bp, Arabidopsis thaliana
  misc_feature (1)..(1199): Ceres Seq. ID no. 12324485
  misc_feature: MA Experiment ID: 108434 Result: Up-regulated in Transcription
  misc_feature: MA Experiment 108434 PARAMETER Experiment Name: At_Root_Tips_cDNA_P Parameter: Tissue Value: Root Tips
  misc_feature: MA Experiment ID: 108463 Result: Down-regulated in Transcription
  misc_feature: MA Experiment 108463 PARAMETER Experiment Name: At_Germinating_Seeds_cDNA_P Parameter: Age (day) Value: 3 vs. 0
  misc_feature: MA Experiment 108463 PARAMETER Experiment Name: At_Germinating_Seeds_cDNA_P Parameter: Tissue Value: Germinating Seeds
  misc_feature: MA Experiment ID: 108488 Result: Up-regulated in Transcription
  misc_feature: MA Experiment ID: 20000071 Result: Down-regulated in Transcription
  misc_feature: MA Experiment 20000071 PARAMETER Experiment Name: At_100uM_ABA_Mutants_cDNA_P Parameter: Plant Line Value: CS8104
  misc_feature: MA Experiment 20000071 PARAMETER Experiment Name: At_100uM_ABA_Mutants_cDNA_P Parameter: Timepoint (hr) Value: 6
  misc_feature: MA Experiment 20000071 PARAMETER Experiment Name: At_100uM_ABA_Mutants_cDNA_P Parameter: Tissue Value: Aerial
  misc_feature: MA Experiment 20000071 PARAMETER Experiment Name: At_100uM_ABA_Mutants_cDNA_P Parameter: Treatment Value: 100uM ABA vs. No Treatment
  misc_feature: MA Experiment ID: 20000185 Result: Down-regulated in Transcription
  misc_feature: MA Experiment 20000185 PARAMETER Experiment Name: At_Roots__P Parameter: Age (day) Value: 7 vs. 21
  misc_feature: MA Experiment 20000185 PARAMETER Experiment Name: At_Roots__P Parameter: Organism Value: A. thaliana
  misc_feature: MA Experiment 20000185 PARAMETER Experiment Name: At_Roots__P Parameter: Tissue Value: Roots vs. Whole Plant
  misc_feature: MA Experiment ID: 20000224 Result: Up-regulated in Transcription
  misc_feature: MA Experiment ID: 20000437 Result: Down-regulated in Transcription
  misc_feature: MA Experiment 20000437 PARAMETER Experiment Name: At_Drought_P Parameter: Age (day) Value: 8
  misc_feature: MA Experiment 20000437 PARAMETER Experiment Name: At_Drought_P Parameter: Organism Value: A. thaliana
  misc_feature: MA Experiment 20000437 PARAMETER Experiment Name: At_Drought_P Parameter: Plant Line Value: WS
  misc_feature: MA Experiment 20000437 PARAMETER Experiment Name: At_Drought_P Parameter: Timepoint (hr) Value: 24
  misc_feature: MA Experiment 20000437 PARAMETER Experiment Name: At_Drought_P Parameter: Tissue Value: Whole Plant
  misc_feature: MA Experiment 20000437 PARAMETER Experiment Name: At_Drought_P Parameter: Treatment Value: Drought vs. No Drought
  misc_feature: MA Experiment ID: 20000439 Result: Down-regulated in Transcription
  misc_feature: MA Experiment 20000439 PARAMETER Experiment Name: At_Roots__P Parameter: Age (day) Value: 14 vs. 21
  misc_feature: MA Experiment 20000439 PARAMETER Experiment Name: At_Roots__P Parameter: Organism Value: A. thaliana
  misc_feature: MA Experiment 20000439 PARAMETER Experiment Name: At_Roots__P Parameter: Tissue Value: Roots vs. Whole Plant
  misc_feature: MA Experiment ID: 20001757 Result: Up-regulated in Transcription
  misc_feature: MA Experiment 20001757 PARAMETER Experiment Name: At_50mM_NH4NO3_L-to-H_P Parameter: Timepoint (hr) Value: 6
  misc_feature: MA Experiment 20001757 PARAMETER Experiment Name: At_50mM_NH4NO3_L-to-H_P Parameter: Tissue Value: Leaf
  misc_feature: MA Experiment 20001757 PARAMETER Experiment Name: At_50mM_NH4NO3_L-to-H_P Parameter: Treatment Value: 50mM NH4NO3 vs 100mM Mannitol
  misc_feature: MA Experiment ID: 20001905 Result: Down-regulated in Transcription
  misc_feature: MA Experiment 20001905 PARAMETER Experiment Name: At_Drought_Reproduction_P Parameter: Age (day) Value: 40
  misc_feature: MA Experiment 20001905 PARAMETER Experiment Name: At_Drought_Reproduction_P Parameter: Organism Value: A. thaliana
  misc_feature: MA Experiment 20001905 PARAMETER Experiment Name: At_Drought_Reproduction_P Parameter: Plant Line Value: WS
  misc_feature: MA Experiment 20001905 PARAMETER Experiment Name: At_Drought_Reproduction_P Parameter: Timepoint (day) Value: 10
  misc_feature: MA Experiment 20001905 PARAMETER Experiment Name: At_Drought_Reproduction_P Parameter: Tissue Value: Rosettes
  misc_feature: MA Experiment 20001905 PARAMETER Experiment Name: At_Drought_Reproduction_P Parameter: Treatment Value: Drought vs. No Drought
agttcagtcctacatccatggctgctcacagaagctaaagagaactaaaaagctcataagactattacttagaagagaatcgatcagatatgattttagcgcatcttccaagattccatctctcaatcctcgcgaaaccttctttctctctctcttcttcgcatttcagtttcttaaaccctaagccttcggtaacagtatctcgaacccttttctcattcgcgtctaaatcgaatctcgccactgttgaacccataccattatcggtctcagattcaaccgatttggatgatgcacctgtcgagattgcgctcgacaagctttttattccgccggagaccgatatatccggtgaagactcggcgagtttaacgacgaggatacttaagggttcgaatattgtgctgagcaagtacgcgagggacgcacaggtggttcaggctgattatgtgaagagtagtgtcaagacggaggattgtccggccgatgggttgccggagtttgcgcttgttgggagatccaatgttgggaaatcatcgcttctcaattcgttggtgaggaggaaacgccttgccttgacttctaagaaacctggaaagacgcaatgcattaatcatttccggatcaacgacaagtggtacttggtagatttgcctggttacgggtatgcatcagcaccgcatgaactcaaacaagactggaacaaattcaccaaagactattttctaaatcgatcaacattggtctcggtgtttttactagttgatgccagcattcctgtaaagccaatcgatctcgagtatgcaagctggcttggtcaaaaccaggttccaatgactttgatattcacaaaatgcgacaagagaaagaagaagaaaaatggagggaagaaaccggaggcgaacataaaggagttccaagacttgatccaagggttctttgagacaacaccgccatggattatgaccagcagtgtgacgaatcaaggtcgggacgagatattgttgcatatggctcagctaagaaactactggctcaaacactgagaaccaaaacaacacttctccatattatctttttataaggagacttatataacagttagtgtaaaacgacaaaactaacagttagtgtaccaattatttgggcactgtctttgattaatgcaacgctgagattttgtttaatgtatttgtgtt

SEQ ID NO: 22124 - protein, 318 aa, Arabidopsis thaliana
  peptide (1)..(318): Ceres Seq. ID no. 12324486
  misc_feature (116)..(311): Homolog of NCBI NO: 23137475 NR Description: hypothetical protein [Cytophaga hutchinsonii]
  misc_feature (114)..(305): Homolog of NCBI NO: 29346493 NR Description: putative GTP-binding protein
  misc_feature (115)..(305): Homolog of NCBI NO: 31194343 NR Description: ENSANGP00000000181 [Anopheles gambiae]
  misc_feature (98)..(192): Homolog of NCBI NO: 20330773 NR Description: Putative nucleotide binding protein
  misc_feature (193)..(315): Homolog of NCBI NO: 20330773 NR Description: Putative nucleotide binding protein
  misc_feature (98)..(315): Homolog of NCBI NO: 25306612 NR Description: probable nucleotide-binding protein
  misc_feature (29)..(315): Homolog of NCBI NO: 18400109 NR Description: putative nucleotide-binding protein
  misc_feature (1)..(318): Homolog of NCBI NO: 34910170 NR Description: putative GTP-binding protein
  misc_feature (1)..(318): Homolog of NCBI NO: 21592799 NR Description: putative GTP-binding protein [Arabidopsis
  misc_feature (1)..(318): Homolog of NCBI NO: 15239069 NR Description: putative GTP-binding protein
MILAHLPRFHLSILAKPSFSLSSSHFSFLNPKPSVTVSRTLFSFASKSNLATVEPIPLSVSDSTDLDDAPVEIALDKLFIPPETDISGEDSASLTTRILKGSNIVLSKYARDAQVVQADYVKSSVKTEDCPADGLPEFALVGRSNVGKSSLLNSLVRRKRLALTSKKPGKTQCINHFRINDKWYLVDLPGYGYASAPHELKQDWNKFTKDYFLNRSTLVSVFLLVDASIPVKPIDLEYASWLGQNQVPMTLIFTKCDKRKKKKNGGKKPEANIKEFQDLIQGFFETTPPWIMTSSVTNQGRDEILLHMAQLRNYWLKH

SEQ ID NO: 22125 - DNA, 1242 bp, Arabidopsis thaliana
  misc_feature (1)..(1242): Ceres Seq. ID no. 12325228
  misc_feature: MA Experiment ID: 108434 Result: Down-regulated in Transcription
  misc_feature: MA Experiment 108434 PARAMETER Experiment Name: At_Root_Tips_cDNA_P Parameter: Tissue Value: Root Tips
  misc_feature: MA Experiment ID: 108461 Result: Up-regulated in Transcription
  misc_feature: MA Experiment 108461 PARAMETER Experiment Name: At_Germinating_Seeds_cDNA_P Parameter: Age (day) Value: 1 vs. 0
  misc_feature: MA Experiment 108461 PARAMETER Experiment Name: At_Germinating_Seeds_cDNA_P Parameter: Tissue Value: Germinating Seeds
  misc_feature: MA Experiment ID: 108462 Result: Up-regulated in Transcription
  misc_feature: MA Experiment 108462 PARAMETER Experiment Name: At_Germinating_Seeds_cDNA_P Parameter: Age (day) Value: 2 vs. 0
  misc_feature: MA Experiment 108462 PARAMETER Experiment Name: At_Germinating_Seeds_cDNA_P Parameter: Tissue Value: Germinating Seeds
  misc_feature: MA Experiment ID: 108463 Result: Up-regulated in Transcription
  misc_feature: MA Experiment 108463 PARAMETER Experiment Name: At_Germinating_Seeds_cDNA_P Parameter: Age (day) Value: 3 vs. 0
  misc_feature: MA Experiment 108463 PARAMETER Experiment Name: At_Germinating_Seeds_cDNA_P Parameter: Tissue Value: Germinating Seeds
  misc_feature: MA Experiment ID: 108464 Result: Up-regulated in Transcription
  misc_feature: MA Experiment 108464 PARAMETER Experiment Name: At_Germinating_Seeds_cDNA_P Parameter: Age (day) Value: 4 vs. 0
  misc_feature: MA Experiment 108464 PARAMETER Experiment Name: At_Germinating_Seeds_cDNA_P Parameter: Tissue Value: Germinating Seeds
  misc_feature: MA Experiment ID: 108469 Result: Down-regulated in Transcription
  misc_feature: MA Experiment ID: 108501 Result: Up-regulated in Transcription
  misc_feature: MA Experiment 108501 PARAMETER Experiment Name: At_ap2_floral_buds_cDNA_P Parameter: Plant Line Value: ap2 (Ler.)
  misc_feature: MA Experiment 108501 PARAMETER Experiment Name: At_ap2_floral_buds_cDNA_P Parameter: Tissue Value: Closed Flower
  misc_feature: MA Experiment ID: 108569 Result: Up-regulated in Transcription
  misc_feature: MA Experiment 108569 PARAMETER Experiment Name: At_0.001%_MeJA__cDNA_P Parameter: Timepoint (hr) Value: 6
  misc_feature: MA Experiment 108569 PARAMETER Experiment Name: At_0.001%_MeJA__cDNA_P Parameter: Tissue Value: Aerial
  misc_feature: MA Experiment 108569 PARAMETER Experiment Name: At_0.001%_MeJA__cDNA_P Parameter: Treatment Value: 0.001% MeJA vs. No Treatment
  misc_feature: MA Experiment ID: 108573 Result: Down-regulated in Transcription
  misc_feature: MA Experiment 108573 PARAMETER Experiment Name: At_Drought_cDNA_P Parameter: Timepoint (hr) Value: 6
  misc_feature: MA Experiment 108573 PARAMETER Experiment Name: At_Drought_cDNA_P Parameter: Tissue Value: Aerial
  misc_feature: MA Experiment 108573 PARAMETER Experiment Name: At_Drought_cDNA_P Parameter: Treatment Value: Drought vs. No Drought
  misc_feature: MA Experiment ID: 108574 Result: Up-regulated in Transcription
  misc_feature: MA Experiment 108574 PARAMETER Experiment Name: At_Wounding__cDNA_P Parameter: Timepoint (hr) Value: 1
  misc_feature: MA Experiment 108574 PARAMETER Experiment Name: At_Wounding__cDNA_P Parameter: Tissue Value: Aerial
  misc_feature: MA Experiment 108574 PARAMETER Experiment Name: At_Wounding__cDNA_P Parameter: Treatment Value: Wounding vs. No Wounding
  misc_feature: MA Experiment ID: 108577 Result: Down-regulated in Transcription
  misc_feature: MA Experiment 108577 PARAMETER Experiment Name: At_42deg_Heat_cDNA_P Parameter: Temperature (deg C) Value: 42 vs. 22
  misc_feature: MA Experiment 108577 PARAMETER Experiment Name: At_42deg_Heat_cDNA_P Parameter: Timepoint (hr) Value: 6
  misc_feature: MA Experiment 108577 PARAMETER Experiment Name: At_42deg_Heat_cDNA_P Parameter: Tissue Value: Aerial
  misc_feature: MA Experiment ID: 108579 Result: Up-regulated in Transcription
  misc_feature: MA Experiment 108579 PARAMETER Experiment Name: At_4deg_Cold_cDNA_P Parameter: Temperature (deg C) Value: 4 vs. 22
  misc_feature: MA Experiment 108579 PARAMETER Experiment Name: At_4deg_Cold_cDNA_P Parameter: Timepoint (hr) Value: 6
  misc_feature: MA Experiment 108579 PARAMETER Experiment Name: At_4deg_Cold_cDNA_P Parameter: Tissue Value: Aerial
  misc_feature: MA Experiment ID: 108594 Result: Down-regulated in Transcription
  misc_feature: MA Experiment 108594 PARAMETER Experiment Name: At_Ler-rhl_Root_cDNA_P Parameter: Plant Line Value: null
  misc_feature: MA Experiment ID: 108605 Result: Up-regulated in Transcription
  misc_feature: MA Experiment 108605 PARAMETER Experiment Name: At_100uM_ABA_cDNA_P Parameter: Timepoint (hr) Value: 6
  misc_feature: MA Experiment 108605 PARAMETER Experiment Name: At_100uM_ABA_cDNA_P Parameter: Tissue Value: Aerial
  misc_feature: MA Experiment 108605 PARAMETER Experiment Name: At_100uM_ABA_cDNA_P Parameter: Treatment Value: 100uM ABA vs. No Treatment
  misc_feature: MA Experiment ID: 108607 Result: Up-regulated in Transcription
  misc_feature: MA Experiment 108607 PARAMETER Experiment Name: At_100uM_ABA_cDNA_P Parameter: Timepoint (hr) Value: 4
  misc_feature: MA Experiment 108607 PARAMETER Experiment Name: At_100uM_ABA_cDNA_P Parameter: Tissue Value: Aerial
  misc_feature: MA Experiment 108607 PARAMETER Experiment Name: At_100uM_ABA_cDNA_P Parameter: Treatment Value: 100uM ABA vs. No Treatment
  misc_feature: MA Experiment ID: 20000069 Result: Up-regulated in Transcription
  misc_feature: MA Experiment 20000069 PARAMETER Experiment Name: At_100uM_ABA_Mutants_cDNA_P Parameter: Plant Line Value: CS23
  misc_feature: MA Experiment 20000069 PARAMETER Experiment Name: At_100uM_ABA_Mutants_cDNA_P Parameter: Timepoint (hr) Value: 6
  misc_feature: MA Experiment 20000069 PARAMETER Experiment Name: At_100uM_ABA_Mutants_cDNA_P Parameter: Tissue Value: Aerial
  misc_feature: MA Experiment 20000069 PARAMETER Experiment Name: At_100uM_ABA_Mutants_cDNA_P Parameter: Treatment Value: 100uM ABA vs. No Treatment
  misc_feature: MA Experiment ID: 20000071 Result: Up-regulated in Transcription
  misc_feature: MA Experiment 20000071 PARAMETER Experiment Name: At_100uM_ABA_Mutants_cDNA_P Parameter: Plant Line Value: CS8104
  misc_feature: MA Experiment 20000071 PARAMETER Experiment Name: At_100uM_ABA_Mutants_cDNA_P Parameter: Timepoint (hr) Value: 6
  misc_feature: MA Experiment 20000071 PARAMETER Experiment Name: At_100uM_ABA_Mutants_cDNA_P Parameter: Tissue Value: Aerial
  misc_feature: MA Experiment 20000071 PARAMETER Experiment Name: At_100uM_ABA_Mutants_cDNA_P Parameter: Treatment Value: 100uM ABA vs. No Treatment
  misc_feature: MA Experiment ID: 20000086 Result: Up-regulated in Transcription
  misc_feature: MA Experiment 20000086 PARAMETER Experiment Name: At_100uM_ABA_Mutants_cDNA_P Parameter: Plant Line Value: CS22
  misc_feature: MA Experiment 20000086 PARAMETER Experiment Name: At_100uM_ABA_Mutants_cDNA_P Parameter: Timepoint (hr) Value: 6
  misc_feature: MA Experiment 20000086 PARAMETER Experiment Name: At_100uM_ABA_Mutants_cDNA_P Parameter: Tissue Value: Aerial
  misc_feature: MA Experiment 20000086 PARAMETER Experiment Name: At_100uM_ABA_Mutants_cDNA_P Parameter: Treatment Value: 100uM ABA vs. No Treatment
  misc_feature: MA Experiment ID: 20000087 Result: Up-regulated in Transcription
  misc_feature: MA Experiment 20000087 PARAMETER Experiment Name: At_100uM_ABA_Mutants_cDNA_P Parameter: Plant Line Value: WS
  misc_feature: MA Experiment 20000087 PARAMETER Experiment Name: At_100uM_ABA_Mutants_cDNA_P Parameter: Timepoint (hr) Value: 6
  misc_feature: MA Experiment 20000087 PARAMETER Experiment Name: At_100uM_ABA_Mutants_cDNA_P Parameter: Tissue Value: Aerial
  misc_feature: MA Experiment 20000087 PARAMETER Experiment Name: At_100uM_ABA_Mutants_cDNA_P Parameter: Treatment Value: 100uM ABA vs. No Treatment
  misc_feature: MA Experiment ID: 20000117 Result: Up-regulated in Transcription
  misc_feature: MA Experiment 20000117 PARAMETER Experiment Name: At_100uM_ABA_Mutants_cDNA_P Parameter: Plant Line Value: Columbia
  misc_feature: MA Experiment 20000117 PARAMETER Experiment Name: At_100uM_ABA_Mutants_cDNA_P Parameter: Timepoint (hr) Value: 6
  misc_feature: MA Experiment 20000117 PARAMETER Experiment Name: At_100uM_ABA_Mutants_cDNA_P Parameter: Tissue Value: Aerial
  misc_feature: MA Experiment 20000117 PARAMETER Experiment Name: At_100uM_ABA_Mutants_cDNA_P Parameter: Treatment Value: 100uM ABA vs. No Treatment
  misc_feature: MA Experiment ID: 20000166 Result: Up-regulated in Transcription
  misc_feature: MA Experiment 20000166 PARAMETER Experiment Name: At_100uM_ABA_P Parameter: Age (day) Value: 14
  misc_feature: MA Experiment 20000166 PARAMETER Experiment Name: At_100uM_ABA_P Parameter: Organism Value: A. thaliana
  misc_feature: MA Experiment 20000166 PARAMETER Experiment Name: At_100uM_ABA_P Parameter: Plant Line Value: WS
  misc_feature: MA Experiment 20000166 PARAMETER Experiment Name: At_100uM_ABA_P Parameter: Timepoint (hr) Value: 1
  misc_feature: MA Experiment 20000166 PARAMETER Experiment Name: At_100uM_ABA_P Parameter: Tissue Value: Aerial
  misc_feature: MA Experiment 20000166 PARAMETER Experiment Name: At_100uM_ABA_P Parameter: Treatment Value: 100uM ABA vs. No Treatment
  misc_feature: MA Experiment ID: 20000173 Result: Down-regulated in Transcription
  misc_feature: MA Experiment 20000173 PARAMETER Experiment Name: At_42deg_Heat_P Parameter: Age (day) Value: 14
  misc_feature: MA Experiment 20000173 PARAMETER Experiment Name: At_42deg_Heat_P Parameter: Organism Value: A. thaliana
  misc_feature: MA Experiment 20000173 PARAMETER Experiment Name: At_42deg_Heat_P Parameter: Plant Line Value: WS
  misc_feature: MA Experiment 20000173 PARAMETER Experiment Name: At_42deg_Heat_P Parameter: Temperature (deg C) Value: 42 vs. 22
  misc_feature: MA Experiment 20000173 PARAMETER Experiment Name: At_42deg_Heat_P Parameter: Timepoint (hr) Value: 6
  misc_feature: MA Experiment 20000173 PARAMETER Experiment Name: At_42deg_Heat_P Parameter: Tissue Value: Aerial
  misc_feature: MA Experiment ID: 20000185 Result: Up-regulated in Transcription
  misc_feature: MA Experiment 20000185 PARAMETER Experiment Name: At_Roots__P Parameter: Age (day) Value: 7 vs. 21
  misc_feature: MA Experiment 20000185 PARAMETER Experiment Name: At_Roots__P Parameter: Organism Value: A. thaliana
  misc_feature: MA Experiment 20000185 PARAMETER Experiment Name: At_Roots__P Parameter: Tissue Value: Roots vs. Whole Plant
  misc_feature: MA Experiment ID: 20000211 Result: Up-regulated in Transcription
  misc_feature: MA Experiment 20000211 PARAMETER Experiment Name: At_0.001percent_MeJA__P Parameter: Age (day) Value: 14
  misc_feature: MA Experiment 20000211 PARAMETER Experiment Name: At_0.001percent_MeJA__P Parameter: Organism Value: A. thaliana
  misc_feature: MA Experiment 20000211 PARAMETER Experiment Name: At_0.001percent_MeJA__P Parameter: Plant Line Value: WS
  misc_feature: MA Experiment 20000211 PARAMETER Experiment Name: At_0.001percent_MeJA__P Parameter: Timepoint (hr) Value: 1
  misc_feature: MA Experiment 20000211 PARAMETER Experiment Name: At_0.001percent_MeJA__P Parameter: Tissue Value: Aerial
  misc_feature: MA Experiment 20000211 PARAMETER Experiment Name: At_0.001percent_MeJA__P Parameter: Treatment Value: 0.001percent MeJA vs. No Treatment
  misc_feature: MA Experiment ID: 20000224 Result: Up-regulated in Transcription
  misc_feature: MA Experiment ID: 20000227 Result: Up-regulated in Transcription
  misc_feature: MA Experiment 20000227 PARAMETER Experiment Name: At_Root-Tips-vs-Tops_P Parameter: Tissue Value: Root Tips vs. Root Tops
  misc_feature: MA Experiment ID: 20000265 Result: Up-regulated in Transcription
  misc_feature: MA Experiment 20000265 PARAMETER Experiment Name: At_Open_Flower_P Parameter: Age (day) Value: 21
  misc_feature: MA Experiment 20000265 PARAMETER Experiment Name: At_Open_Flower_P Parameter: Plant Line Value: WS
  misc_feature: MA Experiment 20000265 PARAMETER Experiment Name: At_Open_Flower_P Parameter: Tissue Value: Closed Flower vs. Whole Plant
  misc_feature: MA Experiment ID: 20000286 Result: Up-regulated in Transcription
  misc_feature: MA Experiment 20000286 PARAMETER Experiment Name: At_Open_Flower_P Parameter: Age (day) Value: 21
  misc_feature: MA Experiment 20000286 PARAMETER Experiment Name: At_Open_Flower_P Parameter: Plant Line Value: WS
  misc_feature: MA Experiment 20000286 PARAMETER Experiment Name: At_Open_Flower_P Parameter: Tissue Value: Half Open vs. Whole Plant
  misc_feature: MA Experiment ID: 20000438 Result: Up-regulated in Transcription
  misc_feature: MA Experiment 20000438 PARAMETER Experiment Name: At_Shoots__P Parameter: Age (day) Value: 14
  misc_feature: MA Experiment 20000438 PARAMETER Experiment Name: At_Shoots__P Parameter: Tissue Value: Shoots vs. Whole Plant
  misc_feature: MA Experiment ID: 20000439 Result: Up-regulated in Transcription
  misc_feature: MA Experiment 20000439 PARAMETER Experiment Name: At_Roots__P Parameter: Age (day) Value: 14 vs. 21
  misc_feature: MA Experiment 20000439 PARAMETER Experiment Name: At_Roots__P Parameter: Organism Value: A. thaliana
  misc_feature: MA Experiment 20000439 PARAMETER Experiment Name: At_Roots__P Parameter: Tissue Value: Roots vs. Whole Plant
  misc_feature: MA Experiment ID: 20000495 Result: Down-regulated in Transcription
  misc_feature: MA Experiment 20000495 PARAMETER Experiment Name: At_Guard_Cells_P Parameter: Harvest Date Value: 8/2/2002
  misc_feature: MA Experiment 20000495 PARAMETER Experiment Name: At_Guard_Cells_P Parameter: Organism Value: A. thaliana
  misc_feature: MA Experiment 20000495 PARAMETER Experiment Name: At_Guard_Cells_P Parameter: Tissue Value: Guard Cells vs. Leaves
  misc_feature: MA Experiment ID: 20000527 Result: Down-regulated in Transcription
  misc_feature: MA Experiment 20000527 PARAMETER Experiment Name: At_10percent_PEG_P Parameter: Age (day) Value: 20
  misc_feature: MA Experiment 20000527 PARAMETER Experiment Name: At_10percent_PEG_P Parameter: Organism Value: A. thaliana
  misc_feature: MA Experiment 20000527 PARAMETER Experiment Name: At_10percent_PEG_P Parameter: Plant Line Value: WS
  misc_feature: MA Experiment 20000527 PARAMETER Experiment Name: At_10percent_PEG_P Parameter: Timepoint (day) Value: 20
  misc_feature: MA Experiment 20000527 PARAMETER Experiment Name: At_10percent_PEG_P Parameter: Tissue Value: Whole Plant
  misc_feature: MA Experiment 20000527 PARAMETER Experiment Name: At_10percent_PEG_P Parameter: Treatment Value: 10percent PEG vs. No Treatment
  misc_feature: MA Experiment ID: 20000573 Result: Down-regulated in Transcription
  misc_feature: MA Experiment 20000573 PARAMETER Experiment Name: At_100uM_ABA_Mutants__P Parameter: Organism Value: A. thaliana
  misc_feature: MA Experiment 20000573 PARAMETER Experiment Name: At_100uM_ABA_Mutants__P Parameter: Plant Line Value: CS22 vs. Ler wt
  misc_feature: MA Experiment 20000573 PARAMETER Experiment Name: At_100uM_ABA_Mutants__P Parameter: Timepoint (hr) Value: N/A
  misc_feature: MA Experiment 20000573 PARAMETER Experiment Name: At_100uM_ABA_Mutants__P Parameter: Tissue Value: Whole Plant
  misc_feature: MA Experiment 20000573 PARAMETER Experiment Name: At_100uM_ABA_Mutants__P Parameter: Treatment Value: None
  misc_feature: MA Experiment ID: 20000794 Result: Down-regulated in Transcription
  misc_feature: MA Experiment 20000794 PARAMETER Experiment Name: At_Petals_P Parameter: Age (day) Value: 23-25 days
  misc_feature: MA Experiment 20000794 PARAMETER Experiment Name: At_Petals_P Parameter: Plant Line Value: WS
  misc_feature: MA Experiment 20000794 PARAMETER Experiment Name: At_Petals_P Parameter: Tissue Value: Petals vs. Whole plant
  misc_feature: MA Experiment ID: 20001248 Result: Down-regulated in Transcription
  misc_feature: MA Experiment 20001248 PARAMETER Experiment Name: At_Far-red-induction_P Parameter: Age (day) Value: 7
  misc_feature: MA Experiment 20001248 PARAMETER Experiment Name: At_Far-red-induction_P Parameter: Light Value: Far-red vs. White
  misc_feature: MA Experiment 20001248 PARAMETER Experiment Name: At_Far-red-induction_P Parameter: Organism Value: A. thaliana
  misc_feature: MA Experiment 20001248 PARAMETER Experiment Name: At_Far-red-induction_P Parameter: Plant Line Value: Columbia
  misc_feature: MA Experiment 20001248 PARAMETER Experiment Name: At_Far-red-induction_P Parameter: Timepoint (hr) Value: 4
  misc_feature: MA Experiment 20001248 PARAMETER Experiment Name: At_Far-red-induction_P Parameter: Tissue Value: Whole Plant
  misc_feature: MA Experiment ID: 20001450 Result: Down-regulated in Transcription
  misc_feature: MA Experiment 20001450 PARAMETER Experiment Name: At_Far-red-induction_P Parameter: Age (day) Value: 7
  misc_feature: MA Experiment 20001450 PARAMETER Experiment Name: At_Far-red-induction_P Parameter: Light Value: Far-red vs. White
  misc_feature: MA Experiment 20001450 PARAMETER Experiment Name: At_Far-red-induction_P Parameter: Organism Value: A. thaliana
  misc_feature: MA Experiment 20001450 PARAMETER Experiment Name: At_Far-red-induction_P Parameter: Plant Line Value: Columbia
  misc_feature: MA Experiment 20001450 PARAMETER Experiment Name: At_Far-red-induction_P Parameter: Timepoint (hr) Value: 8
  misc_feature: MA Experiment 20001450 PARAMETER Experiment Name: At_Far-red-induction_P Parameter: Tissue Value: Whole Plant
  misc_feature: MA Experiment ID: 20001451 Result: Down-regulated in Transcription
  misc_feature: MA Experiment 20001451 PARAMETER Experiment Name: At_Far-red-induction_P Parameter: Age (day) Value: 7
  misc_feature: MA Experiment 20001451 PARAMETER Experiment Name: At_Far-red-induction_P Parameter: Light Value: Far-red vs. White
  misc_feature: MA Experiment 20001451 PARAMETER Experiment Name: At_Far-red-induction_P Parameter: Organism Value: A. thaliana
  misc_feature: MA Experiment 20001451 PARAMETER Experiment Name: At_Far-red-induction_P Parameter: Plant Line Value: Columbia
  misc_feature: MA Experiment 20001451 PARAMETER Experiment Name: At_Far-red-induction_P Parameter: Timepoint (hr) Value: 24
  misc_feature: MA Experiment 20001451 PARAMETER Experiment Name: At_Far-red-induction_P Parameter: Tissue Value: Whole Plant
  misc_feature: MA Experiment ID: 20001560 Result: Up-regulated in Transcription
  misc_feature: MA Experiment 20001560 PARAMETER Experiment Name: At_Drought_Soil_Dry_P Parameter: Age (day) Value: 28
  misc_feature: MA Experiment 20001560 PARAMETER Experiment Name: At_Drought_Soil_Dry_P Parameter: Organism Value: A. thaliana
  misc_feature: MA Experiment 20001560 PARAMETER Experiment Name: At_Drought_Soil_Dry_P Parameter: Plant Line Value: WS
  misc_feature: MA Experiment 20001560 PARAMETER Experiment Name: At_Drought_Soil_Dry_P Parameter: Post Timepoint (hr) Value: None
  misc_feature: MA Experiment 20001560 PARAMETER Experiment Name: At_Drought_Soil_Dry_P Parameter: Post-Treatment Value: None
  misc_feature: MA Experiment 20001560 PARAMETER Experiment Name: At_Drought_Soil_Dry_P Parameter: Timepoint (day) Value: 14
  misc_feature: MA Experiment 20001560 PARAMETER Experiment Name: At_Drought_Soil_Dry_P Parameter: Treatment Value: Drought vs. No Drought
  misc_feature: MA Experiment ID: 20001911 Result: Down-regulated in Transcription
  misc_feature: MA Experiment 20001911 PARAMETER Experiment Name: At_Drought_Reproduction_P Parameter: Age (day) Value: 40
  misc_feature: MA Experiment 20001911 PARAMETER Experiment Name: At_Drought_Reproduction_P Parameter: Organism Value: A. thaliana
  misc_feature: MA Experiment 20001911 PARAMETER Experiment Name: At_Drought_Reproduction_P Parameter: Plant Line Value: WS
  misc_feature: MA Experiment 20001911 PARAMETER Experiment Name: At_Drought_Reproduction_P Parameter: Timepoint (day) Value: 10
  misc_feature: MA Experiment 20001911 PARAMETER Experiment Name: At_Drought_Reproduction_P Parameter: Tissue Value: Flowers
  misc_feature: MA Experiment 20001911 PARAMETER Experiment Name: At_Drought_Reproduction_P Parameter: Treatment Value: Drought vs. No Drought
acagaaaccaaaccaagagccggaaatcaaaaacagtaataaaagatcaactgcaagaaaatggctcttcctctcgagctcgaaagcctcactgaagccatctcagctgggatgggaatgggagttgatgagaatgcattgataagcacactggggaaatcgcaaaaggaacatagaaaattgtttaggaaagcaagcaaaagtttctttgttgaagatgaggaaagagcttttgagaaatgtcatgatcacttcgtcagacacctcaagcttgagttctcccgcttcaatactgcggtggtgatgtgggcaatgcatccatgggagagagatgcaaggttggtgaagaaagctttgaagaaaggagaagaagcttacaacctcatcgttgaggtctcatgcacacgctctgctgaggatctcctcggtgcacgtaaagcttaccactctctcttcgaccaatcaatggaagaagacattgcctctcacgtccacggtcctcagcgcaagttgcttgtggggctcgtgagtgcttatagatacgaaggaaataaggtgaaggatgattctgccaaatccgatgctaagattctagccgaagcagtggcttcttcaggcgaagaagccgtggagaaggatgaggttgttaggattttgaccacaagaagcaaacttcatctccaacatctctacaaacactttaacgaaatcaaaggctctgatcttcttgggggtgtatctaagtcttctcttctcaatgaagcattgatttgtttgctcaaaccggctctgtatttcagcaagattttggatgcgtctctgaacaaagacgcagacaagactaccaagaaatggttgacaagagtgttcgttacaagagcagatcatagtgatgagatgaatgagatcaaagaagagtacaataacctttatggtgagactttggctcaaagaatccaagagaagataaaagggaactacagagatttcttgctcacacttctctccaaatccgattgatttcgtgttgagaaacctattaccaatacttttggttattgaagatttatgatttccctttttatggttttatgtttctaattcctaaatttgcgttttctctaccgtttggtaataaagacatgaaaatttgatgaactcggtgaatcgagagtaagagttttgcgattgtgacaatgagtgattaatacaaggattaagctccaataaaaaaatgttgct

SEQ ID NO: 22126 - protein, 319 aa, Arabidopsis thaliana
  peptide (1)..(319): Ceres Seq. ID no. 12325229
  misc_feature (243)..(314): Pfam Name: Annexin Pfam Description: Annexin
  misc_feature (2)..(319): Homolog of NCBI NO: 1621539 NR Description: annexin-like protein
  misc_feature (57)..(319): Homolog of NCBI NO: 1362037 NR Description: annexin homolog RJ4 (clone RJ4) - garden
  misc_feature (6)..(314): Homolog of NCBI NO: 33357398 NR Description: Chain A, Annexin Gh1 From Cotton
  misc_feature (6)..(314): Homolog of NCBI NO: 15214410 NR Description: annexin [Gossypium hirsutum]
  misc_feature (2)..(319): Homolog of NCBI NO: 15220216 NR Description: Ca2+-dependent membrane-binding protein annexin
  misc_feature (155)..(317): Homolog of NCBI NO: 3043430 NR Description: annexin [Cicer arietinum]
  misc_feature (6)..(314): Homolog of NCBI NO: 7484723 NR Description: fiber annexin - upland cotton
  misc_feature (15)..(315): Homolog of NCBI NO: 22326753 NR Description: annexin-like protein; protein id: At5g12380.1
  misc_feature (6)..(319): Homolog of NCBI NO: 21264397 NR Description: Annexin-like protein RJ4
  misc_feature (1)..(319): Homolog of NCBI NO: 15224946 NR Description: putative annexin
MALPLELESLTEAISAGMGMGVDENALISTLGKSQKEHRKLFRKASKSFFVEDEERAFEKCHDHFVRHLKLEFSRFNTAVVMWAMHPWERDARLVKKALKKGEEAYNLIVEVSCTRSAEDLLGARKAYHSLFDQSMEEDIASHVHGPQRKLLVGLVSAYRYEGNKVKDDSAKSDAKILAEAVASSGEEAVEKDEVVRILTTRSKLHLQHLYKHFNEIKGSDLLGGVSKSSLLNEALICLLKPALYFSKILDASLNKDADKTTKKWLTRVFVTRADHSDEMNEIKEEYNNLYGETLAQRIQEKIKGNYRDFLLTLLSKSD

SEQ ID NO: 22127 - protein, 302 aa, Arabidopsis thaliana
  peptide (1)..(302): Ceres Seq. ID no. 12325230
  misc_feature (226)..(297): Pfam Name: Annexin Pfam Description: Annexin
  misc_feature (138)..(300): Homolog of NCBI NO: 3043430 NR Description: annexin [Cicer arietinum]
  misc_feature (1)..(297): Homolog of NCBI NO: 7484723 NR Description: fiber annexin - upland cotton
  misc_feature (1)..(298): Homolog of NCBI NO: 22326753 NR Description: annexin-like protein; protein id: At5g12380.1
  misc_feature (40)..(302): Homolog of NCBI NO: 1362037 NR Description: annexin homolog RJ4 (clone RJ4) - garden
  misc_feature (1)..(297): Homolog of NCBI NO: 15214410 NR Description: annexin [Gossypium hirsutum]
  misc_feature (1)..(302): Homolog of NCBI NO: 15220216 NR Description: Ca2+-dependent membrane-binding protein annexin
  misc_feature (1)..(297): Homolog of NCBI NO: 33357398 NR Description: Chain A, Annexin Gh1 From Cotton
  misc_feature (1)..(302): Homolog of NCBI NO: 1621539 NR Description: annexin-like protein
  misc_feature (1)..(302): Homolog of NCBI NO: 21264397 NR Description: Annexin-like protein RJ4
  misc_feature (1)..(302): Homolog of NCBI NO: 15224946 NR Description: putative annexin
MGMGVDENALISTLGKSQKEHRKLFRKASKSFFVEDEERAFEKCHDHFVRHLKLEFSRFNTAVVMWAMHPWERDARLVKKALKKGEEAYNLIVEVSCTRSAEDLLGARKAYHSLFDQSMEEDIASHVHGPQRKLLVGLVSAYRYEGNKVKDDSAKSDAKILAEAVASSGEEAVEKDEVVRILTTRSKLHLQHLYKHFNEIKGSDLLGGVSKSSLLNEALICLLKPALYFSKILDASLNKDADKTTKKWLTRVFVTRADHSDEMNEIKEEYNNLYGETLAQRIQEKIKGNYRDFLLTLLSKSD

SEQ ID NO: 22128 - protein, 300 aa, Arabidopsis thaliana
  peptide (1)..(300): Ceres Seq. ID no. 12325231
  misc_feature (224)..(295): Pfam Name: Annexin Pfam Description: Annexin
  misc_feature (1)..(300): Homolog of NCBI NO: 1621539 NR Description: annexin-like protein
  misc_feature (38)..(300): Homolog of NCBI NO: 1362037 NR Description: annexin homolog RJ4 (clone RJ4) - garden
  misc_feature (1)..(295): Homolog of NCBI NO: 33357398 NR Description: Chain A, Annexin Gh1 From Cotton
  misc_feature (1)..(295): Homolog of NCBI NO: 15214410 NR Description: annexin [Gossypium hirsutum]
  misc_feature (1)..(300): Homolog of NCBI NO: 15220216 NR Description: Ca2+-dependent membrane-binding protein annexin
  misc_feature (136)..(298): Homolog of NCBI NO: 3043430 NR Description: annexin [Cicer arietinum]
  misc_feature (1)..(295): Homolog of NCBI NO: 7484723 NR Description: fiber annexin - upland cotton
  misc_feature (1)..(296): Homolog of NCBI NO: 22326753 NR Description: annexin-like protein; protein id: At5g12380.1
  misc_feature (1)..(300): Homolog of NCBI NO: 21264397 NR Description: Annexin-like protein RJ4
  misc_feature (1)..(300): Homolog of NCBI NO: 15224946 NR Description: putative annexin
MGVDENALISTLGKSQKEHRKLFRKASKSFFVEDEERAFEKCHDHFVRHLKLEFSRFNTAVVMWAMHPWERDARLVKKALKKGEEAYNLIVEVSCTRSAEDLLGARKAYHSLFDQSMEEDIASHVHGPQRKLLVGLVSAYRYEGNKVKDDSAKSDAKILAEAVASSGEEAVEKDEVVRILTTRSKLHLQHLYKHFNEIKGSDLLGGVSKSSLLNEALICLLKPALYFSKILDASLNKDADKTTKKWLTRVFVTRADHSDEMNEIKEEYNNLYGETLAQRIQEKIKGNYRDFLLTLLSKSD

SEQ ID NO: 22129 - DNA, 1265 bp, Arabidopsis thaliana
  misc_feature (1)..(1265): Ceres Seq. ID no. 12482742
  misc_feature: MA Experiment ID: 108433 Result: Up-regulated in Transcription
  misc_feature: MA Experiment 108433 PARAMETER Experiment Name: At_rhl_Mutant2_cDNA_P Parameter: Age (day) Value: 7
  misc_feature: MA Experiment 108433 PARAMETER Experiment Name: At_rhl_Mutant2_cDNA_P Parameter: Organism Value: A. thaliana
  misc_feature: MA Experiment 108433 PARAMETER Experiment Name: At_rhl_Mutant2_cDNA_P Parameter: Plant Line Value: rhl Mutant vs. wt landsburg
  misc_feature: MA Experiment 108433 PARAMETER Experiment Name: At_rhl_Mutant2_cDNA_P Parameter: Tissue Value: Roots
  misc_feature: MA Experiment ID: 108434 Result: Down-regulated in Transcription
  misc_feature: MA Experiment 108434 PARAMETER Experiment Name: At_Root_Tips_cDNA_P Parameter: Tissue Value: Root Tips
  misc_feature: MA Experiment ID: 108462 Result: Up-regulated in Transcription
  misc_feature: MA Experiment 108462 PARAMETER Experiment Name: At_Germinating_Seeds_cDNA_P Parameter: Age (day) Value: 2 vs. 0
  misc_feature: MA Experiment 108462 PARAMETER Experiment Name: At_Germinating_Seeds_cDNA_P Parameter: Tissue Value: Germinating Seeds
  misc_feature: MA Experiment ID: 108463 Result: Up-regulated in Transcription
  misc_feature: MA Experiment 108463 PARAMETER Experiment Name: At_Germinating_Seeds_cDNA_P Parameter: Age (day) Value: 3 vs. 0
  misc_feature: MA Experiment 108463 PARAMETER Experiment Name: At_Germinating_Seeds_cDNA_P Parameter: Tissue Value: Germinating Seeds
  misc_feature: MA Experiment ID: 108577 Result: Down-regulated in Transcription
  misc_feature: MA Experiment 108577 PARAMETER Experiment Name: At_42deg_Heat_cDNA_P Parameter: Temperature (deg C) Value: 42 vs. 22
  misc_feature: MA Experiment 108577 PARAMETER Experiment Name: At_42deg_Heat_cDNA_P Parameter: Timepoint (hr) Value: 6
  misc_feature: MA Experiment 108577 PARAMETER Experiment Name: At_42deg_Heat_cDNA_P Parameter: Tissue Value: Aerial
  misc_feature: MA Experiment ID: 108585 Result: Up-regulated in Transcription
  misc_feature: MA Experiment 108585 PARAMETER Experiment Name: At_5mM_NaNP_cDNA_P Parameter: Timepoint (hr) Value: 6
  misc_feature: MA Experiment 108585 PARAMETER Experiment Name: At_5mM_NaNP_cDNA_P Parameter: Tissue Value: Aerial
  misc_feature: MA Experiment 108585 PARAMETER Experiment Name: At_5mM_NaNP_cDNA_P Parameter: Treatment Value: null
  misc_feature: MA Experiment ID: 108594 Result: Down-regulated in Transcription
  misc_feature: MA Experiment 108594 PARAMETER Experiment Name: At_Ler-rhl_Root_cDNA_P Parameter: Plant Line Value: null
  misc_feature: MA Experiment ID: 108595 Result: Down-regulated in Transcription
  misc_feature: MA Experiment 108595 PARAMETER Experiment Name: At_Ler-pi_Ovule_cDNA_P Parameter: Plant Line Value: null
  misc_feature: MA Experiment ID: 20000111 Result: Down-regulated in Transcription
  misc_feature: MA Experiment 20000111 PARAMETER Experiment Name: At_42deg_Heat_cDNA_P Parameter: Temperature (deg C) Value: 42 vs. 22
  misc_feature: MA Experiment 20000111 PARAMETER Experiment Name: At_42deg_Heat_cDNA_P Parameter: Timepoint (hr) Value: 6
  misc_feature: MA Experiment 20000111 PARAMETER Experiment Name: At_42deg_Heat_cDNA_P Parameter: Tissue Value: Aerial
  misc_feature: MA Experiment ID: 20000117 Result: Down-regulated in Transcription
  misc_feature: MA Experiment 20000117 PARAMETER Experiment Name: At_100uM_ABA_Mutants_cDNA_P Parameter: Plant Line Value: Columbia
  misc_feature: MA Experiment 20000117 PARAMETER Experiment Name: At_100uM_ABA_Mutants_cDNA_P Parameter: Timepoint (hr) Value: 6
  misc_feature: MA Experiment 20000117 PARAMETER Experiment Name: At_100uM_ABA_Mutants_cDNA_P Parameter: Tissue Value: Aerial
  misc_feature: MA Experiment 20000117 PARAMETER Experiment Name: At_100uM_ABA_Mutants_cDNA_P Parameter: Treatment Value: 100uM ABA vs. No Treatment
  misc_feature: MA Experiment ID: 20000173 Result: Down-regulated in Transcription
  misc_feature: MA Experiment 20000173 PARAMETER Experiment Name: At_42deg_Heat_P Parameter: Age (day) Value: 14
  misc_feature: MA Experiment 20000173 PARAMETER Experiment Name: At_42deg_Heat_P Parameter: Organism Value: A. thaliana
  misc_feature: MA Experiment 20000173 PARAMETER Experiment Name: At_42deg_Heat_P Parameter: Plant Line Value: WS
  misc_feature: MA Experiment 20000173 PARAMETER Experiment Name: At_42deg_Heat_P Parameter: Temperature (deg C) Value: 42 vs. 22
  misc_feature: MA Experiment 20000173 PARAMETER Experiment Name: At_42deg_Heat_P Parameter: Timepoint (hr) Value: 6
  misc_feature: MA Experiment 20000173 PARAMETER Experiment Name: At_42deg_Heat_P Parameter: Tissue Value: Aerial
  misc_feature: MA Experiment ID: 20000214 Result: Down-regulated in Transcription
  misc_feature: MA Experiment 20000214 PARAMETER Experiment Name: At_4deg_Cold_P Parameter: Timepoint (hr) Value: 6
  misc_feature: MA Experiment ID: 20000286 Result: Down-regulated in Transcription
  misc_feature: MA Experiment 20000286 PARAMETER Experiment Name: At_Open_Flower_P Parameter: Age (day) Value: 21
  misc_feature: MA Experiment 20000286 PARAMETER Experiment Name: At_Open_Flower_P Parameter: Plant Line Value: WS
  misc_feature: MA Experiment 20000286 PARAMETER Experiment Name: At_Open_Flower_P Parameter: Tissue Value: Half Open vs. Whole Plant
  misc_feature: MA Experiment ID: 20001906 Result: Down-regulated in Transcription
  misc_feature: MA Experiment 20001906 PARAMETER Experiment Name: At_Drought_Reproduction_P Parameter: Age (day) Value: 35
  misc_feature: MA Experiment 20001906 PARAMETER Experiment Name: At_Drought_Reproduction_P Parameter: Organism Value: A. thaliana
  misc_feature: MA Experiment 20001906 PARAMETER Experiment Name: At_Drought_Reproduction_P Parameter: Plant Line Value: WS
  misc_feature: MA Experiment 20001906 PARAMETER Experiment Name: At_Drought_Reproduction_P Parameter: Timepoint (day) Value: 5
  misc_feature: MA Experiment 20001906 PARAMETER Experiment Name: At_Drought_Reproduction_P Parameter: Tissue Value: Siliques
  misc_feature: MA Experiment 20001906 PARAMETER Experiment Name: At_Drought_Reproduction_P Parameter: Treatment Value: Drought vs. No Drought
atttagccctttgtttctctacacacatctcacatccccctatctctctctctcttcaaacgttttagttccccaaaaaaatatcaaaagaactaaaagaaaaaccctagaagccgaagaatctcctactcgttgtcgatcggatcacctaactaattactcgttgataatcattatatcgagaaatatgattaattttgaggccacggagctgagattagggctaccgggtgggaatcacggaggagaaatggctggaaaaaataatggtaaaagaggattttctgagactgttgatctcaaactgaatctttcatcgacggctatggattcagtttccaaagtcgatttagagaatatgaaggagaaggtcgtaaaaccaccagccaaggcacaagttgtgggatggccaccggtacgatctttccgcaagaacgtcatgtccggccaaaaaccgaccaccggagatgccaccgaaggaaacgataagacttctggcagcagtggagccacctcatccgcctccgcatgtgccaccgtggcttatgtgaaggttagcatggacggtgcaccgtacctacggaaaattgacttgaaactctacaaaacttaccaagatctctccaacgccttaagcaaaatgtttagctcttttaccataggcaactatggaccacaaggaatgaaagatttcatgaatgagagtaaattgatcgatcttctaaacggatcagattatgttccaacatatgaagataaagatggcgactggatgcttgtaggagacgtaccgtgggagatgtttgttgattcatgcaaacgtatacgaataatgaagggatcagaagcaatcggacttgctccaagggcattagaaaagtgcaagaacagaagttgagttctcgacgacatttcgtgttcttacctaaaaaaggaagaaagcctgtttcgatcggttggatatctcgaaccgagaaagctaaaccggctcgaaactattgttccgagcaaggagtttgcttataatattaattaataataatattaatattgtggtgtattacattttaaaaaattaaatcgtttttgttatatgtattatatacatatattaatatgtatatttaattaggttgcatctatttccgttaaaaccaacttttgtttttacgcattatcgtgttgtctatatggtctgtgtccgtaaggcatcttaatgtgttactttgacgtaccaaattattacttacattatttcatttctc

SEQ ID NO: 22130 - protein, 298 aa, Arabidopsis thaliana
  peptide (1)..(298): Ceres Seq. ID no. 12482743
  misc_feature (64)..(290): Pfam Name: AUX/IAA family Pfam Description: AUX/IAA family
  misc_feature (64)..(298): Homolog of NCBI NO: 114734 NR Description: AUXIN-INDUCED PROTEIN AUX28
  misc_feature (64)..(286): Homolog of NCBI NO: 25296229 NR Description: IAA7 like protein [imported] - Arabidopsis
  misc_feature (64)..(286): Homolog of NCBI NO: 7442224 NR Description: auxin-induced protein - Arabidopsis thaliana
  misc_feature (64)..(286): Homolog of NCBI NO: 20269061 NR Description: aux/IAA protein [Populus tremula x Populus
  misc_feature (64)..(298): Homolog of NCBI NO: 22328628 NR Description: IAA7 like protein
  misc_feature (64)..(298): Homolog of NCBI NO: 21593352 NR Description: indoleacetic acid (IAA)-inducible gene (IAA7)
  misc_feature (63)..(298): Homolog of NCBI NO: 15228943 NR Description: indoleacetic acid (IAA)-inducible gene (IAA7)
  misc_feature (64)..(298): Homolog of NCBI NO: 4887020 NR Description: Nt-iaa28 deduced protein [Nicotiana tabacum]
  misc_feature (62)..(298): Homolog of NCBI NO: 20385508 NR Description: auxin-regulated protein [Populus tremula x
  misc_feature (63)..(298): Homolog of NCBI NO: 15229343 NR Description: auxin-induced protein
FSPLFLYTHLTSPYLSLSSNVLVPQKNIKRTKRKTLEAEESPTRCRSDHLTNYSLIIIISRNMINFEATELRLGLPGGNHGGEMAGKNNGKRGFSETVDLKLNLSSTAMDSVSKVDLENMKEKVVKPPAKAQVVGWPPVRSFRKNVMSGQKPTTGDATEGNDKTSGSSGATSSASACATVAYVKVSMDGAPYLRKIDLKLYKTYQDLSNALSKMFSSFTIGNYGPQGMKDFMNESKLIDLLNGSDYVPTYEDKDGDWMLVGDVPWEMFVDSCKRIRIMKGSEAIGLAPRALEKCKNRS

SEQ ID NO: 22131 - protein, 236 aa, Arabidopsis thaliana
  peptide (1)..(236): Ceres Seq. ID no. 12482744
  misc_feature (2)..(228): Pfam Name: AUX/IAA family Pfam Description: AUX/IAA family
  misc_feature (2)..(236): Homolog of NCBI NO: 114734 NR Description: AUXIN-INDUCED PROTEIN AUX28
  misc_feature (2)..(224): Homolog of NCBI NO: 25296229 NR Description: IAA7 like protein [imported] - Arabidopsis
  misc_feature (2)..(224): Homolog of NCBI NO: 7442224 NR Description: auxin-induced protein - Arabidopsis thaliana
  misc_feature (2)..(224): Homolog of NCBI NO: 20269061 NR Description: aux/IAA protein [Populus tremula x Populus
  misc_feature (2)..(236): Homolog of NCBI NO: 22328628 NR Description: IAA7 like protein
  misc_feature (2)..(236): Homolog of NCBI NO: 21593352 NR Description: indoleacetic acid (IAA)-inducible gene (IAA7)
  misc_feature (1)..(236): Homolog of NCBI NO: 15228943 NR Description: indoleacetic acid (IAA)-inducible gene (IAA7)
  misc_feature (2)..(236): Homolog of NCBI NO: 4887020 NR Description: Nt-iaa28 deduced protein [Nicotiana tabacum]
  misc_feature (1)..(236): Homolog of NCBI NO: 20385508 NR Description: auxin-regulated protein [Populus tremula x
  misc_feature (1)..(236): Homolog of NCBI NO: 15229343 NR Description: auxin-induced protein
MINFEATELRLGLPGGNHGGEMAGKNNGKRGFSETVDLKLNLSSTAMDSVSKVDLENMKEKVVKPPAKAQVVGWPPVRSFRKNVMSGQKPTTGDATEGNDKTSGSSGATSSASACATVAYVKVSMDGAPYLRKIDLKLYKTYQDLSNALSKMFSSFTIGNYGPQGMKDFMNESKLIDLLNGSDYVPTYEDKDGDWMLVGDVPWEMFVDSCKRIRIMKGSEAIGLAPRALEKCKNRS

SEQ ID NO: 22132 - protein, 215 aa, Arabidopsis thaliana
  peptide (1)..(215): Ceres Seq. ID no. 12482745
  misc_feature (1)..(207): Pfam Name: AUX/IAA family Pfam Description: AUX/IAA family
  misc_feature (1)..(215): Homolog of NCBI NO: 114734 NR Description: AUXIN-INDUCED PROTEIN AUX28
  misc_feature (1)..(203): Homolog of NCBI NO: 25296229 NR Description: IAA7 like protein [imported] - Arabidopsis
  misc_feature (1)..(203): Homolog of NCBI NO: 7442224 NR Description: auxin-induced protein - Arabidopsis thaliana
  misc_feature (1)..(203): Homolog of NCBI NO: 20269061 NR Description: aux/IAA protein [Populus tremula x Populus
  misc_feature (1)..(215): Homolog of NCBI NO: 22328628 NR Description: IAA7 like protein
  misc_feature (1)..(215): Homolog of NCBI NO: 21593352 NR Description: indoleacetic acid (IAA)-inducible gene (IAA7)
  misc_feature (1)..(215): Homolog of NCBI NO: 15228943 NR Description: indoleacetic acid (IAA)-inducible gene (IAA7)
  misc_feature (1)..(215): Homolog of NCBI NO: 4887020 NR Description: Nt-iaa28 deduced protein [Nicotiana tabacum]
  misc_feature (1)..(215): Homolog of NCBI NO: 20385508 NR Description: auxin-regulated protein [Populus tremula x
  misc_feature (1)..(215): Homolog of NCBI NO: 15229343 NR Description: auxin-induced protein
MAGKNNGKRGFSETVDLKLNLSSTAMDSVSKVDLENMKEKVVKPPAKAQVVGWPPVRSFRKNVMSGQKPTTGDATEGNDKTSGSSGATSSASACATVAYVKVSMDGAPYLRKIDLKLYKTYQDLSNALSKMFSSFTIGNYGPQGMKDFMNESKLIDLLNGSDYVPTYEDKDGDWMLVGDVPWEMFVDSCKRIRIMKGSEAIGLAPRALEKCKNRS

SEQ ID NO: 22133 - DNA, 1220 bp, Arabidopsis thaliana
  misc_feature (1)..(1220): Ceres Seq. ID no. 12394706
  misc_feature: MA Experiment ID: 108595 Result: Up-regulated in Transcription
  misc_feature: MA Experiment 108595 PARAMETER Experiment Name: At_Ler-pi_Ovule_cDNA_P Parameter: Plant Line Value: null
  misc_feature: MA Experiment ID: 20001556 Result: Up-regulated in Transcription
  misc_feature: MA Experiment 20001556 PARAMETER Experiment Name: At_Drought_Soil_Dry_P Parameter: Age (day) Value: 26
  misc_feature: MA Experiment 20001556 PARAMETER Experiment Name: At_Drought_Soil_Dry_P Parameter: Organism Value: A. thaliana
  misc_feature: MA Experiment 20001556 PARAMETER Experiment Name: At_Drought_Soil_Dry_P Parameter: Plant Line Value: WS
  misc_feature: MA Experiment 20001556 PARAMETER Experiment Name: At_Drought_Soil_Dry_P Parameter: Post Timepoint (hr) Value: None
  misc_feature: MA Experiment 20001556 PARAMETER Experiment Name: At_Drought_Soil_Dry_P Parameter: Post-Treatment Value: None
  misc_feature: MA Experiment 20001556 PARAMETER Experiment Name: At_Drought_Soil_Dry_P Parameter: Timepoint (day) Value: 12
  misc_feature: MA Experiment 20001556 PARAMETER Experiment Name: At_Drought_Soil_Dry_P Parameter: Treatment Value: Drought vs. No Drought
aatttcgtctttcattatttctatttttgttttgtcggaaaaaaaataaaatgaagagcaacacaaacactaatctgattctcttccaccaccactctccactaacttcaaaatcaccctccgccgtcgccgccgcgaatcaccaccgtttcttattcatcttcttcctctctttcttcactctcctcttctctttctctctcttctcctcctcaatccactccaccacatcctctcactctctctcctcatctccctcctcctcctctcttccaccaccagtcctcgccgcacttctccactacacttcctcatcaccaccaaacacatctatgtcctttcttgaactctccaccatctccaacatcattcactctcatggcccagcttgtaacctcttaatctttggactaactcacgaatctcttctctggagatctatcaacttccaaggccgtactgttttcgttgatgagagtccttactctgtttctaaattcgaacagagtaaccctggagttgaagcttacgaggttgtttactcaactaaagtctctcaagctaagaagcttcttggttattacaagacccgacccgagtgtagacccgttcagaatcttttgttctctgattgtaaattgggtattaacgatttgcctaattttgtttatgagattgattgggatgtgattttgattgatgggcctcgtgggtatgcttctgattctccgggaaggatggctccgatctttacttctgcggttttagcaaaaagtaaagattttgggacgaagacgaagaagactgatgttcttgtacatgagtttgggagaaagattgagagagtgtacagtgaggagtttctatgtgaagagaatttgattgaagtggtcggagatttagggcattttgttgtggcggcggcggaggaaagagagagttatggtgatgggttttgtcggaattcgacgagattgtcggagagttttacggcggtgagtggtggcgatgaagaaaaagttggtgttgatgatgagtgaaaagtgggtttggttttttacttttggtggctcttttgtaattaaatttagcttttgaggtcttcttttttttttttttttgtttagtcttttacttcatttggtttttgaatttaggagaacggttacacttgaaagttaatatgtaactaaattccaaaaaaaaacaaatgttactct

SEQ ID NO: 22134 - protein, 345 aa, Arabidopsis thaliana
  peptide (1)..(345): Ceres Seq. ID no. 12394707
  misc_feature (73)..(319): Pfam Name: Protein of unknown function (DUF579) Pfam Description: Protein of unknown function (DUF579)
  misc_feature (67)..(319): Homolog of NCBI NO: 15220402 NR Description: unknown protein; protein id: At1g67330.1
  misc_feature (50)..(319): Homolog of NCBI NO: 15234881 NR Description: putative protein; protein id: At4g09990.1
  misc_feature (43)..(324): Homolog of NCBI NO: 15217566 NR Description: unknown protein; protein id: At1g09610.1
  misc_feature (74)..(319): Homolog of NCBI NO: 25354648 NR Description: hypothetical protein F14O23.3 [imported] -
  misc_feature (74)..(319): Homolog of NCBI NO: 18409879 NR Description: hypothetical protein; protein id: At1g71690.1
  misc_feature (41)..(328): Homolog of NCBI NO: 10241434 NR Description: putative protein [Oryza sativa (indica
  misc_feature (20)..(328): Homolog of NCBI NO: 21593034 NR Description: unknown [Arabidopsis thaliana]
  misc_feature (20)..(328): Homolog of NCBI NO: 15229700 NR Description: putative protein
  misc_feature (17)..(320): Homolog of NCBI NO: 15240242 NR Description: putative protein; protein id: At5g67210.1
  misc_feature (17)..(345): Homolog of NCBI NO: 18397819 NR Description: expressed protein
FRLSLFLFLFCRKKNKMKSNTNTNLILFHHHSPLTSKSPSAVAAANHHRFLFIFFLSFFTLLFSFSLFSSSIHSTTSSHSLSSSPSSSSLPPPVLAALLHYTSSSPPNTSMSFLELSTISNIIHSHGPACNLLIFGLTHESLLWRSINFQGRTVFVDESPYSVSKFEQSNPGVEAYEVVYSTKVSQAKKLLGYYKTRPECRPVQNLLFSDCKLGINDLPNFVYEIDWDVILIDGPRGYASDSPGRMAPIFTSAVLAKSKDFGTKTKKTDVLVHEFGRKIERVYSEEFLCEENLIEVVGDLGHFVVAAAEERESYGDGFCRNSTRLSESFTAVSGGDEEKVGVDDE

SEQ ID NO: 22135 - protein, 329 aa, Arabidopsis thaliana
  peptide (1)..(329): Ceres Seq. ID no. 12394708
  misc_feature (57)..(303): Pfam Name: Protein of unknown function (DUF579) Pfam Description: Protein of unknown function (DUF579)
  misc_feature (51)..(303): Homolog of NCBI NO: 15220402 NR Description: unknown protein; protein id: At1g67330.1
  misc_feature (34)..(303): Homolog of NCBI NO: 15234881 NR Description: putative protein; protein id: At4g09990.1
  misc_feature (27)..(308): Homolog of NCBI NO: 15217566 NR Description: unknown protein; protein id: At1g09610.1
  misc_feature (58)..(303): Homolog of NCBI NO: 25354648 NR Description: hypothetical protein F14O23.3 [imported] -
  misc_feature (58)..(303): Homolog of NCBI NO: 18409879 NR Description: hypothetical protein; protein id: At1g71690.1
  misc_feature (25)..(312): Homolog of NCBI NO: 10241434 NR Description: putative protein [Oryza sativa (indica
  misc_feature (4)..(312): Homolog of NCBI NO: 21593034 NR Description: unknown [Arabidopsis thaliana]
  misc_feature (4)..(312): Homolog of NCBI NO: 15229700 NR Description: putative protein
  misc_feature (1)..(304): Homolog of NCBI NO: 15240242 NR Description: putative protein; protein id: At5g67210.1
  misc_feature (1)..(329): Homolog of NCBI NO: 18397819 NR Description: expressed protein
MKSNTNTNLILFHHHSPLTSKSPSAVAAANHHRFLFIFFLSFFTLLFSFSLFSSSIHSTTSSHSLSSSPSSSSLPPPVLAALLHYTSSSPPNTSMSFLELSTISNIIHSHGPACNLLIFGLTHESLLWRSINFQGRTVFVDESPYSVSKFEQSNPGVEAYEVVYSTKVSQAKKLLGYYKTRPECRPVQNLLFSDCKLGINDLPNFVYEIDWDVILIDGPRGYASDSPGRMAPIFTSAVLAKSKDFGTKTKKTDVLVHEFGRKIERVYSEEFLCEENLIEVVGDLGHFVVAAAEERESYGDGFCRNSTRLSESFTAVSGGDEEKVGVDDE

SEQ ID NO: 22136 - protein, 235 aa, Arabidopsis thaliana
  peptide (1)..(235): Ceres Seq. ID no. 12394709
  misc_feature (1)..(209): Pfam Name: Protein of unknown function (DUF579) Pfam Description: Protein of unknown function (DUF579)
  misc_feature (1)..(209): Homolog of NCBI NO: 15220402 NR Description: unknown protein; protein id: At1g67330.1
  misc_feature (1)..(209): Homolog of NCBI NO: 15234881 NR Description: putative protein; protein id: At4g09990.1
  misc_feature (1)..(214): Homolog of NCBI NO: 15217566 NR Description: unknown protein; protein id: At1g09610.1
  misc_feature (1)..(209): Homolog of NCBI NO: 25354648 NR Description: hypothetical protein F14O23.3 [imported] -
  misc_feature (1)..(209): Homolog of NCBI NO: 18409879 NR Description: hypothetical protein; protein id: At1g71690.1
  misc_feature (1)..(218): Homolog of NCBI NO: 10241434 NR Description: putative protein [Oryza sativa (indica
  misc_feature (1)..(218): Homolog of NCBI NO: 21593034 NR Description: unknown [Arabidopsis thaliana]
  misc_feature (1)..(218): Homolog of NCBI NO: 15229700 NR Description: putative protein
  misc_feature (1)..(210): Homolog of NCBI NO: 15240242 NR Description: putative protein; protein id: At5g67210.1
  misc_feature (1)..(235): Homolog of NCBI NO: 18397819 NR Description: expressed protein
MSFLELSTISNIIHSHGPACNLLIFGLTHESLLWRSINFQGRTVFVDESPYSVSKFEQSNPGVEAYEVVYSTKVSQAKKLLGYYKTRPECRPVQNLLFSDCKLGINDLPNFVYEIDWDVILIDGPRGYASDSPGRMAPIFTSAVLAKSKDFGTKTKKTDVLVHEFGRKIERVYSEEFLCEENLIEVVGDLGHFVVAAAEERESYGDGFCRNSTRLSESFTAVSGGDEEKVGVDDE

SEQ ID NO: 22137 - DNA, 1380 bp, Arabidopsis thaliana
  misc_feature (1)..(1380): Ceres Seq. ID no. 12324638
  misc_feature: MA Experiment ID: 108572 Result: Up-regulated in Transcription
  misc_feature: MA Experiment 108572 PARAMETER Experiment Name: At_Drought_cDNA_P Parameter: Timepoint (hr) Value: 1
  misc_feature: MA Experiment 108572 PARAMETER Experiment Name: At_Drought_cDNA_P Parameter: Tissue Value: Aerial
  misc_feature: MA Experiment 108572 PARAMETER Experiment Name: At_Drought_cDNA_P Parameter: Treatment Value: Drought vs. No Drought
  misc_feature: MA Experiment ID: 108573 Result: Up-regulated in Transcription
  misc_feature: MA Experiment 108573 PARAMETER Experiment Name: At_Drought_cDNA_P Parameter: Timepoint (hr) Value: 6
  misc_feature: MA Experiment 108573 PARAMETER Experiment Name: At_Drought_cDNA_P Parameter: Tissue Value: Aerial
  misc_feature: MA Experiment 108573 PARAMETER Experiment Name: At_Drought_cDNA_P Parameter: Treatment Value: Drought vs. No Drought
  misc_feature: MA Experiment ID: 108577 Result: Up-regulated in Transcription
  misc_feature: MA Experiment 108577 PARAMETER Experiment Name: At_42deg_Heat_cDNA_P Parameter: Temperature (deg C) Value: 42 vs. 22
  misc_feature: MA Experiment 108577 PARAMETER Experiment Name: At_42deg_Heat_cDNA_P Parameter: Timepoint (hr) Value: 6
  misc_feature: MA Experiment 108577 PARAMETER Experiment Name: At_42deg_Heat_cDNA_P Parameter: Tissue Value: Aerial
  misc_feature: MA Experiment ID: 20000069 Result: Up-regulated in Transcription
  misc_feature: MA Experiment 20000069 PARAMETER Experiment Name: At_100uM_ABA_Mutants_cDNA_P Parameter: Plant Line Value: CS23
  misc_feature: MA Experiment 20000069 PARAMETER Experiment Name: At_100uM_ABA_Mutants_cDNA_P Parameter: Timepoint (hr) Value: 6
  misc_feature: MA Experiment 20000069 PARAMETER Experiment Name: At_100uM_ABA_Mutants_cDNA_P Parameter: Tissue Value: Aerial
  misc_feature: MA Experiment 20000069 PARAMETER Experiment Name: At_100uM_ABA_Mutants_cDNA_P Parameter: Treatment Value: 100uM ABA vs. No Treatment
  misc_feature: MA Experiment ID: 20000070 Result: Up-regulated in Transcription
  misc_feature: MA Experiment 20000070 PARAMETER Experiment Name: At_100uM_ABA_Mutants_cDNA_P Parameter: Plant Line Value: CS24
  misc_feature: MA Experiment 20000070 PARAMETER Experiment Name: At_100uM_ABA_Mutants_cDNA_P Parameter: Timepoint (hr) Value: 6
  misc_feature: MA Experiment 20000070 PARAMETER Experiment Name: At_100uM_ABA_Mutants_cDNA_P Parameter: Tissue Value: Aerial
  misc_feature: MA Experiment 20000070 PARAMETER Experiment Name: At_100uM_ABA_Mutants_cDNA_P Parameter: Treatment Value: 100uM ABA vs. No Treatment
  misc_feature: MA Experiment ID: 20000071 Result: Up-regulated in Transcription
  misc_feature: MA Experiment 20000071 PARAMETER Experiment Name: At_100uM_ABA_Mutants_cDNA_P Parameter: Plant Line Value: CS8104
  misc_feature: MA Experiment 20000071 PARAMETER Experiment Name: At_100uM_ABA_Mutants_cDNA_P Parameter: Timepoint (hr) Value: 6
  misc_feature: MA Experiment 20000071 PARAMETER Experiment Name: At_100uM_ABA_Mutants_cDNA_P Parameter: Tissue Value: Aerial
  misc_feature: MA Experiment 20000071 PARAMETER Experiment Name: At_100uM_ABA_Mutants_cDNA_P Parameter: Treatment Value: 100uM ABA vs. No Treatment
  misc_feature: MA Experiment ID: 20000072 Result: Up-regulated in Transcription
  misc_feature: MA Experiment 20000072 PARAMETER Experiment Name: At_100uM_ABA_Mutants_cDNA_P Parameter: Plant Line Value: CS8105
  misc_feature: MA Experiment 20000072 PARAMETER Experiment Name: At_100uM_ABA_Mutants_cDNA_P Parameter: Timepoint (hr) Value: 6
  misc_feature: MA Experiment 20000072 PARAMETER Experiment Name: At_100uM_ABA_Mutants_cDNA_P Parameter: Tissue Value: Aerial
  misc_feature: MA Experiment 20000072 PARAMETER Experiment Name: At_100uM_ABA_Mutants_cDNA_P Parameter: Treatment Value: 100uM ABA vs. No Treatment
  misc_feature: MA Experiment ID: 20000086 Result: Up-regulated in Transcription
  misc_feature: MA Experiment 20000086 PARAMETER Experiment Name: At_100uM_ABA_Mutants_cDNA_P Parameter: Plant Line Value: CS22
  misc_feature: MA Experiment 20000086 PARAMETER Experiment Name: At_100uM_ABA_Mutants_cDNA_P Parameter: Timepoint (hr) Value: 6
  misc_feature: MA Experiment 20000086 PARAMETER Experiment Name: At_100uM_ABA_Mutants_cDNA_P Parameter: Tissue Value: Aerial
  misc_feature: MA Experiment 20000086 PARAMETER Experiment Name: At_100uM_ABA_Mutants_cDNA_P Parameter: Treatment Value: 100uM ABA vs. No Treatment
  misc_feature: MA Experiment ID: 20000087 Result: Up-regulated in Transcription
  misc_feature: MA Experiment 20000087 PARAMETER Experiment Name: At_100uM_ABA_Mutants_cDNA_P Parameter: Plant Line Value: WS
  misc_feature: MA Experiment 20000087 PARAMETER Experiment Name: At_100uM_ABA_Mutants_cDNA_P Parameter: Timepoint (hr) Value: 6
  misc_feature: MA Experiment 20000087 PARAMETER Experiment Name: At_100uM_ABA_Mutants_cDNA_P Parameter: Tissue Value: Aerial
  misc_feature: MA Experiment 20000087 PARAMETER Experiment Name: At_100uM_ABA_Mutants_cDNA_P Parameter: Treatment Value: 100uM ABA vs. No Treatment
  misc_feature: MA Experiment ID: 20000088 Result: Up-regulated in Transcription
  misc_feature: MA Experiment 20000088 PARAMETER Experiment Name: At_100uM_ABA_Mutants_cDNA_P Parameter: Plant Line Value: Landsberg
  misc_feature: MA Experiment 20000088 PARAMETER Experiment Name: At_100uM_ABA_Mutants_cDNA_P Parameter: Timepoint (hr) Value: 6
  misc_feature: MA Experiment 20000088 PARAMETER Experiment Name: At_100uM_ABA_Mutants_cDNA_P Parameter: Tissue Value: Aerial
  misc_feature: MA Experiment 20000088 PARAMETER Experiment Name: At_100uM_ABA_Mutants_cDNA_P Parameter: Treatment Value: 100uM ABA vs. No Treatment
  misc_feature: MA Experiment ID: 20000089 Result: Up-regulated in Transcription
  misc_feature: MA Experiment ID: 20000111 Result: Up-regulated in Transcription
  misc_feature: MA Experiment 20000111 PARAMETER Experiment Name: At_42deg_Heat_cDNA_P Parameter: Temperature (deg C) Value: 42 vs. 22
  misc_feature: MA Experiment 20000111 PARAMETER Experiment Name: At_42deg_Heat_cDNA_P Parameter: Timepoint (hr) Value: 6
  misc_feature: MA Experiment 20000111 PARAMETER Experiment Name: At_42deg_Heat_cDNA_P Parameter: Tissue Value: Aerial
  misc_feature: MA Experiment ID: 20000112 Result: Up-regulated in Transcription
  misc_feature: MA Experiment 20000112 PARAMETER Experiment Name: At_42deg_Heat_cDNA_P Parameter: Temperature (deg C) Value: 42 vs. 22
  misc_feature: MA Experiment 20000112 PARAMETER Experiment Name: At_42deg_Heat_cDNA_P Parameter: Timepoint (hr) Value: 2
  misc_feature: MA Experiment 20000112 PARAMETER Experiment Name: At_42deg_Heat_cDNA_P Parameter: Tissue Value: Aerial
  misc_feature: MA Experiment ID: 20000113 Result: Up-regulated in Transcription
  misc_feature: MA Experiment 20000113 PARAMETER Experiment Name: At_42deg_Heat_cDNA_P Parameter: Temperature (deg C) Value: 42 vs. 22
  misc_feature: MA Experiment 20000113 PARAMETER Experiment Name: At_42deg_Heat_cDNA_P Parameter: Timepoint (hr) Value: 8
  misc_feature: MA Experiment 20000113 PARAMETER Experiment Name: At_42deg_Heat_cDNA_P Parameter: Tissue Value: Aerial
  misc_feature: MA Experiment ID: 20000117 Result: Up-regulated in Transcription
  misc_feature: MA Experiment 20000117 PARAMETER Experiment Name: At_100uM_ABA_Mutants_cDNA_P Parameter: Plant Line Value: Columbia
  misc_feature: MA Experiment 20000117 PARAMETER Experiment Name: At_100uM_ABA_Mutants_cDNA_P Parameter: Timepoint (hr) Value: 6
  misc_feature: MA Experiment 20000117 PARAMETER Experiment Name: At_100uM_ABA_Mutants_cDNA_P Parameter: Tissue Value: Aerial
  misc_feature: MA Experiment 20000117 PARAMETER Experiment Name: At_100uM_ABA_Mutants_cDNA_P Parameter: Treatment Value: 100uM ABA vs. No Treatment
  misc_feature: MA Experiment ID: 20000144 Result: Up-regulated in Transcription
  misc_feature: MA Experiment 20000144 PARAMETER Experiment Name: At_42deg_Heat_cDNA_P Parameter: Temperature (deg C) Value: 42 vs. 22
  misc_feature: MA Experiment 20000144 PARAMETER Experiment Name: At_42deg_Heat_cDNA_P Parameter: Timepoint (hr) Value: 1
  misc_feature: MA Experiment 20000144 PARAMETER Experiment Name: At_42deg_Heat_cDNA_P Parameter: Tissue Value: Aerial
  misc_feature: MA Experiment ID: 20000173 Result: Up-regulated in Transcription
  misc_feature: MA Experiment 20000173 PARAMETER Experiment Name: At_42deg_Heat_P Parameter: Age (day) Value: 14
  misc_feature: MA Experiment 20000173 PARAMETER Experiment Name: At_42deg_Heat_P Parameter: Organism Value: A. thaliana
  misc_feature: MA Experiment 20000173 PARAMETER Experiment Name: At_42deg_Heat_P Parameter: Plant Line Value: WS
  misc_feature: MA Experiment 20000173 PARAMETER Experiment Name: At_42deg_Heat_P Parameter: Temperature (deg C) Value: 42 vs. 22
  misc_feature: MA Experiment 20000173 PARAMETER Experiment Name: At_42deg_Heat_P Parameter: Timepoint (hr) Value: 6
  misc_feature: MA Experiment 20000173 PARAMETER Experiment Name: At_42deg_Heat_P Parameter: Tissue Value: Aerial
  misc_feature: MA Experiment ID: 20000184 Result: Down-regulated in Transcription
  misc_feature: MA Experiment 20000184 PARAMETER Experiment Name: At_Shoots__P Parameter: Age (day) Value: 7
  misc_feature: MA Experiment 20000184 PARAMETER Experiment Name: At_Shoots__P Parameter: Tissue Value: Shoots vs. Whole Plant
  misc_feature: MA Experiment ID: 20000224 Result: Up-regulated in Transcription
  misc_feature: MA Experiment ID: 20000234 Result: Down-regulated in Transcription
  misc_feature: MA Experiment 20000234 PARAMETER Experiment Name: At_Siliques_P Parameter: Age (day) Value: 21
  misc_feature: MA Experiment 20000234 PARAMETER Experiment Name: At_Siliques_P Parameter: Organism Value: A. thaliana
  misc_feature: MA Experiment 20000234 PARAMETER Experiment Name: At_Siliques_P Parameter: Plant Line Value: WS
  misc_feature: MA Experiment 20000234 PARAMETER Experiment Name: At_Siliques_P Parameter: Tissue Value: Less Than 5mm Siliques vs. Whole Plant
  misc_feature: MA Experiment ID: 20000437 Result: Up-regulated in Transcription
  misc_feature: MA Experiment 20000437 PARAMETER Experiment Name: At_Drought_P Parameter: Age (day) Value: 8
  misc_feature: MA Experiment 20000437 PARAMETER Experiment Name: At_Drought_P Parameter: Organism Value: A. thaliana
  misc_feature: MA Experiment 20000437 PARAMETER Experiment Name: At_Drought_P Parameter: Plant Line Value: WS
  misc_feature: MA Experiment 20000437 PARAMETER Experiment Name: At_Drought_P Parameter: Timepoint (hr) Value: 24
  misc_feature: MA Experiment 20000437 PARAMETER Experiment Name: At_Drought_P Parameter: Tissue Value: Whole Plant
  misc_feature: MA Experiment 20000437 PARAMETER Experiment Name: At_Drought_P Parameter: Treatment Value: Drought vs. No Drought
  misc_feature: MA Experiment ID: 20000438 Result: Down-regulated in Transcription
  misc_feature: MA Experiment 20000438 PARAMETER Experiment Name: At_Shoots__P Parameter: Age (day) Value: 14
  misc_feature: MA Experiment 20000438 PARAMETER Experiment Name: At_Shoots__P Parameter: Tissue Value: Shoots vs. Whole Plant
  misc_feature: MA Experiment ID: 20001248 Result: Up-regulated in Transcription
  misc_feature: MA Experiment 20001248 PARAMETER Experiment Name: At_Far-red-induction_P Parameter: Age (day) Value: 7
  misc_feature: MA Experiment 20001248 PARAMETER Experiment Name: At_Far-red-induction_P Parameter: Light Value: Far-red vs. White
  misc_feature: MA Experiment 20001248 PARAMETER Experiment Name: At_Far-red-induction_P Parameter: Organism Value: A. thaliana
  misc_feature: MA Experiment 20001248 PARAMETER Experiment Name: At_Far-red-induction_P Parameter: Plant Line Value: Columbia
  misc_feature: MA Experiment 20001248 PARAMETER Experiment Name: At_Far-red-induction_P Parameter: Timepoint (hr) Value: 4
  misc_feature: MA Experiment 20001248 PARAMETER Experiment Name: At_Far-red-induction_P Parameter: Tissue Value: Whole Plant
  misc_feature: MA Experiment ID: 20001560 Result: Down-regulated in Transcription
  misc_feature: MA Experiment 20001560 PARAMETER Experiment Name: At_Drought_Soil_Dry_P Parameter: Age (day) Value: 28
  misc_feature: MA Experiment 20001560 PARAMETER Experiment Name: At_Drought_Soil_Dry_P Parameter: Organism Value: A. thaliana
  misc_feature: MA Experiment 20001560 PARAMETER Experiment Name: At_Drought_Soil_Dry_P Parameter: Plant Line Value: WS
  misc_feature: MA Experiment 20001560 PARAMETER Experiment Name: At_Drought_Soil_Dry_P Parameter: Post Timepoint (hr) Value: None
  misc_feature: MA Experiment 20001560 PARAMETER Experiment Name: At_Drought_Soil_Dry_P Parameter: Post-Treatment Value: None
  misc_feature: MA Experiment 20001560 PARAMETER Experiment Name: At_Drought_Soil_Dry_P Parameter: Timepoint (day) Value: 14
  misc_feature: MA Experiment 20001560 PARAMETER Experiment Name: At_Drought_Soil_Dry_P Parameter: Treatment Value: Drought vs. No Drought
atcctttctctctcttcccctcttctctctctctatttccagatcgaaacatctctcttcacaaaatgcctttgtcacggtccctcctttcgcggaggatctcgaactcttttaggtttcatcagggagagacaacgacggcaccggaatccgaatcgattcctccgccgtcgaatatggccggttcttcgtcatggtcggcgatgctccctgaattattaggcgagatcattcgtcgcgtggaggagactgaggaccgttggcctcaacgtcgtgatgtagttacttgcgcttgcgtttctaagaaatggagagaaatcactcacgatttcgctagatcctctcttaactctggcaaaattactttcccttcttgcctcaaattgccaggtcctagagacttttctaatcagtgcttgataaagaggaacaagaagacatcaacgttttacttgtatcttgctctaacaccatcattcactgataagggaaagtttcttctggcggcgcggaggtttaggaccggtgcttacactgagtacatcatatcacttgatgctgatgatttctctcaaggaagtaatgcctacgtcggaaaattaagatcagattttcttgggaccaactttacagtatacgatagccaaccaccacacaacggagcaaaaccttcaaatggcaaagccagtcgcagatttgcatcaaagcagataagccctcaagttccagcaggcaactttgaagtcggtcatgtttcttataaattcaaccttttgaaatcaagaggtccaagaagaatggtaagcacactccgatgcccatcaccatcaccttcatcatcatccgctggactctcgtctgaccaaaagccatgtgatgtaaccaagataatgaaaaaacccaacaaggatggttccagcttgacaatactaaagaacaaagctcctagatggcacgagcacttgcagtgctggtgtctgaacttccatggacgagttactgttgcttcggtcaagaactttcagctggttgcgaccgttgaccaaagtcaaccgagcggtaaaggcgatgaagaaacagttcttctacagtttggtaaagtgggagatgacactttcactatggattatagacagcctctctctgcatttcaggcttttgctatctgtctcacaagtttcggcactaaacttgcctgcgagtgaaacccaacaaaaggcaacagaaaaaaagaaaaaaagtgaactggctctgcaaacatgtaatgttttgatgtaatcatgtgtaagtgtaaacacaaaggtatgtggaaaggagaagcacataagtattattatgtaagaaacattatttaaaacccataatcataatgtatctctt

SEQ ID NO: 22138 - protein, 400 aa, Arabidopsis thaliana
  peptide (1)..(400): Ceres Seq. ID no. 12324639
  misc_feature (129)..(202): Pfam Name: Tub family Pfam Description: Tub family
  misc_feature (302)..(400): Homolog of NCBI NO: 30690823 NR Description: F-box containing tubby family protein
  misc_feature (38)..(266): Homolog of NCBI NO: 30690823 NR Description: F-box containing tubby family protein
  misc_feature (65)..(127): Homolog of NCBI NO: 34911070 NR Description: putative tubby-like protein
  misc_feature (128)..(400): Homolog of NCBI NO: 34911070 NR Description: putative tubby-like protein
  misc_feature (38)..(266): Homolog of NCBI NO: 25409071 NR Description: probable Tub family protein [imported] -
  misc_feature (60)..(398): Homolog of NCBI NO: 34909710 NR Description: putative Tub family protein
  misc_feature (302)..(400): Homolog of NCBI NO: 25409071 NR Description: probable Tub family protein [imported] -
  misc_feature (22)..(400): Homolog of NCBI NO: 18404413 NR Description: F-box containing tubby family protein
  misc_feature (14)..(202): Homolog of NCBI NO: 7769867 NR Description: F12M16.22 [Arabidopsis thaliana]
  misc_feature (190)..(400): Homolog of NCBI NO: 7769867 NR Description: F12M16.22 [Arabidopsis thaliana]
PFSLFPSSLSLFPDRNISLHKMPLSRSLLSRRISNSFRFHQGETTTAPESESIPPPSNMAGSSSWSAMLPELLGEIIRRVEETEDRWPQRRDVVTCACVSKKWREITHDFARSSLNSGKITFPSCLKLPGPRDFSNQCLIKRNKKTSTFYLYLALTPSFTDKGKFLLAARRFRTGAYTEYIISLDADDFSQGSNAYVGKLRSDFLGTNFTVYDSQPPHNGAKPSNGKASRRFASKQISPQVPAGNFEVGHVSYKFNLLKSRGPRRMVSTLRCPSPSPSSSSAGLSSDQKPCDVTKIMKKPNKDGSSLTILKNKAPRWHEHLQCWCLNFHGRVTVASVKNFQLVATVDQSQPSGKGDEETVLLQFGKVGDDTFTMDYRQPLSAFQAFAICLTSFGTKLACE

SEQ ID NO: 22139 - protein, 379 aa, Arabidopsis thaliana
  peptide (1)..(379): Ceres Seq. ID no. 12324640
  misc_feature (108)..(181): Pfam Name: Tub family Pfam Description: Tub family
  misc_feature (281)..(379): Homolog of NCBI NO: 25409071 NR Description: probable Tub family protein [imported] -
  misc_feature (17)..(245): Homolog of NCBI NO: 25409071 NR Description: probable Tub family protein [imported] -
  misc_feature (39)..(377): Homolog of NCBI NO: 34909710 NR Description: putative Tub family protein
  misc_feature (281)..(379): Homolog of NCBI NO: 30690823 NR Description: F-box containing tubby family protein
  misc_feature (17)..(245): Homolog of NCBI NO: 30690823 NR Description: F-box containing tubby family protein
  misc_feature (44)..(106): Homolog of NCBI NO: 34911070 NR Description: putative tubby-like protein
  misc_feature (107)..(379): Homolog of NCBI NO: 34911070 NR Description: putative tubby-like protein
  misc_feature (1)..(379): Homolog of NCBI NO: 18404413 NR Description: F-box containing tubby family protein
  misc_feature (1)..(181): Homolog of NCBI NO: 7769867 NR Description: F12M16.22 [Arabidopsis thaliana]
  misc_feature (169)..(379): Homolog of NCBI NO: 7769867 NR Description: F12M16.22 [Arabidopsis thaliana]
MPLSRSLLSRRISNSFRFHQGETTTAPESESIPPPSNMAGSSSWSAMLPELLGEIIRRVEETEDRWPQRRDVVTCACVSKKWREITHDFARSSLNSGKITFPSCLKLPGPRDFSNQCLIKRNKKTSTFYLYLALTPSFTDKGKFLLAARRFRTGAYTEYIISLDADDFSQGSNAYVGKLRSDFLGTNFTVYDSQPPHNGAKPSNGKASRRFASKQISPQVPAGNFEVGHVSYKFNLLKSRGPRRMVSTLRCPSPSPSSSSAGLSSDQKPCDVTKIMKKPNKDGSSLTILKNKAPRWHEHLQCWCLNFHGRVTVASVKNFQLVATVDQSQPSGKGDEETVLLQFGKVGDDTFTMDYRQPLSAFQAFAICLTSFGTKLACE

SEQ ID NO: 22140 - protein, 342 aa, Arabidopsis thaliana
  peptide (1)..(342): Ceres Seq. ID no. 12324641
  misc_feature (71)..(144): Pfam Name: Tub family Pfam Description: Tub family
  misc_feature (244)..(342): Homolog of NCBI NO: 25409071 NR Description: probable Tub family protein [imported] -
  misc_feature (1)..(208): Homolog of NCBI NO: 25409071 NR Description: probable Tub family protein [imported] -
  misc_feature (2)..(340): Homolog of NCBI NO: 34909710 NR Description: putative Tub family protein
  misc_feature (244)..(342): Homolog of NCBI NO: 30690823 NR Description: F-box containing tubby family protein
  misc_feature (1)..(208): Homolog of NCBI NO: 30690823 NR Description: F-box containing tubby family protein
  misc_feature (7)..(69): Homolog of NCBI NO: 34911070 NR Description: putative tubby-like protein
  misc_feature (70)..(342): Homolog of NCBI NO: 34911070 NR Description: putative tubby-like protein
  misc_feature (1)..(342): Homolog of NCBI NO: 18404413 NR Description: F-box containing tubby family protein
  misc_feature (1)..(144): Homolog of NCBI NO: 7769867 NR Description: F12M16.22 [Arabidopsis thaliana]
  misc_feature (132)..(342): Homolog of NCBI NO: 7769867 NR Description: F12M16.22 [Arabidopsis thaliana]
MAGSSSWSAMLPELLGEIIRRVEETEDRWPQRRDVVTCACVSKKWREITHDFARSSLNSGKITFPSCLKLPGPRDFSNQCLIKRNKKTSTFYLYLALTPSFTDKGKFLLAARRFRTGAYTEYIISLDADDFSQGSNAYVGKLRSDFLGTNFTVYDSQPPHNGAKPSNGKASRRFASKQISPQVPAGNFEVGHVSYKFNLLKSRGPRRMVSTLRCPSPSPSSSSAGLSSDQKPCDVTKIMKKPNKDGSSLTILKNKAPRWHEHLQCWCLNFHGRVTVASVKNFQLVATVDQSQPSGKGDEETVLLQFGKVGDDTFTMDYRQPLSAFQAFAICLTSFGTKLACE

SEQ ID NO: 22141 - DNA, 1287 bp, Arabidopsis thaliana
  misc_feature (1)..(1287): Ceres Seq. ID no. 13588473
  misc_feature: MA Experiment ID: 20000185 Result: Down-regulated in Transcription
  misc_feature: MA Experiment 20000185 PARAMETER Experiment Name: At_Roots__P Parameter: Age (day) Value: 7 vs. 21
  misc_feature: MA Experiment 20000185 PARAMETER Experiment Name: At_Roots__P Parameter: Organism Value: A. thaliana
  misc_feature: MA Experiment 20000185 PARAMETER Experiment Name: At_Roots__P Parameter: Tissue Value: Roots vs. Whole Plant
  misc_feature: MA Experiment ID: 20000437 Result: Down-regulated in Transcription
  misc_feature: MA Experiment 20000437 PARAMETER Experiment Name: At_Drought_P Parameter: Age (day) Value: 8
  misc_feature: MA Experiment 20000437 PARAMETER Experiment Name: At_Drought_P Parameter: Organism Value: A. thaliana
  misc_feature: MA Experiment 20000437 PARAMETER Experiment Name: At_Drought_P Parameter: Plant Line Value: WS
  misc_feature: MA Experiment 20000437 PARAMETER Experiment Name: At_Drought_P Parameter: Timepoint (hr) Value: 24
  misc_feature: MA Experiment 20000437 PARAMETER Experiment Name: At_Drought_P Parameter: Tissue Value: Whole Plant
  misc_feature: MA Experiment 20000437 PARAMETER Experiment Name: At_Drought_P Parameter: Treatment Value: Drought vs. No Drought
  misc_feature: MA Experiment ID: 20000439 Result: Down-regulated in Transcription
  misc_feature: MA Experiment 20000439 PARAMETER Experiment Name: At_Roots__P Parameter: Age (day) Value: 14 vs. 21
  misc_feature: MA Experiment 20000439 PARAMETER Experiment Name: At_Roots__P Parameter: Organism Value: A. thaliana
  misc_feature: MA Experiment 20000439 PARAMETER Experiment Name: At_Roots__P Parameter: Tissue Value: Roots vs. Whole Plant
  misc_feature: MA Experiment ID: 20001905 Result: Down-regulated in Transcription
  misc_feature: MA Experiment 20001905 PARAMETER Experiment Name: At_Drought_Reproduction_P Parameter: Age (day) Value: 40
  misc_feature: MA Experiment 20001905 PARAMETER Experiment Name: At_Drought_Reproduction_P Parameter: Organism Value: A. thaliana
  misc_feature: MA Experiment 20001905 PARAMETER Experiment Name: At_Drought_Reproduction_P Parameter: Plant Line Value: WS
  misc_feature: MA Experiment 20001905 PARAMETER Experiment Name: At_Drought_Reproduction_P Parameter: Timepoint (day) Value: 10
  misc_feature: MA Experiment 20001905 PARAMETER Experiment Name: At_Drought_Reproduction_P Parameter: Tissue Value: Rosettes
  misc_feature: MA Experiment 20001905 PARAMETER Experiment Name: At_Drought_Reproduction_P Parameter: Treatment Value: Drought vs. No Drought
atggctgcttgcgctactcactcctctctcatgctagcatacgccgccgcatccactcgttcccaggaccttacccctactccatctcttttctcttttgccagctccagacccaaccacttgagcttcccgcttcttctccttgggggttccagggaccggagatgtgctgctattgacagagcttccaaccacaagtttattgtctccgccgtggccgctgaggctgacctcgacacggaggaggacctggagcagaccgccaccgccgtccttgatccgcccaagcctaagaaaggaaaagccgctttggttctcaagagagatagaacaaggtctaagaggtttttggaaatccaaaagctaagggaaaccaaaaaggagtatgatgtcaacactgctatctctttgcttaaacaaactgccaacacaaggtttgttgagtctgttgaagcccatttccgtctcaacatcgatcctaagtacaatgaccagcagctgcgtgcaacggtgagcctgcctaagggaactggccagactgttatagtcgctgttcttgcacaaggtgagaaggttgatgaagccaaaagtgcaggggcagatattgtgggcagtgatgatttaatcgaacagattaaaggaggcttcatggagtttgacaagctgattgcatccccggatatgatggtcaaggttgctggcctgggaaagattcttggaccacgggggctcatgccaaatcccaaggctggtacagtcacagcgaacattccccaggctattgaagagttcaagaaggggaaagttgaattcagagcagacaaaactgggattgttcacattccatttgggaaagttaattttacagaggaagaccttctcataaacttccttgcagcagtgaaatcggtggagacaaacaagccaaagggagctaaaggagtgtactggaaaagcgctcacatatgctcgtcaatggggccttccatcaagttgaacataagagagatgatagacttcaagcctcccactgcgaactaatcgacaacgccatttgtaaatggggtccttttgggagacgggcaatgccagtgtagacagagaagagaaacaccaagtctagtctgttagtaatcttttcacgcctcactgctttgtatcactttgatggccatttgcttcttgtcgttatttatttactattgcctattaaaatttggcaaggggctgtacatgtcaggacgcagaactctttagtactctctaaaagaaaagaccttacattga

SEQ ID NO: 22142 - protein, 346 aa, Arabidopsis thaliana
  peptide (1)..(346): Ceres Seq. ID no. 13588474
  misc_feature (125)..(329): Pfam Name: Ribosomal protein L1p/L10e family Pfam Description: Ribosomal protein L1p/L10e family
  misc_feature (125)..(329): Pfam Name: Ribosomal protein L1p/L10e family Pfam Description: Ribosomal protein L1p/L10e family
  misc_feature (113)..(341): Homolog of NCBI NO: 33239681 NR Description: Ribosomal protein L1
  misc_feature (113)..(341): Homolog of NCBI NO: 37521169 NR Description: 50S ribosomal protein L1 [Gloeobacter violaceus]
  misc_feature (113)..(341): Homolog of NCBI NO: 16330010 NR Description: 50S ribosomal protein L1 [Synechocystis sp. PCC
  misc_feature (113)..(339): Homolog of NCBI NO: 11467612 NR Description: ribosomal protein L1 [Guillardia theta]
  misc_feature (113)..(341): Homolog of NCBI NO: 17232793 NR Description: 50S ribosomal protein L1 [Nostoc sp. PCC 7120]
  misc_feature (113)..(341): Homolog of NCBI NO: 33239681 NR Description: Ribosomal protein L1
  misc_feature (113)..(341): Homolog of NCBI NO: 16330010 NR Description: 50S ribosomal protein L1 [Synechocystis sp. PCC
  misc_feature (113)..(341): Homolog of NCBI NO: 17232793 NR Description: 50S ribosomal protein L1 [Nostoc sp. PCC 7120]
  misc_feature (1)..(346): Homolog of NCBI NO: 15229443 NR Description: ribosomal protein L1p family [Arabidopsis
  misc_feature (1)..(346): Homolog of NCBI NO: 25456457 NR Description: ribosomal protein L1 protein [imported] -
  misc_feature (3)..(344): Homolog of NCBI NO: 25453504 NR Description: ribosomal protein L1 [imported] - spinach
  misc_feature (110)..(341): Homolog of NCBI NO: 22297840 NR Description: 50S ribosomal protein L1 [Thermosynechococcus
  misc_feature (89)..(264): Homolog of NCBI NO: 1350625 NR Description: 50S RIBOSOMAL PROTEIN L1, CHLOROPLAST PRECURSOR
  misc_feature (113)..(339): Homolog of NCBI NO: 11467612 NR Description: ribosomal protein L1 [Guillardia theta]
  misc_feature (113)..(341): Homolog of NCBI NO: 37521169 NR Description: 50S ribosomal protein L1 [Gloeobacter violaceus]
  misc_feature (89)..(264): Homolog of NCBI NO: 1350625 NR Description: 50S RIBOSOMAL PROTEIN L1, CHLOROPLAST PRECURSOR
  misc_feature (110)..(341): Homolog of NCBI NO: 22297840 NR Description: 50S ribosomal protein L1 [Thermosynechococcus
  misc_feature (3)..(344): Homolog of NCBI NO: 25453504 NR Description: ribosomal protein L1 [imported] - spinach
  misc_feature (1)..(346): Homolog of NCBI NO: 25456457 NR Description: ribosomal protein L1 protein [imported] -
  misc_feature (1)..(346): Homolog of NCBI NO: 15229443 NR Description: ribosomal protein L1p family [Arabidopsis
MAACATHSSLMLAYAAASTRSQDLTPTPSLFSFASSRPNHLSFPLLLLGGSRDRRCAAIDRASNHKFIVSAVAAEADLDTEEDLEQTATAVLDPPKPKKGKAALVLKRDRTRSKRFLEIQKLRETKKEYDVNTAISLLKQTANTRFVESVEAHFRLNIDPKYNDQQLRATVSLPKGTGQTVIVAVLAQGEKVDEAKSAGADIVGSDDLIEQIKGGFMEFDKLIASPDMMVKVAGLGKILGPRGLMPNPKAGTVTANIPQAIEEFKKGKVEFRADKTGIVHIPFGKVNFTEEDLLINFLAAVKSVETNKPKGAKGVYWKSAHICSSMGPSIKLNIREMIDFKPPTAN

SEQ ID NO: 22143 - protein, 336 aa, Arabidopsis thaliana
  peptide (1)..(336): Ceres Seq. ID no. 13588475
  misc_feature (115)..(319): Pfam Name: Ribosomal protein L1p/L10e family Pfam Description: Ribosomal protein L1p/L10e family
  misc_feature (115)..(319): Pfam Name: Ribosomal protein L1p/L10e family Pfam Description: Ribosomal protein L1p/L10e family
  misc_feature (103)..(331): Homolog of NCBI NO: 33239681 NR Description: Ribosomal protein L1
  misc_feature (103)..(331): Homolog of NCBI NO: 37521169 NR Description: 50S ribosomal protein L1 [Gloeobacter violaceus]
  misc_feature (103)..(331): Homolog of NCBI NO: 16330010 NR Description: 50S ribosomal protein L1 [Synechocystis sp. PCC
  misc_feature (103)..(329): Homolog of NCBI NO: 11467612 NR Description: ribosomal protein L1 [Guillardia theta]
  misc_feature (103)..(331): Homolog of NCBI NO: 17232793 NR Description: 50S ribosomal protein L1 [Nostoc sp. PCC 7120]
  misc_feature (103)..(331): Homolog of NCBI NO: 33239681 NR Description: Ribosomal protein L1
  misc_feature (103)..(331): Homolog of NCBI NO: 16330010 NR Description: 50S ribosomal protein L1 [Synechocystis sp. PCC
  misc_feature (103)..(331): Homolog of NCBI NO: 17232793 NR Description: 50S ribosomal protein L1 [Nostoc sp. PCC 7120]
  misc_feature (1)..(336): Homolog of NCBI NO: 15229443 NR Description: ribosomal protein L1p family [Arabidopsis
  misc_feature (1)..(336): Homolog of NCBI NO: 25456457 NR Description: ribosomal protein L1 protein [imported] -
  misc_feature (1)..(334): Homolog of NCBI NO: 25453504 NR Description: ribosomal protein L1 [imported] - spinach
  misc_feature (100)..(331): Homolog of NCBI NO: 22297840 NR Description: 50S ribosomal protein L1 [Thermosynechococcus
  misc_feature (79)..(254): Homolog of NCBI NO: 1350625 NR Description: 50S RIBOSOMAL PROTEIN L1, CHLOROPLAST PRECURSOR
  misc_feature (103)..(329): Homolog of NCBI NO: 11467612 NR Description: ribosomal protein L1 [Guillardia theta]
  misc_feature (103)..(331): Homolog of NCBI NO: 37521169 NR Description: 50S ribosomal protein L1 [Gloeobacter violaceus]
  misc_feature (79)..(254): Homolog of NCBI NO: 1350625 NR Description: 50S RIBOSOMAL PROTEIN L1, CHLOROPLAST PRECURSOR
  misc_feature (100)..(331): Homolog of NCBI NO: 22297840 NR Description: 50S ribosomal protein L1 [Thermosynechococcus
  misc_feature (1)..(334): Homolog of NCBI NO: 25453504 NR Description: ribosomal protein L1 [imported] - spinach
  misc_feature (1)..(336): Homolog of NCBI NO: 25456457 NR Description: ribosomal protein L1 protein [imported] -
  misc_feature (1)..(336): Homolog of NCBI NO: 15229443 NR Description: ribosomal protein L1p family [Arabidopsis
MLAYAAASTRSQDLTPTPSLFSFASSRPNHLSFPLLLLGGSRDRRCAAIDRASNHKFIVSAVAAEADLDTEEDLEQTATAVLDPPKPKKGKAALVLKRDRTRSKRFLEIQKLRETKKEYDVNTAISLLKQTANTRFVESVEAHFRLNIDPKYNDQQLRATVSLPKGTGQTVIVAVLAQGEKVDEAKSAGADIVGSDDLIEQIKGGFMEFDKLIASPDMMVKVAGLGKILGPRGLMPNPKAGTVTANIPQAIEEFKKGKVEFRADKTGIVHIPFGKVNFTEEDLLINFLAAVKSVETNKPKGAKGVYWKSAHICSSMGPSIKLNIREMIDFKPPTAN

SEQ ID NO: 22144 - DNA, 2009 bp, Arabidopsis thaliana
  misc_feature (1)..(2009): Ceres Seq. ID no. 12334740
  misc_feature: MA Experiment ID: 108461 Result: Up-regulated in Transcription
  misc_feature: MA Experiment 108461 PARAMETER Experiment Name: At_Germinating_Seeds_cDNA_P Parameter: Age (day) Value: 1 vs. 0
  misc_feature: MA Experiment 108461 PARAMETER Experiment Name: At_Germinating_Seeds_cDNA_P Parameter: Tissue Value: Germinating Seeds
  misc_feature: MA Experiment ID: 108576 Result: Down-regulated in Transcription
  misc_feature: MA Experiment 108576 PARAMETER Experiment Name: At_42deg_Heat_cDNA_P Parameter: Temperature (deg C) Value: 42 vs. 22
  misc_feature: MA Experiment 108576 PARAMETER Experiment Name: At_42deg_Heat_cDNA_P Parameter: Timepoint (hr) Value: 1
  misc_feature: MA Experiment 108576 PARAMETER Experiment Name: At_42deg_Heat_cDNA_P Parameter: Tissue Value: Aerial
  misc_feature: MA Experiment ID: 20000171 Result: Down-regulated in Transcription
  misc_feature: MA Experiment 20000171 PARAMETER Experiment Name: At_42deg_Heat_P Parameter: Age (day) Value: 14
  misc_feature: MA Experiment 20000171 PARAMETER Experiment Name: At_42deg_Heat_P Parameter: Organism Value: A. thaliana
  misc_feature: MA Experiment 20000171 PARAMETER Experiment Name: At_42deg_Heat_P Parameter: Plant Line Value: WS
  misc_feature: MA Experiment 20000171 PARAMETER Experiment Name: At_42deg_Heat_P Parameter: Temperature (deg C) Value: 42 vs. 22
  misc_feature: MA Experiment 20000171 PARAMETER Experiment Name: At_42deg_Heat_P Parameter: Timepoint (hr) Value: 1
  misc_feature: MA Experiment 20000171 PARAMETER Experiment Name: At_42deg_Heat_P Parameter: Tissue Value: Aerial
  misc_feature: MA Experiment ID: 20000173 Result: Down-regulated in Transcription
  misc_feature: MA Experiment 20000173 PARAMETER Experiment Name: At_42deg_Heat_P Parameter: Age (day) Value: 14
  misc_feature: MA Experiment 20000173 PARAMETER Experiment Name: At_42deg_Heat_P Parameter: Organism Value: A. thaliana
  misc_feature: MA Experiment 20000173 PARAMETER Experiment Name: At_42deg_Heat_P Parameter: Plant Line Value: WS
  misc_feature: MA Experiment 20000173 PARAMETER Experiment Name: At_42deg_Heat_P Parameter: Temperature (deg C) Value: 42 vs. 22
  misc_feature: MA Experiment 20000173 PARAMETER Experiment Name: At_42deg_Heat_P Parameter: Timepoint (hr) Value: 6
  misc_feature: MA Experiment 20000173 PARAMETER Experiment Name: At_42deg_Heat_P Parameter: Tissue Value: Aerial
  misc_feature: MA Experiment ID: 20000179 Result: Up-regulated in Transcription
  misc_feature: MA Experiment 20000179 PARAMETER Experiment Name: At_Germinating_Seeds_P Parameter: Age (hr) Value: 6 vs. 0
  misc_feature: MA Experiment 20000179 PARAMETER Experiment Name: At_Germinating_Seeds_P Parameter: Tissue Value: Germinating Seeds
  misc_feature: MA Experiment ID: 20000180 Result: Up-regulated in Transcription
  misc_feature: MA Experiment 20000180 PARAMETER Experiment Name: At_Germinating_Seeds_P Parameter: Age (hr) Value: 24 vs. 0
  misc_feature: MA Experiment 20000180 PARAMETER Experiment Name: At_Germinating_Seeds_P Parameter: Tissue Value: Germinating Seeds
  misc_feature: MA Experiment ID: 20000185 Result: Up-regulated in Transcription
  misc_feature: MA Experiment 20000185 PARAMETER Experiment Name: At_Roots__P Parameter: Age (day) Value: 7 vs. 21
  misc_feature: MA Experiment 20000185 PARAMETER Experiment Name: At_Roots__P Parameter: Organism Value: A. thaliana
  misc_feature: MA Experiment 20000185 PARAMETER Experiment Name: At_Roots__P Parameter: Tissue Value: Roots vs. Whole Plant
  misc_feature: MA Experiment ID: 20000234 Result: Up-regulated in Transcription
  misc_feature: MA Experiment 20000234 PARAMETER Experiment Name: At_Siliques_P Parameter: Age (day) Value: 21
  misc_feature: MA Experiment 20000234 PARAMETER Experiment Name: At_Siliques_P Parameter: Organism Value: A. thaliana
  misc_feature: MA Experiment 20000234 PARAMETER Experiment Name: At_Siliques_P Parameter: Plant Line Value: WS
  misc_feature: MA Experiment 20000234 PARAMETER Experiment Name: At_Siliques_P Parameter: Tissue Value: Less Than 5mm Siliques vs. Whole Plant
  misc_feature: MA Experiment ID: 20000235 Result: Up-regulated in Transcription
  misc_feature: MA Experiment 20000235 PARAMETER Experiment Name: At_Siliques_P Parameter: Age (day) Value: 21
  misc_feature: MA Experiment 20000235 PARAMETER Experiment Name: At_Siliques_P Parameter: Organism Value: A. thaliana
  misc_feature: MA Experiment 20000235 PARAMETER Experiment Name: At_Siliques_P Parameter: Plant Line Value: WS
  misc_feature: MA Experiment 20000235 PARAMETER Experiment Name: At_Siliques_P Parameter: Tissue Value: 5-10mm Siliques vs. Whole Plant
  misc_feature: MA Experiment ID: 20000265 Result: Up-regulated in Transcription
  misc_feature: MA Experiment 20000265 PARAMETER Experiment Name: At_Open_Flower_P Parameter: Age (day) Value: 21
  misc_feature: MA Experiment 20000265 PARAMETER Experiment Name: At_Open_Flower_P Parameter: Plant Line Value: WS
  misc_feature: MA Experiment 20000265 PARAMETER Experiment Name: At_Open_Flower_P Parameter: Tissue Value: Closed Flower vs. Whole Plant
  misc_feature: MA Experiment ID: 20000286 Result: Up-regulated in Transcription
  misc_feature: MA Experiment 20000286 PARAMETER Experiment Name: At_Open_Flower_P Parameter: Age (day) Value: 21
  misc_feature: MA Experiment 20000286 PARAMETER Experiment Name: At_Open_Flower_P Parameter: Plant Line Value: WS
  misc_feature: MA Experiment 20000286 PARAMETER Experiment Name: At_Open_Flower_P Parameter: Tissue Value: Half Open vs. Whole Plant
  misc_feature: MA Experiment ID: 20000439 Result: Up-regulated in Transcription
  misc_feature: MA Experiment 20000439 PARAMETER Experiment Name: At_Roots__P Parameter: Age (day) Value: 14 vs. 21
  misc_feature: MA Experiment 20000439 PARAMETER Experiment Name: At_Roots__P Parameter: Organism Value: A. thaliana
  misc_feature: MA Experiment 20000439 PARAMETER Experiment Name: At_Roots__P Parameter: Tissue Value: Roots vs. Whole Plant
  misc_feature: MA Experiment ID: 20001451 Result: Down-regulated in Transcription
  misc_feature: MA Experiment 20001451 PARAMETER Experiment Name: At_Far-red-induction_P Parameter: Age (day) Value: 7
  misc_feature: MA Experiment 20001451 PARAMETER Experiment Name: At_Far-red-induction_P Parameter: Light Value: Far-red vs. White
  misc_feature: MA Experiment 20001451 PARAMETER Experiment Name: At_Far-red-induction_P Parameter: Organism Value: A. thaliana
  misc_feature: MA Experiment 20001451 PARAMETER Experiment Name: At_Far-red-induction_P Parameter: Plant Line Value: Columbia
  misc_feature: MA Experiment 20001451 PARAMETER Experiment Name: At_Far-red-induction_P Parameter: Timepoint (hr) Value: 24
  misc_feature: MA Experiment 20001451 PARAMETER Experiment Name: At_Far-red-induction_P Parameter: Tissue Value: Whole Plant
aaaagcataatgacggaagagctcatcgaccaatcaccaccacctgacccagacccgattcaaaattcgaatttaataatccacccaagacgtgttcctttcgagcacggccttcttccgatccagaagctcgtttttaccgacccgattcaaactctagctccgatcaagcaaaagttagcttctttggcgacgaatcatcgcgtcggatctgctgccatttccgatgcactctcgatctccgatgaccatgcgcgcctcgttctcgaaactctctcttcggtgctccattgcgagactgacccattggttttggccaaacctgaggaagttgattccgtgggagctgatttgagggatctgatattgtttctctacattcaatcgtataagaagttattgcctaggacgcataaagactctgcttctgtggctgatgtttggccttcgacttctgcttttgatggatacttgtcggcattatctccaattcagcttgttcgtagcaacagccgtcggtttatgccatcaccgacagatgaagaagctcatcaattatcgtatctgcaaaagcacattgcaaatattatttctctccttgcagagcctgtggagggacaaggagatgattctttggtcctgtctatggagagtttggagcacattgggtttcttgttcattatggtgataagggatttgatgtaccttctttaagccaagctactcctttttttgcgaattctgatcctgatatgcccgctgtccccgttcctgcttcccaagtgaatgattggcttctcaaagacatagcttccgccttagaaagcatttctaacagaatctctgggaaagaaaatggggcatctaatgcctctgatcagaatgctgcaatggctgattctagtgtagctcttaataaagtttcatctaacgacagaggtccatgtattattgagggagtctctaagacctcacttttcaagcaggcttctgatcttaagggtagatcagtgaaggttgccaattgccatgattctgttatttatctgttagcgccattgagatatgcaactgtgtatgggtgttctgattctactatcgttctgggagctgctggcaaggcagtaaaagttgagcattgtgagagagttcatgtgattgtagctaccaaacgaatttgcatcgccaattgccgtgaatgtgtgttctttttgggagtcaatcagcaacctcttatagttggtgataaccacaaactacaggttgctccatataatacattttactcacacttggaggagcacataaccgaggtaggaattcagccaactatcaacaaatggaacgaatccttggcgctcggagcaattgatccgcatgactcactatcacatccgactggtgcctctgataaacaagctgaaccggcttcttgtgtggaccctgaccagttcactacctttttgatcccaaactggtttgcgggtgaggcgattggttccacgaaagacaatccatttccattgccagatgcatataaggcagtgcagcagacaaaccttaagaacttagaggaaacaagacaatccttgagagaaacacctctcgaagaaaaccgaaaacgagaactcactacagcgttccacatgtatttcaaagactggctatacgcgacgggaaatattcggcaactttactgcctacaaggcgattaagaccaatggcgattgaaaatgtcagagtcactgtagagttctcttgatccgttccttctcagagatttgctagcacgtttgacatcagaatttaactgcacagcacgctctctaactcctaaagctctgtttttttgtgtgtaggtttctctctgcttttatcgtatttattagtcttaaatatccacgtttttgtccttgaaaaacattaagccatcttgtcttgttgttgatttctttcaattgttataacaacttttctcaataccatatatataaatcttttagtaacc

SEQ ID NO: 22145 - protein, 571 aa, Arabidopsis thaliana
  peptide (1)..(571): Ceres Seq. ID no. 12334741
  misc_feature (74)..(454): Homolog of NCBI NO: 8922517 NR Description: hypothetical protein FLJ10560 [Homo sapiens]
  misc_feature (482)..(565): Homolog of NCBI NO: 34869310 NR Description: similar to hypothetical protein FLJ10560 [Rattus
  misc_feature (74)..(455): Homolog of NCBI NO: 34869310 NR Description: similar to hypothetical protein FLJ10560 [Rattus
  misc_feature (4)..(293): Homolog of NCBI NO: 11280529 NR Description: hypothetical protein T10K17.100 - Arabidopsis
  misc_feature (170)..(571): Homolog of NCBI NO: 11280529 NR Description: hypothetical protein T10K17.100 - Arabidopsis
  misc_feature (4)..(571): Homolog of NCBI NO: 18410836 NR Description: putative protein
  misc_feature (4)..(114): Homolog of NCBI NO: 30688947 NR Description: expressed protein [Arabidopsis thaliana]
  misc_feature (166)..(571): Homolog of NCBI NO: 30688947 NR Description: expressed protein [Arabidopsis thaliana]
  misc_feature (4)..(114): Homolog of NCBI NO: 7452467 NR Description: hypothetical protein At2g42230 [imported] -
  misc_feature (166)..(557): Homolog of NCBI NO: 7452467 NR Description: hypothetical protein At2g42230 [imported] -
KSIMTEELIDQSPPPDPDPIQNSNLIIHPRRVPFEHGLLPIQKLVFTDPIQTLAPIKQKLASLATNHRVGSAAISDALSISDDHARLVLETLSSVLHCETDPLVLAKPEEVDSVGADLRDLILFLYIQSYKKLLPRTHKDSASVADVWPSTSAFDGYLSALSPIQLVRSNSRRFMPSPTDEEAHQLSYLQKHIANIISLLAEPVEGQGDDSLVLSMESLEHIGFLVHYGDKGFDVPSLSQATPFFANSDPDMPAVPVPASQVNDWLLKDIASALESISNRISGKENGASNASDQNAAMADSSVALNKVSSNDRGPCIIEGVSKTSLFKQASDLKGRSVKVANCHDSVIYLLAPLRYATVYGCSDSTIVLGAAGKAVKVEHCERVHVIVATKRICIANCRECVFFLGVNQQPLIVGDNHKLQVAPYNTFYSHLEEHITEVGIQPTINKWNESLALGAIDPHDSLSHPTGASDKQAEPASCVDPDQFTTFLIPNWFAGEAIGSTKDNPFPLPDAYKAVQQTNLKNLEETRQSLRETPLEENRKRELTTAFHMYFKDWLYATGNIRQLYCLQGD

SEQ ID NO: 22146 - protein, 568 aa, Arabidopsis thaliana
  peptide (1)..(568): Ceres Seq. ID no. 12334742
  misc_feature (71)..(451): Homolog of NCBI NO: 8922517 NR Description: hypothetical protein FLJ10560 [Homo sapiens]
  misc_feature (479)..(562): Homolog of NCBI NO: 34869310 NR Description: similar to hypothetical protein FLJ10560 [Rattus
  misc_feature (71)..(452): Homolog of NCBI NO: 34869310 NR Description: similar to hypothetical protein FLJ10560 [Rattus
  misc_feature (1)..(290): Homolog of NCBI NO: 11280529 NR Description: hypothetical protein T10K17.100 - Arabidopsis
  misc_feature (167)..(568): Homolog of NCBI NO: 11280529 NR Description: hypothetical protein T10K17.100 - Arabidopsis
  misc_feature (1)..(568): Homolog of NCBI NO: 18410836 NR Description: putative protein
  misc_feature (1)..(111): Homolog of NCBI NO: 30688947 NR Description: expressed protein [Arabidopsis thaliana]
  misc_feature (163)..(568): Homolog of NCBI NO: 30688947 NR Description: expressed protein [Arabidopsis thaliana]
  misc_feature (1)..(111): Homolog of NCBI NO: 7452467 NR Description: hypothetical protein At2g42230 [imported] -
  misc_feature (163)..(554): Homolog of NCBI NO: 7452467 NR Description: hypothetical protein At2g42230 [imported] -
MTEELIDQSPPPDPDPIQNSNLIIHPRRVPFEHGLLPIQKLVFTDPIQTLAPIKQKLASLATNHRVGSAAISDALSISDDHARLVLETLSSVLHCETDPLVLAKPEEVDSVGADLRDLILFLYIQSYKKLLPRTHKDSASVADVWPSTSAFDGYLSALSPIQLVRSNSRRFMPSPTDEEAHQLSYLQKHIANIISLLAEPVEGQGDDSLVLSMESLEHIGFLVHYGDKGFDVPSLSQATPFFANSDPDMPAVPVPASQVNDWLLKDIASALESISNRISGKENGASNASDQNAAMADSSVALNKVSSNDRGPCIIEGVSKTSLFKQASDLKGRSVKVANCHDSVIYLLAPLRYATVYGCSDSTIVLGAAGKAVKVEHCERVHVIVATKRICIANCRECVFFLGVNQQPLIVGDNHKLQVAPYNTFYSHLEEHITEVGIQPTINKWNESLALGAIDPHDSLSHPTGASDKQAEPASCVDPDQFTTFLIPNWFAGEAIGSTKDNPFPLPDAYKAVQQTNLKNLEETRQSLRETPLEENRKRELTTAFHMYFKDWLYATGNIRQLYCLQGD

SEQ ID NO: 22147 - protein, 397 aa, Arabidopsis thaliana
  peptide (1)..(397): Ceres Seq. ID no. 12334743
  misc_feature (144)..(384): Homolog of NCBI NO: 29250580 NR Description: GLP_254_3153_1495 [Giardia lamblia ATCC 50803]
  misc_feature (1)..(280): Homolog of NCBI NO: 8922517 NR Description: hypothetical protein FLJ10560 [Homo sapiens]
  misc_feature (308)..(391): Homolog of NCBI NO: 34869310 NR Description: similar to hypothetical protein FLJ10560 [Rattus
  misc_feature (1)..(281): Homolog of NCBI NO: 34869310 NR Description: similar to hypothetical protein FLJ10560 [Rattus
  misc_feature (1)..(119): Homolog of NCBI NO: 11280529 NR Description: hypothetical protein T10K17.100 - Arabidopsis
  misc_feature (1)..(397): Homolog of NCBI NO: 11280529 NR Description: hypothetical protein T10K17.100 - Arabidopsis
  misc_feature (1)..(397): Homolog of NCBI NO: 18410836 NR Description: putative protein
  misc_feature (1)..(397): Homolog of NCBI NO: 30688947 NR Description: expressed protein [Arabidopsis thaliana]
  misc_feature (1)..(383): Homolog of NCBI NO: 7452467 NR Description: hypothetical protein At2g42230 [imported] -
MPSPTDEEAHQLSYLQKHIANIISLLAEPVEGQGDDSLVLSMESLEHIGFLVHYGDKGFDVPSLSQATPFFANSDPDMPAVPVPASQVNDWLLKDIASALESISNRISGKENGASNASDQNAAMADSSVALNKVSSNDRGPCIIEGVSKTSLFKQASDLKGRSVKVANCHDSVIYLLAPLRYATVYGCSDSTIVLGAAGKAVKVEHCERVHVIVATKRICIANCRECVFFLGVNQQPLIVGDNHKLQVAPYNTFYSHLEEHITEVGIQPTINKWNESLALGAIDPHDSLSHPTGASDKQAEPASCVDPDQFTTFLIPNWFAGEAIGSTKDNPFPLPDAYKAVQQTNLKNLEETRQSLRETPLEENRKRELTTAFHMYFKDWLYATGNIRQLYCLQGD

SEQ ID NO: 22148 - DNA, 844 bp, Arabidopsis thaliana
  misc_feature (1)..(844): Ceres Seq. ID no. 12334877
  misc_feature: MA Experiment ID: 108463 Result: Up-regulated in Transcription
  misc_feature: MA Experiment 108463 PARAMETER Experiment Name: At_Germinating_Seeds_cDNA_P Parameter: Age (day) Value: 3 vs. 0
  misc_feature: MA Experiment 108463 PARAMETER Experiment Name: At_Germinating_Seeds_cDNA_P Parameter: Tissue Value: Germinating Seeds
  misc_feature: MA Experiment ID: 108488 Result: Up-regulated in Transcription
  misc_feature: MA Experiment ID: 108572 Result: Up-regulated in Transcription
  misc_feature: MA Experiment 108572 PARAMETER Experiment Name: At_Drought_cDNA_P Parameter: Timepoint (hr) Value: 1
  misc_feature: MA Experiment 108572 PARAMETER Experiment Name: At_Drought_cDNA_P Parameter: Tissue Value: Aerial
  misc_feature: MA Experiment 108572 PARAMETER Experiment Name: At_Drought_cDNA_P Parameter: Treatment Value: Drought vs. No Drought
  misc_feature: MA Experiment ID: 108573 Result: Up-regulated in Transcription
  misc_feature: MA Experiment 108573 PARAMETER Experiment Name: At_Drought_cDNA_P Parameter: Timepoint (hr) Value: 6
  misc_feature: MA Experiment 108573 PARAMETER Experiment Name: At_Drought_cDNA_P Parameter: Tissue Value: Aerial
  misc_feature: MA Experiment 108573 PARAMETER Experiment Name: At_Drought_cDNA_P Parameter: Treatment Value: Drought vs. No Drought
  misc_feature: MA Experiment ID: 108574 Result: Down-regulated in Transcription
  misc_feature: MA Experiment 108574 PARAMETER Experiment Name: At_Wounding__cDNA_P Parameter: Timepoint (hr) Value: 1
  misc_feature: MA Experiment 108574 PARAMETER Experiment Name: At_Wounding__cDNA_P Parameter: Tissue Value: Aerial
  misc_feature: MA Experiment 108574 PARAMETER Experiment Name: At_Wounding__cDNA_P Parameter: Treatment Value: Wounding vs. No Wounding
  misc_feature: MA Experiment ID: 108576 Result: Down-regulated in Transcription
  misc_feature: MA Experiment 108576 PARAMETER Experiment Name: At_42deg_Heat_cDNA_P Parameter: Temperature (deg C) Value: 42 vs. 22
  misc_feature: MA Experiment 108576 PARAMETER Experiment Name: At_42deg_Heat_cDNA_P Parameter: Timepoint (hr) Value: 1
  misc_feature: MA Experiment 108576 PARAMETER Experiment Name: At_42deg_Heat_cDNA_P Parameter: Tissue Value: Aerial
  misc_feature: MA Experiment ID: 108579 Result: Down-regulated in Transcription
  misc_feature: MA Experiment 108579 PARAMETER Experiment Name: At_4deg_Cold_cDNA_P Parameter: Temperature (deg C) Value: 4 vs. 22
  misc_feature: MA Experiment 108579 PARAMETER Experiment Name: At_4deg_Cold_cDNA_P Parameter: Timepoint (hr) Value: 6
  misc_feature: MA Experiment 108579 PARAMETER Experiment Name: At_4deg_Cold_cDNA_P Parameter: Tissue Value: Aerial
  misc_feature: MA Experiment ID: 108595 Result: Down-regulated in Transcription
  misc_feature: MA Experiment 108595 PARAMETER Experiment Name: At_Ler-pi_Ovule_cDNA_P Parameter: Plant Line Value: null
  misc_feature: MA Experiment ID: 20000069 Result: Up-regulated in Transcription
  misc_feature: MA Experiment 20000069 PARAMETER Experiment Name: At_100uM_ABA_Mutants_cDNA_P Parameter: Plant Line Value: CS23
  misc_feature: MA Experiment 20000069 PARAMETER Experiment Name: At_100uM_ABA_Mutants_cDNA_P Parameter: Timepoint (hr) Value: 6
  misc_feature: MA Experiment 20000069 PARAMETER Experiment Name: At_100uM_ABA_Mutants_cDNA_P Parameter: Tissue Value: Aerial
  misc_feature: MA Experiment 20000069 PARAMETER Experiment Name: At_100uM_ABA_Mutants_cDNA_P Parameter: Treatment Value: 100uM ABA vs. No Treatment
  misc_feature: MA Experiment ID: 20000071 Result: Up-regulated in Transcription
  misc_feature: MA Experiment 20000071 PARAMETER Experiment Name: At_100uM_ABA_Mutants_cDNA_P Parameter: Plant Line Value: CS8104
  misc_feature: MA Experiment 20000071 PARAMETER Experiment Name: At_100uM_ABA_Mutants_cDNA_P Parameter: Timepoint (hr) Value: 6
  misc_feature: MA Experiment 20000071 PARAMETER Experiment Name: At_100uM_ABA_Mutants_cDNA_P Parameter: Tissue Value: Aerial
  misc_feature: MA Experiment 20000071 PARAMETER Experiment Name: At_100uM_ABA_Mutants_cDNA_P Parameter: Treatment Value: 100uM ABA vs. No Treatment
  misc_feature: MA Experiment ID: 20000072 Result: Up-regulated in Transcription
  misc_feature: MA Experiment 20000072 PARAMETER Experiment Name: At_100uM_ABA_Mutants_cDNA_P Parameter: Plant Line Value: CS8105
  misc_feature: MA Experiment 20000072 PARAMETER Experiment Name: At_100uM_ABA_Mutants_cDNA_P Parameter: Timepoint (hr) Value: 6
  misc_feature: MA Experiment 20000072 PARAMETER Experiment Name: At_100uM_ABA_Mutants_cDNA_P Parameter: Tissue Value: Aerial
  misc_feature: MA Experiment 20000072 PARAMETER Experiment Name: At_100uM_ABA_Mutants_cDNA_P Parameter: Treatment Value: 100uM ABA vs. No Treatment
  misc_feature: MA Experiment ID: 20000087 Result: Up-regulated in Transcription
  misc_feature: MA Experiment 20000087 PARAMETER Experiment Name: At_100uM_ABA_Mutants_cDNA_P Parameter: Plant Line Value: WS
  misc_feature: MA Experiment 20000087 PARAMETER Experiment Name: At_100uM_ABA_Mutants_cDNA_P Parameter: Timepoint (hr) Value: 6
  misc_feature: MA Experiment 20000087 PARAMETER Experiment Name: At_100uM_ABA_Mutants_cDNA_P Parameter: Tissue Value: Aerial
  misc_feature: MA Experiment 20000087 PARAMETER Experiment Name: At_100uM_ABA_Mutants_cDNA_P Parameter: Treatment Value: 100uM ABA vs. No Treatment
  misc_feature: MA Experiment ID: 20000088 Result: Up-regulated in Transcription
  misc_feature: MA Experiment 20000088 PARAMETER Experiment Name: At_100uM_ABA_Mutants_cDNA_P Parameter: Plant Line Value: Landsberg
  misc_feature: MA Experiment 20000088 PARAMETER Experiment Name: At_100uM_ABA_Mutants_cDNA_P Parameter: Timepoint (hr) Value: 6
  misc_feature: MA Experiment 20000088 PARAMETER Experiment Name: At_100uM_ABA_Mutants_cDNA_P Parameter: Tissue Value: Aerial
  misc_feature: MA Experiment 20000088 PARAMETER Experiment Name: At_100uM_ABA_Mutants_cDNA_P Parameter: Treatment Value: 100uM ABA vs. No Treatment
  misc_feature: MA Experiment ID: 20000089 Result: Up-regulated in Transcription
  misc_feature: MA Experiment ID: 20000090 Result: Up-regulated in Transcription
  misc_feature: MA Experiment ID: 20000111 Result: Down-regulated in Transcription
  misc_feature: MA Experiment 20000111 PARAMETER Experiment Name: At_42deg_Heat_cDNA_P Parameter: Temperature (deg C) Value: 42 vs. 22
  misc_feature: MA Experiment 20000111 PARAMETER Experiment Name: At_42deg_Heat_cDNA_P Parameter: Timepoint (hr) Value: 6
  misc_feature: MA Experiment 20000111 PARAMETER Experiment Name: At_42deg_Heat_cDNA_P Parameter: Tissue Value: Aerial
  misc_feature: MA Experiment ID: 20000112 Result: Down-regulated in Transcription
  misc_feature: MA Experiment 20000112 PARAMETER Experiment Name: At_42deg_Heat_cDNA_P Parameter: Temperature (deg C) Value: 42 vs. 22
  misc_feature: MA Experiment 20000112 PARAMETER Experiment Name: At_42deg_Heat_cDNA_P Parameter: Timepoint (hr) Value: 2
  misc_feature: MA Experiment 20000112 PARAMETER Experiment Name: At_42deg_Heat_cDNA_P Parameter: Tissue Value: Aerial
  misc_feature: MA Experiment ID: 20000113 Result: Down-regulated in Transcription
  misc_feature: MA Experiment 20000113 PARAMETER Experiment Name: At_42deg_Heat_cDNA_P Parameter: Temperature (deg C) Value: 42 vs. 22
  misc_feature: MA Experiment 20000113 PARAMETER Experiment Name: At_42deg_Heat_cDNA_P Parameter: Timepoint (hr) Value: 8
  misc_feature: MA Experiment 20000113 PARAMETER Experiment Name: At_42deg_Heat_cDNA_P Parameter: Tissue Value: Aerial
  misc_feature: MA Experiment ID: 20000117 Result: Up-regulated in Transcription
  misc_feature: MA Experiment 20000117 PARAMETER Experiment Name: At_100uM_ABA_Mutants_cDNA_P Parameter: Plant Line Value: Columbia
  misc_feature: MA Experiment 20000117 PARAMETER Experiment Name: At_100uM_ABA_Mutants_cDNA_P Parameter: Timepoint (hr) Value: 6
  misc_feature: MA Experiment 20000117 PARAMETER Experiment Name: At_100uM_ABA_Mutants_cDNA_P Parameter: Tissue Value: Aerial
  misc_feature: MA Experiment 20000117 PARAMETER Experiment Name: At_100uM_ABA_Mutants_cDNA_P Parameter: Treatment Value: 100uM ABA vs. No Treatment
  misc_feature: MA Experiment ID: 20000144 Result: Down-regulated in Transcription
  misc_feature: MA Experiment 20000144 PARAMETER Experiment Name: At_42deg_Heat_cDNA_P Parameter: Temperature (deg C) Value: 42 vs. 22
  misc_feature: MA Experiment 20000144 PARAMETER Experiment Name: At_42deg_Heat_cDNA_P Parameter: Timepoint (hr) Value: 1
  misc_feature: MA Experiment 20000144 PARAMETER Experiment Name: At_42deg_Heat_cDNA_P Parameter: Tissue Value: Aerial
  misc_feature: MA Experiment ID: 20000173 Result: Down-regulated in Transcription
  misc_feature: MA Experiment 20000173 PARAMETER Experiment Name: At_42deg_Heat_P Parameter: Age (day) Value: 14
  misc_feature: MA Experiment 20000173 PARAMETER Experiment Name: At_42deg_Heat_P Parameter: Organism Value: A. thaliana
  misc_feature: MA Experiment 20000173 PARAMETER Experiment Name: At_42deg_Heat_P Parameter: Plant Line Value: WS
  misc_feature: MA Experiment 20000173 PARAMETER Experiment Name: At_42deg_Heat_P Parameter: Temperature (deg C) Value: 42 vs. 22
  misc_feature: MA Experiment 20000173 PARAMETER Experiment Name: At_42deg_Heat_P Parameter: Timepoint (hr) Value: 6
  misc_feature: MA Experiment 20000173 PARAMETER Experiment Name: At_42deg_Heat_P Parameter: Tissue Value: Aerial
  misc_feature: MA Experiment ID: 20000180 Result: Up-regulated in Transcription
  misc_feature: MA Experiment 20000180 PARAMETER Experiment Name: At_Germinating_Seeds_P Parameter: Age (hr) Value: 24 vs. 0
  misc_feature: MA Experiment 20000180 PARAMETER Experiment Name: At_Germinating_Seeds_P Parameter: Tissue Value: Germinating Seeds
  misc_feature: MA Experiment ID: 20000185 Result: Down-regulated in Transcription
  misc_feature: MA Experiment 20000185 PARAMETER Experiment Name: At_Roots__P Parameter: Age (day) Value: 7 vs. 21
  misc_feature: MA Experiment 20000185 PARAMETER Experiment Name: At_Roots__P Parameter: Organism Value: A. thaliana
  misc_feature: MA Experiment 20000185 PARAMETER Experiment Name: At_Roots__P Parameter: Tissue Value: Roots vs. Whole Plant
  misc_feature: MA Experiment ID: 20000224 Result: Down-regulated in Transcription
  misc_feature: MA Experiment ID: 20000234 Result: Down-regulated in Transcription
  misc_feature: MA Experiment 20000234 PARAMETER Experiment Name: At_Siliques_P Parameter: Age (day) Value: 21
  misc_feature: MA Experiment 20000234 PARAMETER Experiment Name: At_Siliques_P Parameter: Organism Value: A. thaliana
  misc_feature: MA Experiment 20000234 PARAMETER Experiment Name: At_Siliques_P Parameter: Plant Line Value: WS
  misc_feature: MA Experiment 20000234 PARAMETER Experiment Name: At_Siliques_P Parameter: Tissue Value: Less Than 5mm Siliques vs. Whole Plant
  misc_feature: MA Experiment ID: 20000235 Result: Down-regulated in Transcription
  misc_feature: MA Experiment 20000235 PARAMETER Experiment Name: At_Siliques_P Parameter: Age (day) Value: 21
  misc_feature: MA Experiment 20000235 PARAMETER Experiment Name: At_Siliques_P Parameter: Organism Value: A. thaliana
  misc_feature: MA Experiment 20000235 PARAMETER Experiment Name: At_Siliques_P Parameter: Plant Line Value: WS
  misc_feature: MA Experiment 20000235 PARAMETER Experiment Name: At_Siliques_P Parameter: Tissue Value: 5-10mm Siliques vs. Whole Plant
  misc_feature: MA Experiment ID: 20000264 Result: Down-regulated in Transcription
  misc_feature: MA Experiment 20000264 PARAMETER Experiment Name: At_Open_Flower_P Parameter: Age (day) Value: 21
  misc_feature: MA Experiment 20000264 PARAMETER Experiment Name: At_Open_Flower_P Parameter: Plant Line Value: WS
  misc_feature: MA Experiment 20000264 PARAMETER Experiment Name: At_Open_Flower_P Parameter: Tissue Value: Open Flower vs. Whole Plant
  misc_feature: MA Experiment ID: 20000437 Result: Up-regulated in Transcription
  misc_feature: MA Experiment 20000437 PARAMETER Experiment Name: At_Drought_P Parameter: Age (day) Value: 8
  misc_feature: MA Experiment 20000437 PARAMETER Experiment Name: At_Drought_P Parameter: Organism Value: A. thaliana
  misc_feature: MA Experiment 20000437 PARAMETER Experiment Name: At_Drought_P Parameter: Plant Line Value: WS
  misc_feature: MA Experiment 20000437 PARAMETER Experiment Name: At_Drought_P Parameter: Timepoint (hr) Value: 24
  misc_feature: MA Experiment 20000437 PARAMETER Experiment Name: At_Drought_P Parameter: Tissue Value: Whole Plant
  misc_feature: MA Experiment 20000437 PARAMETER Experiment Name: At_Drought_P Parameter: Treatment Value: Drought vs. No Drought
  misc_feature: MA Experiment ID: 20000439 Result: Down-regulated in Transcription
  misc_feature: MA Experiment 20000439 PARAMETER Experiment Name: At_Roots__P Parameter: Age (day) Value: 14 vs. 21
  misc_feature: MA Experiment 20000439 PARAMETER Experiment Name: At_Roots__P Parameter: Organism Value: A. thaliana
  misc_feature: MA Experiment 20000439 PARAMETER Experiment Name: At_Roots__P Parameter: Tissue Value: Roots vs. Whole Plant
  misc_feature: MA Experiment ID: 20001248 Result: Up-regulated in Transcription
  misc_feature: MA Experiment 20001248 PARAMETER Experiment Name: At_Far-red-induction_P Parameter: Age (day) Value: 7
  misc_feature: MA Experiment 20001248 PARAMETER Experiment Name: At_Far-red-induction_P Parameter: Light Value: Far-red vs. White
  misc_feature: MA Experiment 20001248 PARAMETER Experiment Name: At_Far-red-induction_P Parameter: Organism Value: A. thaliana
  misc_feature: MA Experiment 20001248 PARAMETER Experiment Name: At_Far-red-induction_P Parameter: Plant Line Value: Columbia
  misc_feature: MA Experiment 20001248 PARAMETER Experiment Name: At_Far-red-induction_P Parameter: Timepoint (hr) Value: 4
  misc_feature: MA Experiment 20001248 PARAMETER Experiment Name: At_Far-red-induction_P Parameter: Tissue Value: Whole Plant
atgtatcctttatgtgtctctattataacgtggatcaagattctttcttatcttcatcactccacacattttcttgtcttcaaactcacacaaagaaaagaaaagtctccaaagctcaaaaaacaatgactcgaccgtcaagattacttgagacggcggcgccaccaccacaaccgtcggaggagatgatcgcagcggaatccgacatggtggtgatcttgtcggctcttctttgcgctcttatctgcgttgctggtctcgccgccgtcgtacgatgcgcttggctccggcggtttacagccggaggagattcgccgtcaccgaacaaaggcttgaaaaagaaagctcttcagtctcttccaagatccactttcaccgccgcggaatcaacctccggcgccgccgctgaagagggagactcgacggaatgtgctatttgcctcactgacttcgccgacggtgaagaaataagagtgcttcctctttgtggtcattctttccacgtggagtgtattgacaaatggctagtttctaggtcttcttgtccttcttgtcgcaggattcttacgccggtgagatgtgaccggtgtggtcatgcttctacggcggagatgaaagatcaagctcatcgtcatcaacatcaccaacactcttctactaccattcctacgtttcttccttaattaacactaatttttgttttattatggcaataattaattgcataaaagttatgtaaagtgagtttaattaggattagagagatcttttaaagtttttctctcttttctccttgttgtaatccagtgtatttaatcaaatctcagatggagttcaaatttcc

SEQ ID NO: 22149 - protein, 226 aa, Arabidopsis thaliana
  peptide (1)..(226): Ceres Seq. ID no. 12334878
  misc_feature (143)..(184): Pfam Name: Zinc finger, C3HC4 type (RING finger) Pfam Description: Zinc finger, C3HC4 type (RING finger)
  misc_feature (42)..(226): Homolog of NCBI NO: 15227839 NR Description: putative RING zinc finger protein
  misc_feature (59)..(197): Homolog of NCBI NO: 15239062 NR Description: RING zinc finger protein-like; protein id:
  misc_feature (26)..(108): Homolog of NCBI NO: 37536508 NR Description: putative ring finger protein
  misc_feature (109)..(196): Homolog of NCBI NO: 37536508 NR Description: putative ring finger protein
  misc_feature (42)..(194): Homolog of NCBI NO: 7489432 NR Description: probable ring finger protein - barley
  misc_feature (47)..(197): Homolog of NCBI NO: 21555237 NR Description: putative RING zinc finger protein [Arabidopsis
  misc_feature (47)..(197): Homolog of NCBI NO: 15223041 NR Description: putative RING zinc finger protein
  misc_feature (38)..(226): Homolog of NCBI NO: 32487554 NR Description: OSJNBa0013K16.6 [Oryza sativa (japonica
  misc_feature (48)..(197): Homolog of NCBI NO: 15218042 NR Description: similar to putative RING zinc finger protein
  misc_feature (42)..(226): Homolog of NCBI NO: 15237013 NR Description: RING-H2 finger protein RHA3b
VSFMCLYYNVDQDSFLSSSLHTFSCLQTHTKKRKVSKAQKTMTRPSRLLETAAPPPQPSEEMIAAESDMVVILSALLCALICVAGLAAVVRCAWLRRFTAGGDSPSPNKGLKKKALQSLPRSTFTAAESTSGAAAEEGDSTECAICLTDFADGEEIRVLPLCGHSFHVECIDKWLVSRSSCPSCRRILTPVRCDRCGHASTAEMKDQAHRHQHHQHSSTTIPTFLP

SEQ ID NO: 22150 - protein, 223 aa, Arabidopsis thaliana
  peptide (1)..(223): Ceres Seq. ID no. 12334879
  misc_feature (140)..(181): Pfam Name: Zinc finger, C3HC4 type (RING finger) Pfam Description: Zinc finger, C3HC4 type (RING finger)
  misc_feature (56)..(194): Homolog of NCBI NO: 15239062 NR Description: RING zinc finger protein-like; protein id:
  misc_feature (23)..(105): Homolog of NCBI NO: 37536508 NR Description: putative ring finger protein
  misc_feature (106)..(193): Homolog of NCBI NO: 37536508 NR Description: putative ring finger protein
  misc_feature (39)..(191): Homolog of NCBI NO: 7489432 NR Description: probable ring finger protein - barley
  misc_feature (44)..(194): Homolog of NCBI NO: 21555237 NR Description: putative RING zinc finger protein [Arabidopsis
  misc_feature (44)..(194): Homolog of NCBI NO: 15223041 NR Description: putative RING zinc finger protein
  misc_feature (35)..(223): Homolog of NCBI NO: 32487554 NR Description: OSJNBa0013K16.6 [Oryza sativa (japonica
  misc_feature (45)..(194): Homolog of NCBI NO: 15218042 NR Description: similar to putative RING zinc finger protein
  misc_feature (39)..(223): Homolog of NCBI NO: 15237013 NR Description: RING-H2 finger protein RHA3b
  misc_feature (39)..(223): Homolog of NCBI NO: 15227839 NR Description: putative RING zinc finger protein
MCLYYNVDQDSFLSSSLHTFSCLQTHTKKRKVSKAQKTMTRPSRLLETAAPPPQPSEEMIAAESDMVVILSALLCALICVAGLAAVVRCAWLRRFTAGGDSPSPNKGLKKKALQSLPRSTFTAAESTSGAAAEEGDSTECAICLTDFADGEEIRVLPLCGHSFHVECIDKWLVSRSSCPSCRRILTPVRCDRCGHASTAEMKDQAHRHQHHQHSSTTIPTFLP

SEQ ID NO: 22151 - protein, 185 aa, Arabidopsis thaliana
  peptide (1)..(185): Ceres Seq. ID no. 12334880
  misc_feature (102)..(143): Pfam Name: Zinc finger, C3HC4 type (RING finger) Pfam Description: Zinc finger, C3HC4 type (RING finger)
  misc_feature (18)..(156): Homolog of NCBI NO: 15239062 NR Description: RING zinc finger protein-like; protein id:
  misc_feature (1)..(67): Homolog of NCBI NO: 37536508 NR Description: putative ring finger protein
  misc_feature (68)..(155): Homolog of NCBI NO: 37536508 NR Description: putative ring finger protein
  misc_feature (1)..(153): Homolog of NCBI NO: 7489432 NR Description: probable ring finger protein - barley
  misc_feature (6)..(156): Homolog of NCBI NO: 21555237 NR Description: putative RING zinc finger protein [Arabidopsis
  misc_feature (6)..(156): Homolog of NCBI NO: 15223041 NR Description: putative RING zinc finger protein
  misc_feature (1)..(185): Homolog of NCBI NO: 32487554 NR Description: OSJNBa0013K16.6 [Oryza sativa (japonica
  misc_feature (7)..(156): Homolog of NCBI NO: 15218042 NR Description: similar to putative RING zinc finger protein
  misc_feature (1)..(185): Homolog of NCBI NO: 15237013 NR Description: RING-H2 finger protein RHA3b
  misc_feature (1)..(185): Homolog of NCBI NO: 15227839 NR Description: putative RING zinc finger protein
MTRPSRLLETAAPPPQPSEEMIAAESDMVVILSALLCALICVAGLAAVVRCAWLRRFTAGGDSPSPNKGLKKKALQSLPRSTFTAAESTSGAAAEEGDSTECAICLTDFADGEEIRVLPLCGHSFHVECIDKWLVSRSSCPSCRRILTPVRCDRCGHASTAEMKDQAHRHQHHQHSSTTIPTFLP

SEQ ID NO: 22152 - DNA, 1103 bp, Arabidopsis thaliana
  misc_feature (1)..(1103): Ceres Seq. ID no. 13488541
  misc_feature: MA Experiment ID: 108576 Result: Down-regulated in Transcription
  misc_feature: MA Experiment 108576 PARAMETER Experiment Name: At_42deg_Heat_cDNA_P Parameter: Temperature (deg C) Value: 42 vs. 22
  misc_feature: MA Experiment 108576 PARAMETER Experiment Name: At_42deg_Heat_cDNA_P Parameter: Timepoint (hr) Value: 1
  misc_feature: MA Experiment 108576 PARAMETER Experiment Name: At_42deg_Heat_cDNA_P Parameter: Tissue Value: Aerial
  misc_feature: MA Experiment ID: 108577 Result: Down-regulated in Transcription
  misc_feature: MA Experiment 108577 PARAMETER Experiment Name: At_42deg_Heat_cDNA_P Parameter: Temperature (deg C) Value: 42 vs. 22
  misc_feature: MA Experiment 108577 PARAMETER Experiment Name: At_42deg_Heat_cDNA_P Parameter: Timepoint (hr) Value: 6
  misc_feature: MA Experiment 108577 PARAMETER Experiment Name: At_42deg_Heat_cDNA_P Parameter: Tissue Value: Aerial
  misc_feature: MA Experiment ID: 108579 Result: Down-regulated in Transcription
  misc_feature: MA Experiment 108579 PARAMETER Experiment Name: At_4deg_Cold_cDNA_P Parameter: Temperature (deg C) Value: 4 vs. 22
  misc_feature: MA Experiment 108579 PARAMETER Experiment Name: At_4deg_Cold_cDNA_P Parameter: Timepoint (hr) Value: 6
  misc_feature: MA Experiment 108579 PARAMETER Experiment Name: At_4deg_Cold_cDNA_P Parameter: Tissue Value: Aerial
  misc_feature: MA Experiment ID: 20000224 Result: Down-regulated in Transcription
  misc_feature: MA Experiment ID: 20000495 Result: Up-regulated in Transcription
  misc_feature: MA Experiment 20000495 PARAMETER Experiment Name: At_Guard_Cells_P Parameter: Harvest Date Value: 8/2/2002
  misc_feature: MA Experiment 20000495 PARAMETER Experiment Name: At_Guard_Cells_P Parameter: Organism Value: A. thaliana
  misc_feature: MA Experiment 20000495 PARAMETER Experiment Name: At_Guard_Cells_P Parameter: Tissue Value: Guard Cells vs. Leaves
gactcttgtaatagtataaaattttattgaataattcatctgtagacaagggggaaaagaaagactgattttacgctttattgctctcactaaaaccctaattctctccgtctcgatcgcgacctctgtttcttcggcaatggcggattctcctcaaagaagaagggattcacgatctccttcaccccgaaaagaacgagctagatccagatccaggtctaggtccaggtctagatccaggcccaggcttaggtccaggtcaagatctttgccaaggcctgtttctccatcacgaagccgtggaaggtcaaggtcaagaagccgtggaagaagtgaagttgaaaaccctggtaccactctctatgtgactggcctatctacaagagtcactgacaaggatcttgaagcacatttcgccaaggaaggaaaggttgcgtcttgttttcttgtgatggagccgcgcacccgtgtgtctcgtggttttgcctttgttacaatgagcagccttaaagatgctgagcggtgcattaaatatctcaaccagtctgtactagaaggccgatacataactgtggaaaggtccaggagaaagcgcccgagaactcccaccccaggccactatcttggcttgaaaagctccagagacagcgatcgagaaggccgtagcagtcgagggaggcactatgatcgtgatgattacagagaccgtaggtcaccaagacgcgactattcacctcgtgatgaaagaaggtctagaagagatcggtcttactctcctcatggaagaagcccagagagaagatcagagagaaggtctgagaggtcagagagaaggtatgaaccccgtggctcgagatgacctgttttcatccttttgacaaaggattcaaaaacttctctgttgatttaggttgtgtaattgatcatccttaaaatagcacaaagattctgtcaggcaacgctttgggtttcatttattttctgttgttaacgtgttattctgtcggaactctctgaagtgaaaactaaaaactgtaatagcttctctgttatgtctctactctacttgtttttgaatgaatcagaatatcttatgtgattag

SEQ ID NO: 22153 - protein, 239 aa, Arabidopsis thaliana
  peptide (1)..(239): Ceres Seq. ID no. 13488542
  misc_feature (74)..(145): Pfam Name: RNA recognition motif. (a.k.a. RRM, RBD, or RNP domain) Pfam Description: RNA recognition motif. (a.k.a. RRM, RBD, or RNP
  misc_feature (170)..(232): Homolog of NCBI NO: 22329196 NR Description: transformer serine/arginine-rich ribonucleo
  misc_feature (65)..(239): Homolog of NCBI NO: 8778550 NR Description: F22G5.31 [Arabidopsis thaliana]
  misc_feature (25)..(239): Homolog of NCBI NO: 18390758 NR Description: transformer serine/arginine-rich
  misc_feature (9)..(228): Homolog of NCBI NO: 22329196 NR Description: transformer serine/arginine-rich ribonucleo
  misc_feature (17)..(239): Homolog of NCBI NO: 28973767 NR Description: putative transformer-SR ribonucleoprotein
  misc_feature (51)..(237): Homolog of NCBI NO: 34902002 NR Description: putative transformer serine/arginine-rich
  misc_feature (1)..(238): Homolog of NCBI NO: 40253470 NR Description: putative transformer-SR ribonucleoprotein
  misc_feature (1)..(235): Homolog of NCBI NO: 11275253 NR Description: transformer-2-like protein - liverwort
  misc_feature (1)..(169): Homolog of NCBI NO: 7486399 NR Description: hypothetical protein F4B14.60 - Arabidopsis
  misc_feature (1)..(218): Homolog of NCBI NO: 7489207 NR Description: transformer-SR ribonucleoprotein - common tobacco
MADSPQRRRDSRSPSPRKERARSRSRSRSRSRSRPRLRSRSRSLPRPVSPSRSRGRSRSRSRGRSEVENPGTTLYVTGLSTRVTDKDLEAHFAKEGKVASCFLVMEPRTRVSRGFAFVTMSSLKDAERCIKYLNQSVLEGRYITVERSRRKRPRTPTPGHYLGLKSSRDSDREGRSSRGRHYDRDDYRDRRSPRRDYSPRDERRSRRDRSYSPHGRSPERRSERRSERSERRYEPRGSR

SEQ ID NO: 22154 - protein, 135 aa, Arabidopsis thaliana
  peptide (1)..(135): Ceres Seq. ID no. 13488543
  misc_feature (66)..(128): Homolog of NCBI NO: 22329196 NR Description: transformer serine/arginine-rich ribonucleo
  misc_feature (1)..(135): Homolog of NCBI NO: 8778550 NR Description: F22G5.31 [Arabidopsis thaliana]
  misc_feature (1)..(135): Homolog of NCBI NO: 18390758 NR Description: transformer serine/arginine-rich
  misc_feature (1)..(124): Homolog of NCBI NO: 22329196 NR Description: transformer serine/arginine-rich ribonucleo
  misc_feature (1)..(135): Homolog of NCBI NO: 28973767 NR Description: putative transformer-SR ribonucleoprotein
  misc_feature (1)..(133): Homolog of NCBI NO: 34902002 NR Description: putative transformer serine/arginine-rich
  misc_feature (1)..(134): Homolog of NCBI NO: 40253470 NR Description: putative transformer-SR ribonucleoprotein
  misc_feature (1)..(131): Homolog of NCBI NO: 11275253 NR Description: transformer-2-like protein - liverwort
  misc_feature (1)..(65): Homolog of NCBI NO: 7486399 NR Description: hypothetical protein F4B14.60 - Arabidopsis
  misc_feature (1)..(114): Homolog of NCBI NO: 7489207 NR Description: transformer-SR ribonucleoprotein - common tobacco
MEPRTRVSRGFAFVTMSSLKDAERCIKYLNQSVLEGRYITVERSRRKRPRTPTPGHYLGLKSSRDSDREGRSSRGRHYDRDDYRDRRSPRRDYSPRDERRSRRDRSYSPHGRSPERRSERRSERSERRYEPRGSR

SEQ ID NO: 22155 - protein, 120 aa, Arabidopsis thaliana
  peptide (1)..(120): Ceres Seq. ID no. 13488544
  misc_feature (51)..(113): Homolog of NCBI NO: 22329196 NR Description: transformer serine/arginine-rich ribonucleo
  misc_feature (1)..(120): Homolog of NCBI NO: 8778550 NR Description: F22G5.31 [Arabidopsis thaliana]
  misc_feature (1)..(120): Homolog of NCBI NO: 18390758 NR Description: transformer serine/arginine-rich
  misc_feature (1)..(109): Homolog of NCBI NO: 22329196 NR Description: transformer serine/arginine-rich ribonucleo
  misc_feature (1)..(120): Homolog of NCBI NO: 28973767 NR Description: putative transformer-SR ribonucleoprotein
  misc_feature (1)..(118): Homolog of NCBI NO: 34902002 NR Description: putative transformer serine/arginine-rich
  misc_feature (1)..(119): Homolog of NCBI NO: 40253470 NR Description: putative transformer-SR ribonucleoprotein
  misc_feature (1)..(116): Homolog of NCBI NO: 11275253 NR Description: transformer-2-like protein - liverwort
  misc_feature (1)..(50): Homolog of NCBI NO: 7486399 NR Description: hypothetical protein F4B14.60 - Arabidopsis
  misc_feature (1)..(99): Homolog of NCBI NO: 7489207 NR Description: transformer-SR ribonucleoprotein - common tobacco
MSSLKDAERCIKYLNQSVLEGRYITVERSRRKRPRTPTPGHYLGLKSSRDSDREGRSSRGRHYDRDDYRDRRSPRRDYSPRDERRSRRDRSYSPHGRSPERRSERRSERSERRYEPRGSR

SEQ ID NO: 22156 - DNA, 1156 bp, Arabidopsis thaliana
  misc_feature (1)..(1156): Ceres Seq. ID no. 12421514
  misc_feature: MA Experiment ID: 108434 Result: Down-regulated in Transcription
  misc_feature: MA Experiment 108434 PARAMETER Experiment Name: At_Root_Tips_cDNA_P Parameter: Tissue Value: Root Tips
  misc_feature: MA Experiment ID: 108462 Result: Up-regulated in Transcription
  misc_feature: MA Experiment 108462 PARAMETER Experiment Name: At_Germinating_Seeds_cDNA_P Parameter: Age (day) Value: 2 vs. 0
  misc_feature: MA Experiment 108462 PARAMETER Experiment Name: At_Germinating_Seeds_cDNA_P Parameter: Tissue Value: Germinating Seeds
  misc_feature: MA Experiment ID: 108463 Result: Up-regulated in Transcription
  misc_feature: MA Experiment 108463 PARAMETER Experiment Name: At_Germinating_Seeds_cDNA_P Parameter: Age (day) Value: 3 vs. 0
  misc_feature: MA Experiment 108463 PARAMETER Experiment Name: At_Germinating_Seeds_cDNA_P Parameter: Tissue Value: Germinating Seeds
  misc_feature: MA Experiment ID: 108464 Result: Up-regulated in Transcription
  misc_feature: MA Experiment 108464 PARAMETER Experiment Name: At_Germinating_Seeds_cDNA_P Parameter: Age (day) Value: 4 vs. 0
  misc_feature: MA Experiment 108464 PARAMETER Experiment Name: At_Germinating_Seeds_cDNA_P Parameter: Tissue Value: Germinating Seeds
  misc_feature: MA Experiment ID: 20000227 Result: Down-regulated in Transcription
  misc_feature: MA Experiment 20000227 PARAMETER Experiment Name: At_Root-Tips-vs-Tops_P Parameter: Tissue Value: Root Tips vs. Root Tops
  misc_feature: MA Experiment ID: 20001451 Result: Down-regulated in Transcription
  misc_feature: MA Experiment 20001451 PARAMETER Experiment Name: At_Far-red-induction_P Parameter: Age (day) Value: 7
  misc_feature: MA Experiment 20001451 PARAMETER Experiment Name: At_Far-red-induction_P Parameter: Light Value: Far-red vs. White
  misc_feature: MA Experiment 20001451 PARAMETER Experiment Name: At_Far-red-induction_P Parameter: Organism Value: A. thaliana
  misc_feature: MA Experiment 20001451 PARAMETER Experiment Name: At_Far-red-induction_P Parameter: Plant Line Value: Columbia
  misc_feature: MA Experiment 20001451 PARAMETER Experiment Name: At_Far-red-induction_P Parameter: Timepoint (hr) Value: 24
  misc_feature: MA Experiment 20001451 PARAMETER Experiment Name: At_Far-red-induction_P Parameter: Tissue Value: Whole Plant
atactctctttttttctcggacaagaaggctacagaaagatatgtcgctgtcgtcttacctcagcccgacgcgccttctataaggctacctccgccgttgtctcagggcggcaggactgacgtcgcagacgctttccatagactctgaaacaaccatccacttctggggcccaccacctctagaccaccggagcgacgatgacagaccggttatgcttctcctccacggcttcggtccgtcgtccatgtggcagtggcggcgacagatgcaagccttctctccctccgctttcagggtttattctcccgatcttgtcttcttcggcgactctacctcttcctccaccaatcgcaccgaagtcttccaggcggaatgtatggcaaagctaatggcgaaaataggaatagggaagtataatgtggctggaacaagctacggggggtttgttgcgtaccacatggccaaaatgtggccggaaaaagtggagaaagtggtgattgcaagctccggcatcaacatgcgaaagtgtgacggtgaaagtttattgcaaagatccaattgtgagtgcatcgagaaggttatgttaccatccactgcaactgagtttcgcacacttatggctttggcatcttcatggcggttagttcgtatgtttcctgatgctctctggaacgacgtaatcaataatttgtataaaaaaaatagaaaagagaagatagaattgttgaagggagtgactttcggccggagcgaaaatttaaacatcgattctctttctcaggaggtcctaattgtatggggagacaaagatcagatatttcctgtgaagatggcttacgaattaaaagagattcttggagacaaaacgaaactagaaatcattgacaacacttcacatgttcctcagattgaatgtgctcaagagttcaacaatattgttttgagatttttgaagggttcttaagagccgtaattttattccatgctacatgattcttcagttttttttaagtgttaaactattggttacgtaattttgcgactttacttgccatgctttctcatttttcatgtaagaactttatccattactgtcattgtagagaactctatttatagcaaaaagtaatactaatatgcaacttaattttcgtc

SEQ ID NO: 22157 - protein, 250 aa, Arabidopsis thaliana
  peptide (1)..(250): Ceres Seq. ID no. 12421515
  misc_feature (27)..(245): Pfam Name: alpha/beta hydrolase fold Pfam Description: alpha/beta hydrolase fold
  misc_feature (1)..(247): Homolog of NCBI NO: 21592821 NR Description: unknown [Arabidopsis thaliana]
  misc_feature (1)..(250): Homolog of NCBI NO: 27436746 NR Description: Unknown protein [Oryza sativa (japonica
  misc_feature (1)..(250): Homolog of NCBI NO: 27436745 NR Description: Hypothetical protein [Oryza sativa (japonica
  misc_feature (56)..(158): Homolog of NCBI NO: 7486445 NR Description: hypothetical protein F4I10.120 - Arabidopsis
  misc_feature (50)..(247): Homolog of NCBI NO: 26451507 NR Description: unknown protein [Arabidopsis thaliana]
  misc_feature (1)..(52): Homolog of NCBI NO: 7486444 NR Description: hypothetical protein F4I10.110 - Arabidopsis
  misc_feature (1)..(155): Homolog of NCBI NO: 13374854 NR Description: putative protein [Arabidopsis thaliana]
  misc_feature (1)..(247): Homolog of NCBI NO: 22326938 NR Description: similar to putative hydrolase; protein id:
  misc_feature (1)..(250): Homolog of NCBI NO: 21592805 NR Description: unknown [Arabidopsis thaliana]
  misc_feature (1)..(250): Homolog of NCBI NO: 30689631 NR Description: hydrolase, alpha/beta fold family [Arabidopsis
MLLLHGFGPSSMWQWRRQMQAFSPSAFRVYSPDLVFFGDSTSSSTNRTEVFQAECMAKLMAKIGIGKYNVAGTSYGGFVAYHMAKMWPEKVEKVVIASSGINMRKCDGESLLQRSNCECIEKVMLPSTATEFRTLMALASSWRLVRMFPDALWNDVINNLYKKNRKEKIELLKGVTFGRSENLNIDSLSQEVLIVWGDKDQIFPVKMAYELKEILGDKTKLEIIDNTSHVPQIECAQEFNNIVLRFLKGS

SEQ ID NO: 22158 - protein, 239 aa, Arabidopsis thaliana
  peptide (1)..(239): Ceres Seq. ID no. 12421516
  misc_feature (16)..(234): Pfam Name: alpha/beta hydrolase fold Pfam Description: alpha/beta hydrolase fold
  misc_feature (1)..(236): Homolog of NCBI NO: 21592821 NR Description: unknown [Arabidopsis thaliana]
  misc_feature (1)..(239): Homolog of NCBI NO: 27436746 NR Description: Unknown protein [Oryza sativa (japonica
  misc_feature (1)..(239): Homolog of NCBI NO: 27436745 NR Description: Hypothetical protein [Oryza sativa (japonica
  misc_feature (45)..(147): Homolog of NCBI NO: 7486445 NR Description: hypothetical protein F4I10.120 - Arabidopsis
  misc_feature (39)..(236): Homolog of NCBI NO: 26451507 NR Description: unknown protein [Arabidopsis thaliana]
  misc_feature (1)..(41): Homolog of NCBI NO: 7486444 NR Description: hypothetical protein F4I10.110 - Arabidopsis
  misc_feature (1)..(144): Homolog of NCBI NO: 13374854 NR Description: putative protein [Arabidopsis thaliana]
  misc_feature (1)..(236): Homolog of NCBI NO: 22326938 NR Description: similar to putative hydrolase; protein id:
  misc_feature (1)..(239): Homolog of NCBI NO: 21592805 NR Description: unknown [Arabidopsis thaliana]
  misc_feature (1)..(239): Homolog of NCBI NO: 30689631 NR Description: hydrolase, alpha/beta fold family [Arabidopsis
MWQWRRQMQAFSPSAFRVYSPDLVFFGDSTSSSTNRTEVFQAECMAKLMAKIGIGKYNVAGTSYGGFVAYHMAKMWPEKVEKVVIASSGINMRKCDGESLLQRSNCECIEKVMLPSTATEFRTLMALASSWRLVRMFPDALWNDVINNLYKKNRKEKIELLKGVTFGRSENLNIDSLSQEVLIVWGDKDQIFPVKMAYELKEILGDKTKLEIIDNTSHVPQIECAQEFNNIVLRFLKGS

SEQ ID NO: 22159 - protein, 232 aa, Arabidopsis thaliana
  peptide (1)..(232): Ceres Seq. ID no. 12421517
  misc_feature (9)..(227): Pfam Name: alpha/beta hydrolase fold Pfam Description: alpha/beta hydrolase fold
  misc_feature (1)..(137): Homolog of NCBI NO: 13374854 NR Description: putative protein [Arabidopsis thaliana]
  misc_feature (1)..(229): Homolog of NCBI NO: 22326938 NR Description: similar to putative hydrolase; protein id:
  misc_feature (1)..(229): Homolog of NCBI NO: 21592821 NR Description: unknown [Arabidopsis thaliana]
  misc_feature (1)..(232): Homolog of NCBI NO: 27436745 NR Description: Hypothetical protein [Oryza sativa (japonica
  misc_feature (32)..(229): Homolog of NCBI NO: 26451507 NR Description: unknown protein [Arabidopsis thaliana]
  misc_feature (1)..(34): Homolog of NCBI NO: 7486444 NR Description: hypothetical protein F4I10.110 - Arabidopsis
  misc_feature (38)..(140): Homolog of NCBI NO: 7486445 NR Description: hypothetical protein F4I10.120 - Arabidopsis
  misc_feature (1)..(232): Homolog of NCBI NO: 27436746 NR Description: Unknown protein [Oryza sativa (japonica
  misc_feature (1)..(232): Homolog of NCBI NO: 21592805 NR Description: unknown [Arabidopsis thaliana]
  misc_feature (1)..(232): Homolog of NCBI NO: 30689631 NR Description: hydrolase, alpha/beta fold family [Arabidopsis
MQAFSPSAFRVYSPDLVFFGDSTSSSTNRTEVFQAECMAKLMAKIGIGKYNVAGTSYGGFVAYHMAKMWPEKVEKVVIASSGINMRKCDGESLLQRSNCECIEKVMLPSTATEFRTLMALASSWRLVRMFPDALWNDVINNLYKKNRKEKIELLKGVTFGRSENLNIDSLSQEVLIVWGDKDQIFPVKMAYELKEILGDKTKLEIIDNTSHVPQIECAQEFNNIVLRFLKGS

SEQ ID NO: 22160 - DNA, 1208 bp, Arabidopsis thaliana
  misc_feature (1)..(1208): Ceres Seq. ID no. 13487569
  misc_feature: MA Experiment ID: 108435 Result: Down-regulated in Transcription
  misc_feature: MA Experiment 108435 PARAMETER Experiment Name: At_stm_Mutants_cDNA_P Parameter: Plant Line Value: wt Landsburg vs stm
  misc_feature: MA Experiment 108435 PARAMETER Experiment Name: At_stm_Mutants_cDNA_P Parameter: Tissue Value: Shoot Apical Meristem Region
  misc_feature: MA Experiment ID: 108462 Result: Up-regulated in Transcription
  misc_feature: MA Experiment 108462 PARAMETER Experiment Name: At_Germinating_Seeds_cDNA_P Parameter: Age (day) Value: 2 vs. 0
  misc_feature: MA Experiment 108462 PARAMETER Experiment Name: At_Germinating_Seeds_cDNA_P Parameter: Tissue Value: Germinating Seeds
  misc_feature: MA Experiment ID: 108463 Result: Up-regulated in Transcription
  misc_feature: MA Experiment 108463 PARAMETER Experiment Name: At_Germinating_Seeds_cDNA_P Parameter: Age (day) Value: 3 vs. 0
  misc_feature: MA Experiment 108463 PARAMETER Experiment Name: At_Germinating_Seeds_cDNA_P Parameter: Tissue Value: Germinating Seeds
  misc_feature: MA Experiment ID: 108464 Result: Up-regulated in Transcription
  misc_feature: MA Experiment 108464 PARAMETER Experiment Name: At_Germinating_Seeds_cDNA_P Parameter: Age (day) Value: 4 vs. 0
  misc_feature: MA Experiment 108464 PARAMETER Experiment Name: At_Germinating_Seeds_cDNA_P Parameter: Tissue Value: Germinating Seeds
  misc_feature: MA Experiment ID: 108501 Result: Down-regulated in Transcription
  misc_feature: MA Experiment 108501 PARAMETER Experiment Name: At_ap2_floral_buds_cDNA_P Parameter: Plant Line Value: ap2 (Ler.)
  misc_feature: MA Experiment 108501 PARAMETER Experiment Name: At_ap2_floral_buds_cDNA_P Parameter: Tissue Value: Closed Flower
  misc_feature: MA Experiment ID: 108573 Result: Up-regulated in Transcription
  misc_feature: MA Experiment 108573 PARAMETER Experiment Name: At_Drought_cDNA_P Parameter: Timepoint (hr) Value: 6
  misc_feature: MA Experiment 108573 PARAMETER Experiment Name: At_Drought_cDNA_P Parameter: Tissue Value: Aerial
  misc_feature: MA Experiment 108573 PARAMETER Experiment Name: At_Drought_cDNA_P Parameter: Treatment Value: Drought vs. No Drought
  misc_feature: MA Experiment ID: 108595 Result: Down-regulated in Transcription
  misc_feature: MA Experiment 108595 PARAMETER Experiment Name: At_Ler-pi_Ovule_cDNA_P Parameter: Plant Line Value: null
  misc_feature: MA Experiment ID: 20000087 Result: Down-regulated in Transcription
  misc_feature: MA Experiment 20000087 PARAMETER Experiment Name: At_100uM_ABA_Mutants_cDNA_P Parameter: Plant Line Value: WS
  misc_feature: MA Experiment 20000087 PARAMETER Experiment Name: At_100uM_ABA_Mutants_cDNA_P Parameter: Timepoint (hr) Value: 6
  misc_feature: MA Experiment 20000087 PARAMETER Experiment Name: At_100uM_ABA_Mutants_cDNA_P Parameter: Tissue Value: Aerial
  misc_feature: MA Experiment 20000087 PARAMETER Experiment Name: At_100uM_ABA_Mutants_cDNA_P Parameter: Treatment Value: 100uM ABA vs. No Treatment
  misc_feature: MA Experiment ID: 20000185 Result: Down-regulated in Transcription
  misc_feature: MA Experiment 20000185 PARAMETER Experiment Name: At_Roots__P Parameter: Age (day) Value: 7 vs. 21
  misc_feature: MA Experiment 20000185 PARAMETER Experiment Name: At_Roots__P Parameter: Organism Value: A. thaliana
  misc_feature: MA Experiment 20000185 PARAMETER Experiment Name: At_Roots__P Parameter: Tissue Value: Roots vs. Whole Plant
  misc_feature: MA Experiment ID: 20000227 Result: Down-regulated in Transcription
  misc_feature: MA Experiment 20000227 PARAMETER Experiment Name: At_Root-Tips-vs-Tops_P Parameter: Tissue Value: Root Tips vs. Root Tops
  misc_feature: MA Experiment ID: 20000439 Result: Down-regulated in Transcription
  misc_feature: MA Experiment 20000439 PARAMETER Experiment Name: At_Roots__P Parameter: Age (day) Value: 14 vs. 21
  misc_feature: MA Experiment 20000439 PARAMETER Experiment Name: At_Roots__P Parameter: Organism Value: A. thaliana
  misc_feature: MA Experiment 20000439 PARAMETER Experiment Name: At_Roots__P Parameter: Tissue Value: Roots vs. Whole Plant
  misc_feature: MA Experiment ID: 20000451 Result: Down-regulated in Transcription
  misc_feature: MA Experiment 20000451 PARAMETER Experiment Name: At_CS6879_Shoots-Roots_P Parameter: Age (day) Value: 14
  misc_feature: MA Experiment 20000451 PARAMETER Experiment Name: At_CS6879_Shoots-Roots_P Parameter: Organism Value: A. thaliana
  misc_feature: MA Experiment 20000451 PARAMETER Experiment Name: At_CS6879_Shoots-Roots_P Parameter: Plant Line Value: CS6879 vs. WS
  misc_feature: MA Experiment 20000451 PARAMETER Experiment Name: At_CS6879_Shoots-Roots_P Parameter: Tissue Value: Roots
  misc_feature: MA Experiment ID: 20000495 Result: Down-regulated in Transcription
  misc_feature: MA Experiment 20000495 PARAMETER Experiment Name: At_Guard_Cells_P Parameter: Harvest Date Value: 8/2/2002
  misc_feature: MA Experiment 20000495 PARAMETER Experiment Name: At_Guard_Cells_P Parameter: Organism Value: A. thaliana
  misc_feature: MA Experiment 20000495 PARAMETER Experiment Name: At_Guard_Cells_P Parameter: Tissue Value: Guard Cells vs. Leaves
  misc_feature: MA Experiment ID: 20000496 Result: Down-regulated in Transcription
  misc_feature: MA Experiment 20000496 PARAMETER Experiment Name: At_Guard_Cells_P Parameter: Harvest Date Value: 7/19/2002
  misc_feature: MA Experiment 20000496 PARAMETER Experiment Name: At_Guard_Cells_P Parameter: Organism Value: Canola
  misc_feature: MA Experiment 20000496 PARAMETER Experiment Name: At_Guard_Cells_P Parameter: Tissue Value: Guard Cells vs. Leaves
  misc_feature: MA Experiment ID: 20001451 Result: Down-regulated in Transcription
  misc_feature: MA Experiment 20001451 PARAMETER Experiment Name: At_Far-red-induction_P Parameter: Age (day) Value: 7
  misc_feature: MA Experiment 20001451 PARAMETER Experiment Name: At_Far-red-induction_P Parameter: Light Value: Far-red vs. White
  misc_feature: MA Experiment 20001451 PARAMETER Experiment Name: At_Far-red-induction_P Parameter: Organism Value: A. thaliana
  misc_feature: MA Experiment 20001451 PARAMETER Experiment Name: At_Far-red-induction_P Parameter: Plant Line Value: Columbia
  misc_feature: MA Experiment 20001451 PARAMETER Experiment Name: At_Far-red-induction_P Parameter: Timepoint (hr) Value: 24
  misc_feature: MA Experiment 20001451 PARAMETER Experiment Name: At_Far-red-induction_P Parameter: Tissue Value: Whole Plant
  misc_feature: MA Experiment ID: 20001557 Result: Down-regulated in Transcription
  misc_feature: MA Experiment 20001557 PARAMETER Experiment Name: At_Drought_Soil_Dry_P Parameter: Age (day) Value: 27
  misc_feature: MA Experiment 20001557 PARAMETER Experiment Name: At_Drought_Soil_Dry_P Parameter: Organism Value: A. thaliana
  misc_feature: MA Experiment 20001557 PARAMETER Experiment Name: At_Drought_Soil_Dry_P Parameter: Plant Line Value: WS
  misc_feature: MA Experiment 20001557 PARAMETER Experiment Name: At_Drought_Soil_Dry_P Parameter: Post Timepoint (hr) Value: 3
  misc_feature: MA Experiment 20001557 PARAMETER Experiment Name: At_Drought_Soil_Dry_P Parameter: Post-Treatment Value: Re-Water vs. No Drought
  misc_feature: MA Experiment 20001557 PARAMETER Experiment Name: At_Drought_Soil_Dry_P Parameter: Timepoint (day) Value: 13
  misc_feature: MA Experiment 20001557 PARAMETER Experiment Name: At_Drought_Soil_Dry_P Parameter: Treatment Value: Drought vs. No Drought
  misc_feature: MA Experiment ID: 20001560 Result: Down-regulated in Transcription
  misc_feature: MA Experiment 20001560 PARAMETER Experiment Name: At_Drought_Soil_Dry_P Parameter: Age (day) Value: 28
  misc_feature: MA Experiment 20001560 PARAMETER Experiment Name: At_Drought_Soil_Dry_P Parameter: Organism Value: A. thaliana
  misc_feature: MA Experiment 20001560 PARAMETER Experiment Name: At_Drought_Soil_Dry_P Parameter: Plant Line Value: WS
  misc_feature: MA Experiment 20001560 PARAMETER Experiment Name: At_Drought_Soil_Dry_P Parameter: Post Timepoint (hr) Value: None
  misc_feature: MA Experiment 20001560 PARAMETER Experiment Name: At_Drought_Soil_Dry_P Parameter: Post-Treatment Value: None
  misc_feature: MA Experiment 20001560 PARAMETER Experiment Name: At_Drought_Soil_Dry_P Parameter: Timepoint (day) Value: 14
  misc_feature: MA Experiment 20001560 PARAMETER Experiment Name: At_Drought_Soil_Dry_P Parameter: Treatment Value: Drought vs. No Drought
  misc_feature: MA Experiment ID: 20001905 Result: Down-regulated in Transcription
  misc_feature: MA Experiment 20001905 PARAMETER Experiment Name: At_Drought_Reproduction_P Parameter: Age (day) Value: 40
  misc_feature: MA Experiment 20001905 PARAMETER Experiment Name: At_Drought_Reproduction_P Parameter: Organism Value: A. thaliana
  misc_feature: MA Experiment 20001905 PARAMETER Experiment Name: At_Drought_Reproduction_P Parameter: Plant Line Value: WS
  misc_feature: MA Experiment 20001905 PARAMETER Experiment Name: At_Drought_Reproduction_P Parameter: Timepoint (day) Value: 10
  misc_feature: MA Experiment 20001905 PARAMETER Experiment Name: At_Drought_Reproduction_P Parameter: Tissue Value: Rosettes
  misc_feature: MA Experiment 20001905 PARAMETER Experiment Name: At_Drought_Reproduction_P Parameter: Treatment Value: Drought vs. No Drought
aaaagactgtgaagcgagaggaccgttaagacgacggacgcttatctggaaggagagtcatgaatctgagtgtgaaccgatgcatcaccggtggtttcgtcggtggattctctagctgcagactcaatcatgagaaaaggtgggttcgtgctggcaagcactgtgagcttgagagggagagaagtttagtgtctgatgctgtttctttagagaggttagagagcaaaagcattaaacttgcgatgcttgctagtggtttaggagtggcgaacttggtaactcttagctcagcaaaagccgcagacttgaagatgattgtcttggatcaagccacttccatttacatcttggctgaaggaagccttggagattcggtcgggaacttcttgtattcagctaaccaacaggctaacgaagctgttcaagatcaactatcagcactcagtgtaacaagtttggcagtaatatttggggcaggccttgtgacaagtctgtctccatgtacacttagtgttttgccgttgacacttggttatattggtgcatttgggtctggcaaaagcagaggtcaggttattggagatacagttgctttcgcactgggattagcaactaccttagcccttcttgggatagtagcttcttttgccggaaaagcctatggacaaataggacaaggattaccagtagctgcatccggtctggctattgtaatgggtctcaatctccttgagataatcgaacttcagcttccttctttctttaacaactttgatcctcgtgctgcagcagcaaacttcccatctagtgtacaagcatatctagccggtctcacattcgcacttgctgcctcaccttgtagtactccagttctagccactcttcttggttacgtggctacttccagggatccagtaattggtggaagcttactcttaacctatacaacaggttacgtcgctccacttatcgtcgctgcttcttttgccggagctttacagagcttactttcgttgcgaaaggtctctgcatggatcaatcccataagtggtgctcttctacttggaggaggtttatatactttcttggataggctttttcctgctgctactatggtcatgtaaaaacttaacttacaaactcatttcggccaaaaacaaagtgtttgtaatagtaaataaataatattgtttataatgtaaaattac

SEQ ID NO: 22161 - protein, 354 aa, Arabidopsis thaliana
  peptide (1)..(354): Ceres Seq. ID no. 13487570
  misc_feature (136)..(343): Pfam Name: Cytochrome C biogenesis protein transmembrane region Pfam Description: Cytochrome C biogenesis protein transmembrane
  misc_feature (18)..(354): Homolog of NCBI NO: 27464259 NR Description: biogenesis protein [Lotus japonicus]
  misc_feature (1)..(354): Homolog of NCBI NO: 21592806 NR Description: cytochrome c biogenesis protein precursor
  misc_feature (1)..(354): Homolog of NCBI NO: 15292991 NR Description: putative cytochrome c biogenesis protein
  misc_feature (1)..(354): Homolog of NCBI NO: 15239604 NR Description: cytochrome c biogenesis protein precursor
MNLSVNRCITGGFVGGFSSCRLNHEKRWVRAGKHCELERERSLVSDAVSLERLESKSIKLAMLASGLGVANLVTLSSAKAADLKMIVLDQATSIYILAEGSLGDSVGNFLYSANQQANEAVQDQLSALSVTSLAVIFGAGLVTSLSPCTLSVLPLTLGYIGAFGSGKSRGQVIGDTVAFALGLATTLALLGIVASFAGKAYGQIGQGLPVAASGLAIVMGLNLLEIIELQLPSFFNNFDPRAAAANFPSSVQAYLAGLTFALAASPCSTPVLATLLGYVATSRDPVIGGSLLLTYTTGYVAPLIVAASFAGALQSLLSLRKVSAWINPISGALLLGGGLYTFLDRLFPAATMVM

SEQ ID NO: 22162 - protein, 293 aa, Arabidopsis thaliana
  peptide (1)..(293): Ceres Seq. ID no. 13487571
  misc_feature (75)..(282): Pfam Name: Cytochrome C biogenesis protein transmembrane region Pfam Description: Cytochrome C biogenesis protein transmembrane
  misc_feature (1)..(293): Homolog of NCBI NO: 27464259 NR Description: biogenesis protein [Lotus japonicus]
  misc_feature (1)..(293): Homolog of NCBI NO: 21592806 NR Description: cytochrome c biogenesis protein precursor
  misc_feature (1)..(293): Homolog of NCBI NO: 15292991 NR Description: putative cytochrome c biogenesis protein
  misc_feature (1)..(293): Homolog of NCBI NO: 15239604 NR Description: cytochrome c biogenesis protein precursor
MLASGLGVANLVTLSSAKAADLKMIVLDQATSIYILAEGSLGDSVGNFLYSANQQANEAVQDQLSALSVTSLAVIFGAGLVTSLSPCTLSVLPLTLGYIGAFGSGKSRGQVIGDTVAFALGLATTLALLGIVASFAGKAYGQIGQGLPVAASGLAIVMGLNLLEIIELQLPSFFNNFDPRAAAANFPSSVQAYLAGLTFALAASPCSTPVLATLLGYVATSRDPVIGGSLLLTYTTGYVAPLIVAASFAGALQSLLSLRKVSAWINPISGALLLGGGLYTFLDRLFPAATMVM

SEQ ID NO: 22163 - protein, 270 aa, Arabidopsis thaliana
  peptide (1)..(270): Ceres Seq. ID no. 13487572
  misc_feature (52)..(259): Pfam Name: Cytochrome C biogenesis protein transmembrane region Pfam Description: Cytochrome C biogenesis protein transmembrane
  misc_feature (1)..(270): Homolog of NCBI NO: 27464259 NR Description: biogenesis protein [Lotus japonicus]
  misc_feature (1)..(270): Homolog of NCBI NO: 21592806 NR Description: cytochrome c biogenesis protein precursor
  misc_feature (1)..(270): Homolog of NCBI NO: 15292991 NR Description: putative cytochrome c biogenesis protein
  misc_feature (1)..(270): Homolog of NCBI NO: 15239604 NR Description: cytochrome c biogenesis protein precursor
MIVLDQATSIYILAEGSLGDSVGNFLYSANQQANEAVQDQLSALSVTSLAVIFGAGLVTSLSPCTLSVLPLTLGYIGAFGSGKSRGQVIGDTVAFALGLATTLALLGIVASFAGKAYGQIGQGLPVAASGLAIVMGLNLLEIIELQLPSFFNNFDPRAAAANFPSSVQAYLAGLTFALAASPCSTPVLATLLGYVATSRDPVIGGSLLLTYTTGYVAPLIVAASFAGALQSLLSLRKVSAWINPISGALLLGGGLYTFLDRLFPAATMVM

SEQ ID NO: 22164 - DNA, 774 bp, Arabidopsis thaliana
  misc_feature (1)..(774): Ceres Seq. ID no. 13490678
  misc_feature: MA Experiment ID: 108435 Result: Down-regulated in Transcription
  misc_feature: MA Experiment 108435 PARAMETER Experiment Name: At_stm_Mutants_cDNA_P Parameter: Plant Line Value: wt Landsburg vs stm
  misc_feature: MA Experiment 108435 PARAMETER Experiment Name: At_stm_Mutants_cDNA_P Parameter: Tissue Value: Shoot Apical Meristem Region
  misc_feature: MA Experiment ID: 108462 Result: Up-regulated in Transcription
  misc_feature: MA Experiment 108462 PARAMETER Experiment Name: At_Germinating_Seeds_cDNA_P Parameter: Age (day) Value: 2 vs. 0
  misc_feature: MA Experiment 108462 PARAMETER Experiment Name: At_Germinating_Seeds_cDNA_P Parameter: Tissue Value: Germinating Seeds
  misc_feature: MA Experiment ID: 108463 Result: Up-regulated in Transcription
  misc_feature: MA Experiment 108463 PARAMETER Experiment Name: At_Germinating_Seeds_cDNA_P Parameter: Age (day) Value: 3 vs. 0
  misc_feature: MA Experiment 108463 PARAMETER Experiment Name: At_Germinating_Seeds_cDNA_P Parameter: Tissue Value: Germinating Seeds
  misc_feature: MA Experiment ID: 108464 Result: Up-regulated in Transcription
  misc_feature: MA Experiment 108464 PARAMETER Experiment Name: At_Germinating_Seeds_cDNA_P Parameter: Age (day) Value: 4 vs. 0
  misc_feature: MA Experiment 108464 PARAMETER Experiment Name: At_Germinating_Seeds_cDNA_P Parameter: Tissue Value: Germinating Seeds
  misc_feature: MA Experiment ID: 108579 Result: Down-regulated in Transcription
  misc_feature: MA Experiment 108579 PARAMETER Experiment Name: At_4deg_Cold_cDNA_P Parameter: Temperature (deg C) Value: 4 vs. 22
  misc_feature: MA Experiment 108579 PARAMETER Experiment Name: At_4deg_Cold_cDNA_P Parameter: Timepoint (hr) Value: 6
  misc_feature: MA Experiment 108579 PARAMETER Experiment Name: At_4deg_Cold_cDNA_P Parameter: Tissue Value: Aerial
  misc_feature: MA Experiment ID: 108595 Result: Down-regulated in Transcription
  misc_feature: MA Experiment 108595 PARAMETER Experiment Name: At_Ler-pi_Ovule_cDNA_P Parameter: Plant Line Value: null
  misc_feature: MA Experiment ID: 20000069 Result: Up-regulated in Transcription
  misc_feature: MA Experiment 20000069 PARAMETER Experiment Name: At_100uM_ABA_Mutants_cDNA_P Parameter: Plant Line Value: CS23
  misc_feature: MA Experiment 20000069 PARAMETER Experiment Name: At_100uM_ABA_Mutants_cDNA_P Parameter: Timepoint (hr) Value: 6
  misc_feature: MA Experiment 20000069 PARAMETER Experiment Name: At_100uM_ABA_Mutants_cDNA_P Parameter: Tissue Value: Aerial
  misc_feature: MA Experiment 20000069 PARAMETER Experiment Name: At_100uM_ABA_Mutants_cDNA_P Parameter: Treatment Value: 100uM ABA vs. No Treatment
  misc_feature: MA Experiment ID: 20000070 Result: Up-regulated in Transcription
  misc_feature: MA Experiment 20000070 PARAMETER Experiment Name: At_100uM_ABA_Mutants_cDNA_P Parameter: Plant Line Value: CS24
  misc_feature: MA Experiment 20000070 PARAMETER Experiment Name: At_100uM_ABA_Mutants_cDNA_P Parameter: Timepoint (hr) Value: 6
  misc_feature: MA Experiment 20000070 PARAMETER Experiment Name: At_100uM_ABA_Mutants_cDNA_P Parameter: Tissue Value: Aerial
  misc_feature: MA Experiment 20000070 PARAMETER Experiment Name: At_100uM_ABA_Mutants_cDNA_P Parameter: Treatment Value: 100uM ABA vs. No Treatment
  misc_feature: MA Experiment ID: 20000071 Result: Up-regulated in Transcription
  misc_feature: MA Experiment 20000071 PARAMETER Experiment Name: At_100uM_ABA_Mutants_cDNA_P Parameter: Plant Line Value: CS8104
  misc_feature: MA Experiment 20000071 PARAMETER Experiment Name: At_100uM_ABA_Mutants_cDNA_P Parameter: Timepoint (hr) Value: 6
  misc_feature: MA Experiment 20000071 PARAMETER Experiment Name: At_100uM_ABA_Mutants_cDNA_P Parameter: Tissue Value: Aerial
  misc_feature: MA Experiment 20000071 PARAMETER Experiment Name: At_100uM_ABA_Mutants_cDNA_P Parameter: Treatment Value: 100uM ABA vs. No Treatment
  misc_feature: MA Experiment ID: 20000072 Result: Up-regulated in Transcription
  misc_feature: MA Experiment 20000072 PARAMETER Experiment Name: At_100uM_ABA_Mutants_cDNA_P Parameter: Plant Line Value: CS8105
  misc_feature: MA Experiment 20000072 PARAMETER Experiment Name: At_100uM_ABA_Mutants_cDNA_P Parameter: Timepoint (hr) Value: 6
  misc_feature: MA Experiment 20000072 PARAMETER Experiment Name: At_100uM_ABA_Mutants_cDNA_P Parameter: Tissue Value: Aerial
  misc_feature: MA Experiment 20000072 PARAMETER Experiment Name: At_100uM_ABA_Mutants_cDNA_P Parameter: Treatment Value: 100uM ABA vs. No Treatment
  misc_feature: MA Experiment ID: 20000086 Result: Up-regulated in Transcription
  misc_feature: MA Experiment 20000086 PARAMETER Experiment Name: At_100uM_ABA_Mutants_cDNA_P Parameter: Plant Line Value: CS22
  misc_feature: MA Experiment 20000086 PARAMETER Experiment Name: At_100uM_ABA_Mutants_cDNA_P Parameter: Timepoint (hr) Value: 6
  misc_feature: MA Experiment 20000086 PARAMETER Experiment Name: At_100uM_ABA_Mutants_cDNA_P Parameter: Tissue Value: Aerial
  misc_feature: MA Experiment 20000086 PARAMETER Experiment Name: At_100uM_ABA_Mutants_cDNA_P Parameter: Treatment Value: 100uM ABA vs. No Treatment
  misc_feature: MA Experiment ID: 20000088 Result: Up-regulated in Transcription
  misc_feature: MA Experiment 20000088 PARAMETER Experiment Name: At_100uM_ABA_Mutants_cDNA_P Parameter: Plant Line Value: Landsberg
  misc_feature: MA Experiment 20000088 PARAMETER Experiment Name: At_100uM_ABA_Mutants_cDNA_P Parameter: Timepoint (hr) Value: 6
  misc_feature: MA Experiment 20000088 PARAMETER Experiment Name: At_100uM_ABA_Mutants_cDNA_P Parameter: Tissue Value: Aerial
  misc_feature: MA Experiment 20000088 PARAMETER Experiment Name: At_100uM_ABA_Mutants_cDNA_P Parameter: Treatment Value: 100uM ABA vs. No Treatment
  misc_feature: MA Experiment ID: 20000090 Result: Up-regulated in Transcription
  misc_feature: MA Experiment ID: 20000117 Result: Up-regulated in Transcription
  misc_feature: MA Experiment 20000117 PARAMETER Experiment Name: At_100uM_ABA_Mutants_cDNA_P Parameter: Plant Line Value: Columbia
  misc_feature: MA Experiment 20000117 PARAMETER Experiment Name: At_100uM_ABA_Mutants_cDNA_P Parameter: Timepoint (hr) Value: 6
  misc_feature: MA Experiment 20000117 PARAMETER Experiment Name: At_100uM_ABA_Mutants_cDNA_P Parameter: Tissue Value: Aerial
  misc_feature: MA Experiment 20000117 PARAMETER Experiment Name: At_100uM_ABA_Mutants_cDNA_P Parameter: Treatment Value: 100uM ABA vs. No Treatment
  misc_feature: MA Experiment ID: 20000180 Result: Up-regulated in Transcription
  misc_feature: MA Experiment 20000180 PARAMETER Experiment Name: At_Germinating_Seeds_P Parameter: Age (hr) Value: 24 vs. 0
  misc_feature: MA Experiment 20000180 PARAMETER Experiment Name: At_Germinating_Seeds_P Parameter: Tissue Value: Germinating Seeds
  misc_feature: MA Experiment ID: 20000185 Result: Down-regulated in Transcription
  misc_feature: MA Experiment 20000185 PARAMETER Experiment Name: At_Roots__P Parameter: Age (day) Value: 7 vs. 21
  misc_feature: MA Experiment 20000185 PARAMETER Experiment Name: At_Roots__P Parameter: Organism Value: A. thaliana
  misc_feature: MA Experiment 20000185 PARAMETER Experiment Name: At_Roots__P Parameter: Tissue Value: Roots vs. Whole Plant
  misc_feature: MA Experiment ID: 20000227 Result: Down-regulated in Transcription
  misc_feature: MA Experiment 20000227 PARAMETER Experiment Name: At_Root-Tips-vs-Tops_P Parameter: Tissue Value: Root Tips vs. Root Tops
  misc_feature: MA Experiment ID: 20000286 Result: Down-regulated in Transcription
  misc_feature: MA Experiment 20000286 PARAMETER Experiment Name: At_Open_Flower_P Parameter: Age (day) Value: 21
  misc_feature: MA Experiment 20000286 PARAMETER Experiment Name: At_Open_Flower_P Parameter: Plant Line Value: WS
  misc_feature: MA Experiment 20000286 PARAMETER Experiment Name: At_Open_Flower_P Parameter: Tissue Value: Half Open vs. Whole Plant
  misc_feature: MA Experiment ID: 20000439 Result: Down-regulated in Transcription
  misc_feature: MA Experiment 20000439 PARAMETER Experiment Name: At_Roots__P Parameter: Age (day) Value: 14 vs. 21
  misc_feature: MA Experiment 20000439 PARAMETER Experiment Name: At_Roots__P Parameter: Organism Value: A. thaliana
  misc_feature: MA Experiment 20000439 PARAMETER Experiment Name: At_Roots__P Parameter: Tissue Value: Roots vs. Whole Plant
atgtctacatattcttcttctagctcagatctctcttttgttccgcttcagttccaatggcgtcgtgtattgctactgctcctctttctctatctggcgtgtctcaatctcattatgtgaaagctaatggattgtctacaacaacaaaactcagttctatttgtaaaacctctgatttgactattcacaagaaatcaaaccggactcgcaagttttctgtttctgcagggtatcgagatggaagtagaagcggaagcagtggtgatttcattgctggttttcttctaggaggtgctgtctttggcgctgttgcttatatctttgctccacagatccgaagatcggttctaaatgaagaagacgagtacggttttgagaagccgaaacagccaacgtactacgatgaaggtttagagaaaacaagagagacactgaatgagaaaataggacaacttaattcagcgatagacaatgtctcttcgcgtttacgaggtcgagaaaagaacacttcttccctaaatgtaccggtcgaaactgacccagaggttgaagctacgacttgaaggaagaaacaaacagctttcttcttctgtgtttcatttgtaaactagagttaaaaaaccattacttatatgtttgatttggttcttttctttctggtttgcctttgtgctcagtccttagtagaaagaactcttgcaaagtgaaatgtatacgtcttttggttttagtgtgaatttggttcaatttaattcgaaaaaatctttgttctct

SEQ ID NO: 22165 - protein, 168 aa, Arabidopsis thaliana
  peptide (1)..(168): Ceres Seq. ID no. 13490679
  misc_feature (1)..(167): Homolog of NCBI NO: 18400762 NR Description: expressed protein [Arabidopsis thaliana]
  misc_feature (1)..(60): Homolog of NCBI NO: 11357804 NR Description: hypothetical protein F5E19_10 - Arabidopsis
  misc_feature (1)..(167): Homolog of NCBI NO: 15233017 NR Description: expressed protein [Arabidopsis thaliana]
  misc_feature (14)..(168): Homolog of NCBI NO: 10176975 NR Description: protein; similar to unknown protein [Arabidopsis
  misc_feature (1)..(168): Homolog of NCBI NO: 17065406 NR Description: Unknown protein [Arabidopsis thaliana]
  misc_feature (1)..(168): Homolog of NCBI NO: 22326856 NR Description: protein; similar to unknown protein
MASCIATAPLSLSGVSQSHYVKANGLSTTTKLSSICKTSDLTIHKKSNRTRKFSVSAGYRDGSRSGSSGDFIAGFLLGGAVFGAVAYIFAPQIRRSVLNEEDEYGFEKPKQPTYYDEGLEKTRETLNEKIGQLNSAIDNVSSRLRGREKNTSSLNVPVETDPEVEATT

SEQ ID NO: 22166 - DNA, 768 bp, Arabidopsis thaliana
  misc_feature (1)..(768): Ceres Seq. ID no. 12334971
  misc_feature: MA Experiment ID: 20000307 Result: Up-regulated in Transcription
  misc_feature: MA Experiment 20000307 PARAMETER Experiment Name: At_Germinating_Seeds_Sub_P Parameter: Age (hr) Value: 24 vs. 0
  misc_feature: MA Experiment 20000307 PARAMETER Experiment Name: At_Germinating_Seeds_Sub_P Parameter: Organism Value: A. thaliana
  misc_feature: MA Experiment 20000307 PARAMETER Experiment Name: At_Germinating_Seeds_Sub_P Parameter: Plant Line Value: WS
  misc_feature: MA Experiment 20000307 PARAMETER Experiment Name: At_Germinating_Seeds_Sub_P Parameter: Tissue Value: Germinating Seeds
  misc_feature: MA Experiment ID: 20000315 Result: Down-regulated in Transcription
  misc_feature: MA Experiment 20000315 PARAMETER Experiment Name: At_14day_Shoots-Roots_Sub_P Parameter: Age (day) Value: 14
  misc_feature: MA Experiment 20000315 PARAMETER Experiment Name: At_14day_Shoots-Roots_Sub_P Parameter: Organism Value: A. thaliana
  misc_feature: MA Experiment 20000315 PARAMETER Experiment Name: At_14day_Shoots-Roots_Sub_P Parameter: Plant Line Value: WS
  misc_feature: MA Experiment 20000315 PARAMETER Experiment Name: At_14day_Shoots-Roots_Sub_P Parameter: Tissue Value: Shoots vs. Whole Plant
  misc_feature: MA Experiment ID: 20000328 Result: Down-regulated in Transcription
  misc_feature: MA Experiment 20000328 PARAMETER Experiment Name: At_42deg_Heat_Sub_P Parameter: Age (day) Value: 14
  misc_feature: MA Experiment 20000328 PARAMETER Experiment Name: At_42deg_Heat_Sub_P Parameter: Organism Value: A. thaliana
  misc_feature: MA Experiment 20000328 PARAMETER Experiment Name: At_42deg_Heat_Sub_P Parameter: Plant Line Value: WS
  misc_feature: MA Experiment 20000328 PARAMETER Experiment Name: At_42deg_Heat_Sub_P Parameter: Temperature (deg C) Value: 42 vs. 22
  misc_feature: MA Experiment 20000328 PARAMETER Experiment Name: At_42deg_Heat_Sub_P Parameter: Timepoint (hr) Value: 6
  misc_feature: MA Experiment 20000328 PARAMETER Experiment Name: At_42deg_Heat_Sub_P Parameter: Tissue Value: Aerial
  misc_feature: MA Experiment ID: 20000347 Result: Up-regulated in Transcription
  misc_feature: MA Experiment 20000347 PARAMETER Experiment Name: At_2mM_SA_Sub_P Parameter: Age (day) Value: 14
  misc_feature: MA Experiment 20000347 PARAMETER Experiment Name: At_2mM_SA_Sub_P Parameter: Organism Value: A. thaliana
  misc_feature: MA Experiment 20000347 PARAMETER Experiment Name: At_2mM_SA_Sub_P Parameter: Plant Line Value: WS
  misc_feature: MA Experiment 20000347 PARAMETER Experiment Name: At_2mM_SA_Sub_P Parameter: Timepoint (hr) Value: 6
  misc_feature: MA Experiment 20000347 PARAMETER Experiment Name: At_2mM_SA_Sub_P Parameter: Tissue Value: Aerial
  misc_feature: MA Experiment 20000347 PARAMETER Experiment Name: At_2mM_SA_Sub_P Parameter: Treatment Value: 2mM SA vs. No Treatment
aaaaaagtaaaaaaatcaatcatttataatttattatggagaagtgagagcaagtgttagcttttgatctttcttatattcttctctgaaatagtaacacactgtgaagagtttttcctacatctgaattttgtctgatccaggaaaaagaagaaaatggcgtttgtgacaactgcggaagtttgtgacgcgaatcaagagctgattcggagtggtcagctacgagctttgcaacccattttccagatttatggccgtcgacaaatattctcaggaccagttgtcactgtcaaagtttttgaagacaatggcttaatccgtcaattcatcgaggagaaaggaaacggtagagttcttgtggtggatggtggagggagtcaacgatgtgcaatactcggaggtaaccccgttgttcaagctcagaacaacggatgggcaggaatcgttgtgaacggatgcatcaaagacgtcgatgagatcaacggttgtgatatcggagtgagagctttggcctctcatccgataaaagcgagtaagaaaggacttggagaacaacgagttccggtaaatatcgcagggactcggatttgtgatggtgaatggctttatgcagatactgatgggattcttgtctcccaaattgagttatccgtttaataaaaaaggctttgatcagttaccaaaaaaaaaaacagaacgtggtttgtgttcatcttcttgttacttaagagattgttgaattataatggaaaataaatttttgttttg

SEQ ID NO: 22167 - protein, 166 aa, Arabidopsis thaliana
  peptide (1)..(166): Ceres Seq. ID no. 12334972
  misc_feature (2)..(159): Pfam Name: Demethylmenaquinone methyltransferase Pfam Description: Demethylmenaquinone methyltransferase
  misc_feature (1)..(160): Homolog of NCBI NO: 23103535 NR Description: hypothetical protein [Azotobacter vinelandii]
  misc_feature (1)..(160): Homolog of NCBI NO: 34497095 NR Description: S-adenosylmethionine:2-demethylmenaquinone
  misc_feature (4)..(164): Homolog of NCBI NO: 17546073 NR Description: PROBABLE
  misc_feature (1)..(164): Homolog of NCBI NO: 22978085 NR Description: hypothetical protein [Ralstonia metallidurans]
  misc_feature (1)..(164): Homolog of NCBI NO: 22982141 NR Description: hypothetical protein [Burkholderia fungorum]
  misc_feature (1)..(166): Homolog of NCBI NO: 15241161 NR Description: expressed protein; protein id: At5g56260.1
  misc_feature (4)..(166): Homolog of NCBI NO: 34910724 NR Description: S-adenosylmethionine:2-demethylmenaquinone
  misc_feature (1)..(166): Homolog of NCBI NO: 15232963 NR Description: expressed protein
  misc_feature (1)..(166): Homolog of NCBI NO: 21537415 NR Description: S-adenosylmethionine:2-demethylmenaquinone
  misc_feature (1)..(166): Homolog of NCBI NO: 15237348 NR Description: expressed protein
MAFVTTAEVCDANQELIRSGQLRALQPIFQIYGRRQIFSGPVVTVKVFEDNGLIRQFIEEKGNGRVLVVDGGGSQRCAILGGNPVVQAQNNGWAGIVVNGCIKDVDEINGCDIGVRALASHPIKASKKGLGEQRVPVNIAGTRICDGEWLYADTDGILVSQIELSV

SEQ ID NO: 22168 - DNA, 1577 bp, Arabidopsis thaliana
  misc_feature (1)..(1577): Ceres Seq. ID no. 12334977
  misc_feature: MA Experiment ID: 108569 Result: Up-regulated in Transcription
  misc_feature: MA Experiment 108569 PARAMETER Experiment Name: At_0.001%_MeJA__cDNA_P Parameter: Timepoint (hr) Value: 6
  misc_feature: MA Experiment 108569 PARAMETER Experiment Name: At_0.001%_MeJA__cDNA_P Parameter: Tissue Value: Aerial
  misc_feature: MA Experiment 108569 PARAMETER Experiment Name: At_0.001%_MeJA__cDNA_P Parameter: Treatment Value: 0.001% MeJA vs. No Treatment
  misc_feature: MA Experiment ID: 108573 Result: Up-regulated in Transcription
  misc_feature: MA Experiment 108573 PARAMETER Experiment Name: At_Drought_cDNA_P Parameter: Timepoint (hr) Value: 6
  misc_feature: MA Experiment 108573 PARAMETER Experiment Name: At_Drought_cDNA_P Parameter: Tissue Value: Aerial
  misc_feature: MA Experiment 108573 PARAMETER Experiment Name: At_Drought_cDNA_P Parameter: Treatment Value: Drought vs. No Drought
  misc_feature: MA Experiment ID: 108595 Result: Down-regulated in Transcription
  misc_feature: MA Experiment 108595 PARAMETER Experiment Name: At_Ler-pi_Ovule_cDNA_P Parameter: Plant Line Value: null
  misc_feature: MA Experiment ID: 20000111 Result: Down-regulated in Transcription
  misc_feature: MA Experiment 20000111 PARAMETER Experiment Name: At_42deg_Heat_cDNA_P Parameter: Temperature (deg C) Value: 42 vs. 22
  misc_feature: MA Experiment 20000111 PARAMETER Experiment Name: At_42deg_Heat_cDNA_P Parameter: Timepoint (hr) Value: 6
  misc_feature: MA Experiment 20000111 PARAMETER Experiment Name: At_42deg_Heat_cDNA_P Parameter: Tissue Value: Aerial
  misc_feature: MA Experiment ID: 20000113 Result: Down-regulated in Transcription
  misc_feature: MA Experiment 20000113 PARAMETER Experiment Name: At_42deg_Heat_cDNA_P Parameter: Temperature (deg C) Value: 42 vs. 22
  misc_feature: MA Experiment 20000113 PARAMETER Experiment Name: At_42deg_Heat_cDNA_P Parameter: Timepoint (hr) Value: 8
  misc_feature: MA Experiment 20000113 PARAMETER Experiment Name: At_42deg_Heat_cDNA_P Parameter: Tissue Value: Aerial
  misc_feature: MA Experiment ID: 20000144 Result: Down-regulated in Transcription
  misc_feature: MA Experiment 20000144 PARAMETER Experiment Name: At_42deg_Heat_cDNA_P Parameter: Temperature (deg C) Value: 42 vs. 22
  misc_feature: MA Experiment 20000144 PARAMETER Experiment Name: At_42deg_Heat_cDNA_P Parameter: Timepoint (hr) Value: 1
  misc_feature: MA Experiment 20000144 PARAMETER Experiment Name: At_42deg_Heat_cDNA_P Parameter: Tissue Value: Aerial
  misc_feature: MA Experiment ID: 20000171 Result: Down-regulated in Transcription
  misc_feature: MA Experiment 20000171 PARAMETER Experiment Name: At_42deg_Heat_P Parameter: Age (day) Value: 14
  misc_feature: MA Experiment 20000171 PARAMETER Experiment Name: At_42deg_Heat_P Parameter: Organism Value: A. thaliana
  misc_feature: MA Experiment 20000171 PARAMETER Experiment Name: At_42deg_Heat_P Parameter: Plant Line Value: WS
  misc_feature: MA Experiment 20000171 PARAMETER Experiment Name: At_42deg_Heat_P Parameter: Temperature (deg C) Value: 42 vs. 22
  misc_feature: MA Experiment 20000171 PARAMETER Experiment Name: At_42deg_Heat_P Parameter: Timepoint (hr) Value: 1
  misc_feature: MA Experiment 20000171 PARAMETER Experiment Name: At_42deg_Heat_P Parameter: Tissue Value: Aerial
  misc_feature: MA Experiment ID: 20000173 Result: Down-regulated in Transcription
  misc_feature: MA Experiment 20000173 PARAMETER Experiment Name: At_42deg_Heat_P Parameter: Age (day) Value: 14
  misc_feature: MA Experiment 20000173 PARAMETER Experiment Name: At_42deg_Heat_P Parameter: Organism Value: A. thaliana
  misc_feature: MA Experiment 20000173 PARAMETER Experiment Name: At_42deg_Heat_P Parameter: Plant Line Value: WS
  misc_feature: MA Experiment 20000173 PARAMETER Experiment Name: At_42deg_Heat_P Parameter: Temperature (deg C) Value: 42 vs. 22
  misc_feature: MA Experiment 20000173 PARAMETER Experiment Name: At_42deg_Heat_P Parameter: Timepoint (hr) Value: 6
  misc_feature: MA Experiment 20000173 PARAMETER Experiment Name: At_42deg_Heat_P Parameter: Tissue Value: Aerial
  misc_feature: MA Experiment ID: 20000437 Result: Down-regulated in Transcription
  misc_feature: MA Experiment 20000437 PARAMETER Experiment Name: At_Drought_P Parameter: Age (day) Value: 8
  misc_feature: MA Experiment 20000437 PARAMETER Experiment Name: At_Drought_P Parameter: Organism Value: A. thaliana
  misc_feature: MA Experiment 20000437 PARAMETER Experiment Name: At_Drought_P Parameter: Plant Line Value: WS
  misc_feature: MA Experiment 20000437 PARAMETER Experiment Name: At_Drought_P Parameter: Timepoint (hr) Value: 24
  misc_feature: MA Experiment 20000437 PARAMETER Experiment Name: At_Drought_P Parameter: Tissue Value: Whole Plant
  misc_feature: MA Experiment 20000437 PARAMETER Experiment Name: At_Drought_P Parameter: Treatment Value: Drought vs. No Drought
  misc_feature: MA Experiment ID: 20001555 Result: Down-regulated in Transcription
  misc_feature: MA Experiment 20001555 PARAMETER Experiment Name: At_Drought_Soil_Dry_P Parameter: Age (day) Value: 24
  misc_feature: MA Experiment 20001555 PARAMETER Experiment Name: At_Drought_Soil_Dry_P Parameter: Organism Value: A. thaliana
  misc_feature: MA Experiment 20001555 PARAMETER Experiment Name: At_Drought_Soil_Dry_P Parameter: Plant Line Value: WS
  misc_feature: MA Experiment 20001555 PARAMETER Experiment Name: At_Drought_Soil_Dry_P Parameter: Post Timepoint (hr) Value: None
  misc_feature: MA Experiment 20001555 PARAMETER Experiment Name: At_Drought_Soil_Dry_P Parameter: Post-Treatment Value: None
  misc_feature: MA Experiment 20001555 PARAMETER Experiment Name: At_Drought_Soil_Dry_P Parameter: Timepoint (day) Value: 10
  misc_feature: MA Experiment 20001555 PARAMETER Experiment Name: At_Drought_Soil_Dry_P Parameter: Treatment Value: Drought vs. No Drought
  misc_feature: MA Experiment ID: 20001556 Result: Down-regulated in Transcription
  misc_feature: MA Experiment 20001556 PARAMETER Experiment Name: At_Drought_Soil_Dry_P Parameter: Age (day) Value: 26
  misc_feature: MA Experiment 20001556 PARAMETER Experiment Name: At_Drought_Soil_Dry_P Parameter: Organism Value: A. thaliana
  misc_feature: MA Experiment 20001556 PARAMETER Experiment Name: At_Drought_Soil_Dry_P Parameter: Plant Line Value: WS
  misc_feature: MA Experiment 20001556 PARAMETER Experiment Name: At_Drought_Soil_Dry_P Parameter: Post Timepoint (hr) Value: None
  misc_feature: MA Experiment 20001556 PARAMETER Experiment Name: At_Drought_Soil_Dry_P Parameter: Post-Treatment Value: None
  misc_feature: MA Experiment 20001556 PARAMETER Experiment Name: At_Drought_Soil_Dry_P Parameter: Timepoint (day) Value: 12
  misc_feature: MA Experiment 20001556 PARAMETER Experiment Name: At_Drought_Soil_Dry_P Parameter: Treatment Value: Drought vs. No Drought
  misc_feature: MA Experiment ID: 20001905 Result: Down-regulated in Transcription
  misc_feature: MA Experiment 20001905 PARAMETER Experiment Name: At_Drought_Reproduction_P Parameter: Age (day) Value: 40
  misc_feature: MA Experiment 20001905 PARAMETER Experiment Name: At_Drought_Reproduction_P Parameter: Organism Value: A. thaliana
  misc_feature: MA Experiment 20001905 PARAMETER Experiment Name: At_Drought_Reproduction_P Parameter: Plant Line Value: WS
  misc_feature: MA Experiment 20001905 PARAMETER Experiment Name: At_Drought_Reproduction_P Parameter: Timepoint (day) Value: 10
  misc_feature: MA Experiment 20001905 PARAMETER Experiment Name: At_Drought_Reproduction_P Parameter: Tissue Value: Rosettes
  misc_feature: MA Experiment 20001905 PARAMETER Experiment Name: At_Drought_Reproduction_P Parameter: Treatment Value: Drought vs. No Drought
attttatctaaaacgaaaaaaaaagaaaagaagagaagcttttttagttctctctgcccaatggagaaaagaagaaccagagattgccaaatcatcttctgcaaaagcacccatcaaagaaattacttgtaaatagaaaacaaatcatcaaatctggaagacaaatcattaaaaaaggcgacaactttttttggttcagattttgaaaatttgattttttatttttcttatcttggcgatcgaatcctatccgaaagattgaaacttgggaggtgggtaagtgagtgaatggcgcaacaagggcagggaagcatggaccctgctgttctcgacgacatcattcgtcgtttacttgattaccgaaaccctaaagctgggaccaaacaagctatgctcaacgattctgagatccgacagctttgctttgtctctagagagatatttcttcaacagccttgtcttcttgagctcgctgcccctgttaagatctgcggtgatattcatggtcaatactcagatttattgaggcttttcgagtatggaggtttccctcctgcagcaaactacttattcttaggagattacgttgaccgcggaaagcagagtttggagactatttgtcttctgcttgcttacaagatcaaataccctgaaaacttttttctcttaagaggaaaccatgagtgtgcatctattaacagaatttacggattctatgacgaatgtaaacgaagattcaacgtgaagctctggaaagtgtttaccgatacttttaactgtctccctgtggctgctgtcatagatgaaaagatactttgtatgcatggtggactatctcctgagttgatcaatgtggaacaaattaagaacatagagcgtccaactgatgttccagacgctggtttgctctgtgaccttctttggtctgatcctagtaaagatgtcaaaggctgggggatgaatgatcgtggtgtctcctacacttttggtgctgacaaagttgctgagtttttaataaagaatgatatggatttagtctgtcgtgcccaccaggttgtagaggatgggtatgagttctttgctgatagacagcttgtgactatgttttctgctccaaactactgtggtgaatttgacaatgcgggtgcattgatgagtgtcgacgaaagtttaatgtgctctttccaaattcttaagcctgtggatcggaggtcgcggttcttttgaagagaaagagtccttcttaagttataaccctgattcaaatcttatgggaagaatgggaggagaaaaagcgacaacggatgttggtggcggataattctgaacctccacgagtagtctccgaagttgcaaaagcaacaatatatatatttacatggttatatcatctctgccacttcttttgaatatgatcttgtttcttcaactcaattttttgctctgtttccttctctgttctttcacatgtcagagatacaaatcctctaagtgtatataatactttatatgtatgtatcagaacctcactgcaggatgcttcagttcatgattcttattaaaacagagggttctct

SEQ ID NO: 22169 - protein, 312 aa, Arabidopsis thaliana
  peptide (1)..(312): Ceres Seq. ID no. 12334978
  misc_feature (63)..(258): Pfam Name: Calcineurin-like phosphoesterase Pfam Description: Calcineurin-like phosphoesterase
  misc_feature (9)..(310): Homolog of NCBI NO: 7435129 NR Description: phosphoprotein phosphatase (EC 3.1.3.16),
  misc_feature (7)..(311): Homolog of NCBI NO: 1346764 NR Description: SERINE/THREONINE PROTEIN PHOSPHATASE PP1
  misc_feature (3)..(311): Homolog of NCBI NO: 15227080 NR Description: phosphoprotein phosphatase-type 1 catalytic
  misc_feature (1)..(311): Homolog of NCBI NO: 11133833 NR Description: Serine/threonine protein phosphatase PP1 isozyme
  misc_feature (3)..(311): Homolog of NCBI NO: 11133831 NR Description: Serine/threonine protein phosphatase PP1 isozyme
  misc_feature (1)..(311): Homolog of NCBI NO: 5917726 NR Description: serine/threonine protein phosphatase 1; PP1
  misc_feature (1)..(311): Homolog of NCBI NO: 99751 NR Description: phosphoprotein phosphatase (EC 3.1.3.16) 1A
  misc_feature (1)..(311): Homolog of NCBI NO: 15237829 NR Description: protein phosphatase 1A
  misc_feature (9)..(312): Homolog of NCBI NO: 21592807 NR Description: phosphoprotein phosphatase [Arabidopsis thaliana]
  misc_feature (1)..(312): Homolog of NCBI NO: 15232651 NR Description: phosphoprotein phosphatase 1, PP1
MAQQGQGSMDPAVLDDIIRRLLDYRNPKAGTKQAMLNDSEIRQLCFVSREIFLQQPCLLELAAPVKICGDIHGQYSDLLRLFEYGGFPPAANYLFLGDYVDRGKQSLETICLLLAYKIKYPENFFLLRGNHECASINRIYGFYDECKRRFNVKLWKVFTDTFNCLPVAAVIDEKILCMHGGLSPELINVEQIKNIERPTDVPDAGLLCDLLWSDPSKDVKGWGMNDRGVSYTFGADKVAEFLIKNDMDLVCRAHQVVEDGYEFFADRQLVTMFSAPNYCGEFDNAGALMSVDESLMCSFQILKPVDRRSRFF

SEQ ID NO: 22170 - protein, 304 aa, Arabidopsis thaliana
  peptide (1)..(304): Ceres Seq. ID no. 12334979
  misc_feature (55)..(250): Pfam Name: Calcineurin-like phosphoesterase Pfam Description: Calcineurin-like phosphoesterase
  misc_feature (1)..(302): Homolog of NCBI NO: 7435129 NR Description: phosphoprotein phosphatase (EC 3.1.3.16),
  misc_feature (1)..(303): Homolog of NCBI NO: 1346764 NR Description: SERINE/THREONINE PROTEIN PHOSPHATASE PP1
  misc_feature (1)..(303): Homolog of NCBI NO: 15227080 NR Description: phosphoprotein phosphatase-type 1 catalytic
  misc_feature (1)..(303): Homolog of NCBI NO: 11133833 NR Description: Serine/threonine protein phosphatase PP1 isozyme
  misc_feature (1)..(303): Homolog of NCBI NO: 11133831 NR Description: Serine/threonine protein phosphatase PP1 isozyme
  misc_feature (1)..(303): Homolog of NCBI NO: 5917726 NR Description: serine/threonine protein phosphatase 1; PP1
  misc_feature (1)..(303): Homolog of NCBI NO: 99751 NR Description: phosphoprotein phosphatase (EC 3.1.3.16) 1A
  misc_feature (1)..(303): Homolog of NCBI NO: 15237829 NR Description: protein phosphatase 1A
  misc_feature (1)..(304): Homolog of NCBI NO: 21592807 NR Description: phosphoprotein phosphatase [Arabidopsis thaliana]
  misc_feature (1)..(304): Homolog of NCBI NO: 15232651 NR Description: phosphoprotein phosphatase 1, PP1
MDPAVLDDIIRRLLDYRNPKAGTKQAMLNDSEIRQLCFVSREIFLQQPCLLELAAPVKICGDIHGQYSDLLRLFEYGGFPPAANYLFLGDYVDRGKQSLETICLLLAYKIKYPENFFLLRGNHECASINRIYGFYDECKRRFNVKLWKVFTDTFNCLPVAAVIDEKILCMHGGLSPELINVEQIKNIERPTDVPDAGLLCDLLWSDPSKDVKGWGMNDRGVSYTFGADKVAEFLIKNDMDLVCRAHQVVEDGYEFFADRQLVTMFSAPNYCGEFDNAGALMSVDESLMCSFQILKPVDRRSRFF

SEQ ID NO: 22171 - protein, 278 aa, Arabidopsis thaliana
  peptide (1)..(278): Ceres Seq. ID no. 12334980
  misc_feature (29)..(224): Pfam Name: Calcineurin-like phosphoesterase Pfam Description: Calcineurin-like phosphoesterase
  misc_feature (1)..(276): Homolog of NCBI NO: 7435129 NR Description: phosphoprotein phosphatase (EC 3.1.3.16),
  misc_feature (1)..(277): Homolog of NCBI NO: 1346764 NR Description: SERINE/THREONINE PROTEIN PHOSPHATASE PP1
  misc_feature (1)..(277): Homolog of NCBI NO: 15227080 NR Description: phosphoprotein phosphatase-type 1 catalytic
  misc_feature (1)..(277): Homolog of NCBI NO: 11133833 NR Description: Serine/threonine protein phosphatase PP1 isozyme
  misc_feature (1)..(277): Homolog of NCBI NO: 11133831 NR Description: Serine/threonine protein phosphatase PP1 isozyme
  misc_feature (1)..(277): Homolog of NCBI NO: 5917726 NR Description: serine/threonine protein phosphatase 1; PP1
  misc_feature (1)..(277): Homolog of NCBI NO: 99751 NR Description: phosphoprotein phosphatase (EC 3.1.3.16) 1A
  misc_feature (1)..(277): Homolog of NCBI NO: 15237829 NR Description: protein phosphatase 1A
  misc_feature (1)..(278): Homolog of NCBI NO: 21592807 NR Description: phosphoprotein phosphatase [Arabidopsis thaliana]
  misc_feature (1)..(278): Homolog of NCBI NO: 15232651 NR Description: phosphoprotein phosphatase 1, PP1
MLNDSEIRQLCFVSREIFLQQPCLLELAAPVKICGDIHGQYSDLLRLFEYGGFPPAANYLFLGDYVDRGKQSLETICLLLAYKIKYPENFFLLRGNHECASINRIYGFYDECKRRFNVKLWKVFTDTFNCLPVAAVIDEKILCMHGGLSPELINVEQIKNIERPTDVPDAGLLCDLLWSDPSKDVKGWGMNDRGVSYTFGADKVAEFLIKNDMDLVCRAHQVVEDGYEFFADRQLVTMFSAPNYCGEFDNAGALMSVDESLMCSFQILKPVDRRSRFF

SEQ ID NO: 22172 - DNA, 2061 bp, Arabidopsis thaliana
  misc_feature (1)..(2061): Ceres Seq. ID no. 13490638
  misc_feature: MA Experiment ID: 108569 Result: Up-regulated in Transcription
  misc_feature: MA Experiment 108569 PARAMETER Experiment Name: At_0.001%_MeJA__cDNA_P Parameter: Timepoint (hr) Value: 6
  misc_feature: MA Experiment 108569 PARAMETER Experiment Name: At_0.001%_MeJA__cDNA_P Parameter: Tissue Value: Aerial
  misc_feature: MA Experiment 108569 PARAMETER Experiment Name: At_0.001%_MeJA__cDNA_P Parameter: Treatment Value: 0.001% MeJA vs. No Treatment
  misc_feature: MA Experiment ID: 108573 Result: Up-regulated in Transcription
  misc_feature: MA Experiment 108573 PARAMETER Experiment Name: At_Drought_cDNA_P Parameter: Timepoint (hr) Value: 6
  misc_feature: MA Experiment 108573 PARAMETER Experiment Name: At_Drought_cDNA_P Parameter: Tissue Value: Aerial
  misc_feature: MA Experiment 108573 PARAMETER Experiment Name: At_Drought_cDNA_P Parameter: Treatment Value: Drought vs. No Drought
  misc_feature: MA Experiment ID: 20000224 Result: Down-regulated in Transcription
  misc_feature: MA Experiment ID: 20001905 Result: Up-regulated in Transcription
  misc_feature: MA Experiment 20001905 PARAMETER Experiment Name: At_Drought_Reproduction_P Parameter: Age (day) Value: 40
  misc_feature: MA Experiment 20001905 PARAMETER Experiment Name: At_Drought_Reproduction_P Parameter: Organism Value: A. thaliana
  misc_feature: MA Experiment 20001905 PARAMETER Experiment Name: At_Drought_Reproduction_P Parameter: Plant Line Value: WS
  misc_feature: MA Experiment 20001905 PARAMETER Experiment Name: At_Drought_Reproduction_P Parameter: Timepoint (day) Value: 10
  misc_feature: MA Experiment 20001905 PARAMETER Experiment Name: At_Drought_Reproduction_P Parameter: Tissue Value: Rosettes
  misc_feature: MA Experiment 20001905 PARAMETER Experiment Name: At_Drought_Reproduction_P Parameter: Treatment Value: Drought vs. No Drought
agagagacatttcgccattagatcctcttttttttcttcgtaggtcgaacgaaattttgtgtttcgttgaggagaaaattgagccgtgtttgtgttgagatgtctatgatcgatgagccgttgtacccaatcgccgtacttatagacgagttaaaaaacgatgatattcagctaagattgaattccatcagaaggctttctacgatcgctcgtgctcttggggaagagaggactagaaaggaattgatccctttccttagcgaaaacaatgacgatgatgatgaggttttattagcaatggctgaagaattgggtgtgtttattccttatgttggtggtgttgagtatgcacatgttcttcttccacctttggaaactctttcgactgtcgaagaaacttgtgttagggagaaagctgttgagtcgctttgtagagttggctctcagatgagggagagtgacttggttgatcatttcatttcgttagttaagcgacttgccgctggtgagtggttcacagctagagtatcggcttgcggtgttttccatattgcatacccgagcgcgccggatatgttgaagactgagttaagatcgttgtatactcagctttgtcaggatgatatgccgatggtaaggagagctgcagcaactaatcttgggaaatttgctgctacggttgaatcagcgcatttgaagaccgacgttatgtccatgtttgaggatcttactcaagatgatcaagattctgttagattattggccgttgagggttgtgctgctcttgggaaattgttggagcctcaggattgtgtccaacacattcttcccgtgattgttaatttctcgcaggataagtcttggcgtgtgcgctatatggttgcaaatcaactctacgagctttgtgaagccgtgggacctgagcctactaggacggagctggtgcctgcatatgtgcgcctacttcgtgataatgaagctgaagtacgcatagcagctgccggaaaagttacaaagttttgtcggattctaaaccctgaaattgctatccagcacattctcccctgtgtgaaggagctatcatcagactcttctcagcatgtcagatctgcattggcctcagttataatgggaatggctccagtcttgggtaaggatgcaacaattgagcatctccttccaatctttctttctctattgaaagatgagttcccggatgtacgcttgaacattatcagcaaacttgaccaagtgaatcaggttattgggattgatctactatcacaatccttgttgccagctattgtagaacttgctgaagatagacactggagagtaagacttgctataatcgagtatatccctttgttggcaagtcagttaggtgttggcttctttgacgataagcttggtgctctttgcatgcaatggttacaagacaaggttcactcaatccgcgatgctgctgctaacaatctcaagcggcttgctgaggaatttggtcctgaatgggcaatgcaacatatagttcctcaggttcttgagatggttaacaaccctcactatctctaccgaatgaccattttgcgtgcggtgtctcttcttgcacctgtaatgggctcagagattacatgctctaagctcttacctgtagtaatgactgcatctaaagacagagttccaaacatcaaattcaacgtcgctaaagtacttcaatccctcattccaatagttgatcaatcggttgtggagaagacgattcgtcctgggcttgtggagctaagcgaggatccagatgttgatgtcaggtttttcgcaaaccaagctctacaatctattgacaatgtgatgatgtctagctaaaaacattagatcttgtctctctgcttataatcgttttctatttgattgaaaaaaaaaacaaatctcaagacttttgtaacgtagtagtggattctcgtcttgtgttttttattacacgcaaactactagagtgcctcggtacgggttttgtccattgtcttgctactaatgtgtttaaaactctatgttgataactaa

SEQ ID NO: 22173 - protein, 587 aa, Arabidopsis thaliana
  peptide (1)..(587): Ceres Seq. ID no. 13490639
  misc_feature (234)..(272): Pfam Name: HEAT repeat Pfam Description: HEAT repeat
  misc_feature (1)..(581): Homolog of NCBI NO: 15222601 NR Description: serine/threonine protein phosphatase 2A, 65 KDa
  misc_feature (1)..(587): Homolog of NCBI NO: 11094367 NR Description: Ser/Thr specific protein phosphatase 2A A
  misc_feature (1)..(587): Homolog of NCBI NO: 5679684 NR Description: phosphatase 2A regulatory A subunit [Oryza
  misc_feature (1)..(586): Homolog of NCBI NO: 7447393 NR Description: phosphoprotein phosphatase (EC 3.1.3.16) 2A
  misc_feature (3)..(587): Homolog of NCBI NO: 11094365 NR Description: Ser/Thr specific protein phosphatase 2A A
  misc_feature (1)..(581): Homolog of NCBI NO: 1254996 NR Description: serine/threonine protein phosphatase type 2A
  misc_feature (1)..(587): Homolog of NCBI NO: 25313492 NR Description: probable protein phosphotase 2a 65K chain -
  misc_feature (1)..(587): Homolog of NCBI NO: 22329534 NR Description: serine/threonine protein phosphatase 2A
  misc_feature (1)..(587): Homolog of NCBI NO: 1076389 NR Description: phosphoprotein phosphatase 2A 65K regulatory
  misc_feature (1)..(587): Homolog of NCBI NO: 15230896 NR Description: serine/threonine protein phosphatase 2A, 65 KDa
MSMIDEPLYPIAVLIDELKNDDIQLRLNSIRRLSTIARALGEERTRKELIPFLSENNDDDDEVLLAMAEELGVFIPYVGGVEYAHVLLPPLETLSTVEETCVREKAVESLCRVGSQMRESDLVDHFISLVKRLAAGEWFTARVSACGVFHIAYPSAPDMLKTELRSLYTQLCQDDMPMVRRAAATNLGKFAATVESAHLKTDVMSMFEDLTQDDQDSVRLLAVEGCAALGKLLEPQDCVQHILPVIVNFSQDKSWRVRYMVANQLYELCEAVGPEPTRTELVPAYVRLLRDNEAEVRIAAAGKVTKFCRILNPEIAIQHILPCVKELSSDSSQHVRSALASVIMGMAPVLGKDATIEHLLPIFLSLLKDEFPDVRLNIISKLDQVNQVIGIDLLSQSLLPAIVELAEDRHWRVRLAIIEYIPLLASQLGVGFFDDKLGALCMQWLQDKVHSIRDAAANNLKRLAEEFGPEWAMQHIVPQVLEMVNNPHYLYRMTILRAVSLLAPVMGSEITCSKLLPVVMTASKDRVPNIKFNVAKVLQSLIPIVDQSVVEKTIRPGLVELSEDPDVDVRFFANQALQSIDNVMMSS

SEQ ID NO: 22174 - protein, 585 aa, Arabidopsis thaliana
  peptide (1)..(585): Ceres Seq. ID no. 13490640
  misc_feature (232)..(270): Pfam Name: HEAT repeat Pfam Description: HEAT repeat
  misc_feature (1)..(579): Homolog of NCBI NO: 1254996 NR Description: serine/threonine protein phosphatase type 2A
  misc_feature (1)..(579): Homolog of NCBI NO: 15222601 NR Description: serine/threonine protein phosphatase 2A, 65 KDa
  misc_feature (1)..(585): Homolog of NCBI NO: 11094367 NR Description: Ser/Thr specific protein phosphatase 2A A
  misc_feature (1)..(585): Homolog of NCBI NO: 5679684 NR Description: phosphatase 2A regulatory A subunit [Oryza
  misc_feature (1)..(584): Homolog of NCBI NO: 7447393 NR Description: phosphoprotein phosphatase (EC 3.1.3.16) 2A
  misc_feature (1)..(585): Homolog of NCBI NO: 11094365 NR Description: Ser/Thr specific protein phosphatase 2A A
  misc_feature (1)..(585): Homolog of NCBI NO: 25313492 NR Description: probable protein phosphotase 2a 65K chain -
  misc_feature (1)..(585): Homolog of NCBI NO: 22329534 NR Description: serine/threonine protein phosphatase 2A
  misc_feature (1)..(585): Homolog of NCBI NO: 1076389 NR Description: phosphoprotein phosphatase 2A 65K regulatory
  misc_feature (1)..(585): Homolog of NCBI NO: 15230896 NR Description: serine/threonine protein phosphatase 2A, 65 KDa
MIDEPLYPIAVLIDELKNDDIQLRLNSIRRLSTIARALGEERTRKELIPFLSENNDDDDEVLLAMAEELGVFIPYVGGVEYAHVLLPPLETLSTVEETCVREKAVESLCRVGSQMRESDLVDHFISLVKRLAAGEWFTARVSACGVFHIAYPSAPDMLKTELRSLYTQLCQDDMPMVRRAAATNLGKFAATVESAHLKTDVMSMFEDLTQDDQDSVRLLAVEGCAALGKLLEPQDCVQHILPVIVNFSQDKSWRVRYMVANQLYELCEAVGPEPTRTELVPAYVRLLRDNEAEVRIAAAGKVTKFCRILNPEIAIQHILPCVKELSSDSSQHVRSALASVIMGMAPVLGKDATIEHLLPIFLSLLKDEFPDVRLNIISKLDQVNQVIGIDLLSQSLLPAIVELAEDRHWRVRLAIIEYIPLLASQLGVGFFDDKLGALCMQWLQDKVHSIRDAAANNLKRLAEEFGPEWAMQHIVPQVLEMVNNPHYLYRMTILRAVSLLAPVMGSEITCSKLLPVVMTASKDRVPNIKFNVAKVLQSLIPIVDQSVVEKTIRPGLVELSEDPDVDVRFFANQALQSIDNVMMSS

SEQ ID NO: 22175 - protein, 521 aa, Arabidopsis thaliana
  peptide (1)..(521): Ceres Seq. ID no. 13490641
  misc_feature (168)..(206): Pfam Name: HEAT repeat Pfam Description: HEAT repeat
  misc_feature (1)..(515): Homolog of NCBI NO: 1254996 NR Description: serine/threonine protein phosphatase type 2A
  misc_feature (1)..(515): Homolog of NCBI NO: 15222601 NR Description: serine/threonine protein phosphatase 2A, 65 KDa
  misc_feature (1)..(521): Homolog of NCBI NO: 11094367 NR Description: Ser/Thr specific protein phosphatase 2A A
  misc_feature (1)..(521): Homolog of NCBI NO: 5679684 NR Description: phosphatase 2A regulatory A subunit [Oryza
  misc_feature (1)..(520): Homolog of NCBI NO: 7447393 NR Description: phosphoprotein phosphatase (EC 3.1.3.16) 2A
  misc_feature (1)..(521): Homolog of NCBI NO: 11094365 NR Description: Ser/Thr specific protein phosphatase 2A A
  misc_feature (1)..(521): Homolog of NCBI NO: 25313492 NR Description: probable protein phosphotase 2a 65K chain -
  misc_feature (1)..(521): Homolog of NCBI NO: 22329534 NR Description: serine/threonine protein phosphatase 2A
  misc_feature (1)..(521): Homolog of NCBI NO: 1076389 NR Description: phosphoprotein phosphatase 2A 65K regulatory
  misc_feature (1)..(521): Homolog of NCBI NO: 15230896 NR Description: serine/threonine protein phosphatase 2A, 65 KDa
MAEELGVFIPYVGGVEYAHVLLPPLETLSTVEETCVREKAVESLCRVGSQMRESDLVDHFISLVKRLAAGEWFTARVSACGVFHIAYPSAPDMLKTELRSLYTQLCQDDMPMVRRAAATNLGKFAATVESAHLKTDVMSMFEDLTQDDQDSVRLLAVEGCAALGKLLEPQDCVQHILPVIVNFSQDKSWRVRYMVANQLYELCEAVGPEPTRTELVPAYVRLLRDNEAEVRIAAAGKVTKFCRILNPEIAIQHILPCVKELSSDSSQHVRSALASVIMGMAPVLGKDATIEHLLPIFLSLLKDEFPDVRLNIISKLDQVNQVIGIDLLSQSLLPAIVELAEDRHWRVRLAIIEYIPLLASQLGVGFFDDKLGALCMQWLQDKVHSIRDAAANNLKRLAEEFGPEWAMQHIVPQVLEMVNNPHYLYRMTILRAVSLLAPVMGSEITCSKLLPVVMTASKDRVPNIKFNVAKVLQSLIPIVDQSVVEKTIRPGLVELSEDPDVDVRFFANQALQSIDNVMMSS

SEQ ID NO: 22176 - DNA, 1184 bp, Arabidopsis thaliana
  misc_feature (1)..(1184): Ceres Seq. ID no. 12339509
  misc_feature: MA Experiment ID: 108434 Result: Up-regulated in Transcription
  misc_feature: MA Experiment 108434 PARAMETER Experiment Name: At_Root_Tips_cDNA_P Parameter: Tissue Value: Root Tips
  misc_feature: MA Experiment ID: 108461 Result: Up-regulated in Transcription
  misc_feature: MA Experiment 108461 PARAMETER Experiment Name: At_Germinating_Seeds_cDNA_P Parameter: Age (day) Value: 1 vs. 0
  misc_feature: MA Experiment 108461 PARAMETER Experiment Name: At_Germinating_Seeds_cDNA_P Parameter: Tissue Value: Germinating Seeds
  misc_feature: MA Experiment ID: 108462 Result: Up-regulated in Transcription
  misc_feature: MA Experiment 108462 PARAMETER Experiment Name: At_Germinating_Seeds_cDNA_P Parameter: Age (day) Value: 2 vs. 0
  misc_feature: MA Experiment 108462 PARAMETER Experiment Name: At_Germinating_Seeds_cDNA_P Parameter: Tissue Value: Germinating Seeds
  misc_feature: MA Experiment ID: 108464 Result: Up-regulated in Transcription
  misc_feature: MA Experiment 108464 PARAMETER Experiment Name: At_Germinating_Seeds_cDNA_P Parameter: Age (day) Value: 4 vs. 0
  misc_feature: MA Experiment 108464 PARAMETER Experiment Name: At_Germinating_Seeds_cDNA_P Parameter: Tissue Value: Germinating Seeds
  misc_feature: MA Experiment ID: 20000111 Result: Up-regulated in Transcription
  misc_feature: MA Experiment 20000111 PARAMETER Experiment Name: At_42deg_Heat_cDNA_P Parameter: Temperature (deg C) Value: 42 vs. 22
  misc_feature: MA Experiment 20000111 PARAMETER Experiment Name: At_42deg_Heat_cDNA_P Parameter: Timepoint (hr) Value: 6
  misc_feature: MA Experiment 20000111 PARAMETER Experiment Name: At_42deg_Heat_cDNA_P Parameter: Tissue Value: Aerial
  misc_feature: MA Experiment ID: 20000112 Result: Up-regulated in Transcription
  misc_feature: MA Experiment 20000112 PARAMETER Experiment Name: At_42deg_Heat_cDNA_P Parameter: Temperature (deg C) Value: 42 vs. 22
  misc_feature: MA Experiment 20000112 PARAMETER Experiment Name: At_42deg_Heat_cDNA_P Parameter: Timepoint (hr) Value: 2
  misc_feature: MA Experiment 20000112 PARAMETER Experiment Name: At_42deg_Heat_cDNA_P Parameter: Tissue Value: Aerial
  misc_feature: MA Experiment ID: 20000173 Result: Up-regulated in Transcription
  misc_feature: MA Experiment 20000173 PARAMETER Experiment Name: At_42deg_Heat_P Parameter: Age (day) Value: 14
  misc_feature: MA Experiment 20000173 PARAMETER Experiment Name: At_42deg_Heat_P Parameter: Organism Value: A. thaliana
  misc_feature: MA Experiment 20000173 PARAMETER Experiment Name: At_42deg_Heat_P Parameter: Plant Line Value: WS
  misc_feature: MA Experiment 20000173 PARAMETER Experiment Name: At_42deg_Heat_P Parameter: Temperature (deg C) Value: 42 vs. 22
  misc_feature: MA Experiment 20000173 PARAMETER Experiment Name: At_42deg_Heat_P Parameter: Timepoint (hr) Value: 6
  misc_feature: MA Experiment 20000173 PARAMETER Experiment Name: At_42deg_Heat_P Parameter: Tissue Value: Aerial
  misc_feature: MA Experiment ID: 20000180 Result: Up-regulated in Transcription
  misc_feature: MA Experiment 20000180 PARAMETER Experiment Name: At_Germinating_Seeds_P Parameter: Age (hr) Value: 24 vs. 0
  misc_feature: MA Experiment 20000180 PARAMETER Experiment Name: At_Germinating_Seeds_P Parameter: Tissue Value: Germinating Seeds
  misc_feature: MA Experiment ID: 20000234 Result: Up-regulated in Transcription
  misc_feature: MA Experiment 20000234 PARAMETER Experiment Name: At_Siliques_P Parameter: Age (day) Value: 21
  misc_feature: MA Experiment 20000234 PARAMETER Experiment Name: At_Siliques_P Parameter: Organism Value: A. thaliana
  misc_feature: MA Experiment 20000234 PARAMETER Experiment Name: At_Siliques_P Parameter: Plant Line Value: WS
  misc_feature: MA Experiment 20000234 PARAMETER Experiment Name: At_Siliques_P Parameter: Tissue Value: Less Than 5mm Siliques vs. Whole Plant
  misc_feature: MA Experiment ID: 20000265 Result: Up-regulated in Transcription
  misc_feature: MA Experiment 20000265 PARAMETER Experiment Name: At_Open_Flower_P Parameter: Age (day) Value: 21
  misc_feature: MA Experiment 20000265 PARAMETER Experiment Name: At_Open_Flower_P Parameter: Plant Line Value: WS
  misc_feature: MA Experiment 20000265 PARAMETER Experiment Name: At_Open_Flower_P Parameter: Tissue Value: Closed Flower vs. Whole Plant
  misc_feature: MA Experiment ID: 20000286 Result: Up-regulated in Transcription
  misc_feature: MA Experiment 20000286 PARAMETER Experiment Name: At_Open_Flower_P Parameter: Age (day) Value: 21
  misc_feature: MA Experiment 20000286 PARAMETER Experiment Name: At_Open_Flower_P Parameter: Plant Line Value: WS
  misc_feature: MA Experiment 20000286 PARAMETER Experiment Name: At_Open_Flower_P Parameter: Tissue Value: Half Open vs. Whole Plant
  misc_feature: MA Experiment ID: 20000437 Result: Down-regulated in Transcription
  misc_feature: MA Experiment 20000437 PARAMETER Experiment Name: At_Drought_P Parameter: Age (day) Value: 8
  misc_feature: MA Experiment 20000437 PARAMETER Experiment Name: At_Drought_P Parameter: Organism Value: A. thaliana
  misc_feature: MA Experiment 20000437 PARAMETER Experiment Name: At_Drought_P Parameter: Plant Line Value: WS
  misc_feature: MA Experiment 20000437 PARAMETER Experiment Name: At_Drought_P Parameter: Timepoint (hr) Value: 24
  misc_feature: MA Experiment 20000437 PARAMETER Experiment Name: At_Drought_P Parameter: Tissue Value: Whole Plant
  misc_feature: MA Experiment 20000437 PARAMETER Experiment Name: At_Drought_P Parameter: Treatment Value: Drought vs. No Drought
  misc_feature: MA Experiment ID: 20000495 Result: Up-regulated in Transcription
  misc_feature: MA Experiment 20000495 PARAMETER Experiment Name: At_Guard_Cells_P Parameter: Harvest Date Value: 8/2/2002
  misc_feature: MA Experiment 20000495 PARAMETER Experiment Name: At_Guard_Cells_P Parameter: Organism Value: A. thaliana
  misc_feature: MA Experiment 20000495 PARAMETER Experiment Name: At_Guard_Cells_P Parameter: Tissue Value: Guard Cells vs. Leaves
  misc_feature: MA Experiment ID: 20000794 Result: Down-regulated in Transcription
  misc_feature: MA Experiment 20000794 PARAMETER Experiment Name: At_Petals_P Parameter: Age (day) Value: 23-25 days
  misc_feature: MA Experiment 20000794 PARAMETER Experiment Name: At_Petals_P Parameter: Plant Line Value: WS
  misc_feature: MA Experiment 20000794 PARAMETER Experiment Name: At_Petals_P Parameter: Tissue Value: Petals vs. Whole plant
  misc_feature: MA Experiment ID: 20001555 Result: Down-regulated in Transcription
  misc_feature: MA Experiment 20001555 PARAMETER Experiment Name: At_Drought_Soil_Dry_P Parameter: Age (day) Value: 24
  misc_feature: MA Experiment 20001555 PARAMETER Experiment Name: At_Drought_Soil_Dry_P Parameter: Organism Value: A. thaliana
  misc_feature: MA Experiment 20001555 PARAMETER Experiment Name: At_Drought_Soil_Dry_P Parameter: Plant Line Value: WS
  misc_feature: MA Experiment 20001555 PARAMETER Experiment Name: At_Drought_Soil_Dry_P Parameter: Post Timepoint (hr) Value: None
  misc_feature: MA Experiment 20001555 PARAMETER Experiment Name: At_Drought_Soil_Dry_P Parameter: Post-Treatment Value: None
  misc_feature: MA Experiment 20001555 PARAMETER Experiment Name: At_Drought_Soil_Dry_P Parameter: Timepoint (day) Value: 10
  misc_feature: MA Experiment 20001555 PARAMETER Experiment Name: At_Drought_Soil_Dry_P Parameter: Treatment Value: Drought vs. No Drought
  misc_feature: MA Experiment ID: 20001556 Result: Down-regulated in Transcription
  misc_feature: MA Experiment 20001556 PARAMETER Experiment Name: At_Drought_Soil_Dry_P Parameter: Age (day) Value: 26
  misc_feature: MA Experiment 20001556 PARAMETER Experiment Name: At_Drought_Soil_Dry_P Parameter: Organism Value: A. thaliana
  misc_feature: MA Experiment 20001556 PARAMETER Experiment Name: At_Drought_Soil_Dry_P Parameter: Plant Line Value: WS
  misc_feature: MA Experiment 20001556 PARAMETER Experiment Name: At_Drought_Soil_Dry_P Parameter: Post Timepoint (hr) Value: None
  misc_feature: MA Experiment 20001556 PARAMETER Experiment Name: At_Drought_Soil_Dry_P Parameter: Post-Treatment Value: None
  misc_feature: MA Experiment 20001556 PARAMETER Experiment Name: At_Drought_Soil_Dry_P Parameter: Timepoint (day) Value: 12
  misc_feature: MA Experiment 20001556 PARAMETER Experiment Name: At_Drought_Soil_Dry_P Parameter: Treatment Value: Drought vs. No Drought
  misc_feature: MA Experiment ID: 20001558 Result: Down-regulated in Transcription
  misc_feature: MA Experiment 20001558 PARAMETER Experiment Name: At_Drought_Soil_Dry_P Parameter: Age (day) Value: 27
  misc_feature: MA Experiment 20001558 PARAMETER Experiment Name: At_Drought_Soil_Dry_P Parameter: Organism Value: A. thaliana
  misc_feature: MA Experiment 20001558 PARAMETER Experiment Name: At_Drought_Soil_Dry_P Parameter: Plant Line Value: WS
  misc_feature: MA Experiment 20001558 PARAMETER Experiment Name: At_Drought_Soil_Dry_P Parameter: Post Timepoint (hr) Value: 6
  misc_feature: MA Experiment 20001558 PARAMETER Experiment Name: At_Drought_Soil_Dry_P Parameter: Post-Treatment Value: Re-Water vs. No Drought
  misc_feature: MA Experiment 20001558 PARAMETER Experiment Name: At_Drought_Soil_Dry_P Parameter: Timepoint (day) Value: 13
  misc_feature: MA Experiment 20001558 PARAMETER Experiment Name: At_Drought_Soil_Dry_P Parameter: Treatment Value: Drought vs. No Drought
  misc_feature: MA Experiment ID: 20001560 Result: Up-regulated in Transcription
  misc_feature: MA Experiment 20001560 PARAMETER Experiment Name: At_Drought_Soil_Dry_P Parameter: Age (day) Value: 28
  misc_feature: MA Experiment 20001560 PARAMETER Experiment Name: At_Drought_Soil_Dry_P Parameter: Organism Value: A. thaliana
  misc_feature: MA Experiment 20001560 PARAMETER Experiment Name: At_Drought_Soil_Dry_P Parameter: Plant Line Value: WS
  misc_feature: MA Experiment 20001560 PARAMETER Experiment Name: At_Drought_Soil_Dry_P Parameter: Post Timepoint (hr) Value: None
  misc_feature: MA Experiment 20001560 PARAMETER Experiment Name: At_Drought_Soil_Dry_P Parameter: Post-Treatment Value: None
  misc_feature: MA Experiment 20001560 PARAMETER Experiment Name: At_Drought_Soil_Dry_P Parameter: Timepoint (day) Value: 14
  misc_feature: MA Experiment 20001560 PARAMETER Experiment Name: At_Drought_Soil_Dry_P Parameter: Treatment Value: Drought vs. No Drought
  misc_feature: MA Experiment ID: 20001906 Result: Up-regulated in Transcription
  misc_feature: MA Experiment 20001906 PARAMETER Experiment Name: At_Drought_Reproduction_P Parameter: Age (day) Value: 35
  misc_feature: MA Experiment 20001906 PARAMETER Experiment Name: At_Drought_Reproduction_P Parameter: Organism Value: A. thaliana
  misc_feature: MA Experiment 20001906 PARAMETER Experiment Name: At_Drought_Reproduction_P Parameter: Plant Line Value: WS
  misc_feature: MA Experiment 20001906 PARAMETER Experiment Name: At_Drought_Reproduction_P Parameter: Timepoint (day) Value: 5
  misc_feature: MA Experiment 20001906 PARAMETER Experiment Name: At_Drought_Reproduction_P Parameter: Tissue Value: Siliques
  misc_feature: MA Experiment 20001906 PARAMETER Experiment Name: At_Drought_Reproduction_P Parameter: Treatment Value: Drought vs. No Drought
  misc_feature: MA Experiment ID: 20001908 Result: Up-regulated in Transcription
  misc_feature: MA Experiment 20001908 PARAMETER Experiment Name: At_Drought_Reproduction_P Parameter: Age (day) Value: 40
  misc_feature: MA Experiment 20001908 PARAMETER Experiment Name: At_Drought_Reproduction_P Parameter: Organism Value: A. thaliana
  misc_feature: MA Experiment 20001908 PARAMETER Experiment Name: At_Drought_Reproduction_P Parameter: Plant Line Value: WS
  misc_feature: MA Experiment 20001908 PARAMETER Experiment Name: At_Drought_Reproduction_P Parameter: Timepoint (day) Value: 10
  misc_feature: MA Experiment 20001908 PARAMETER Experiment Name: At_Drought_Reproduction_P Parameter: Tissue Value: Siliques
  misc_feature: MA Experiment 20001908 PARAMETER Experiment Name: At_Drought_Reproduction_P Parameter: Treatment Value: Drought vs. No Drought
  misc_feature: MA Experiment ID: 20001911 Result: Down-regulated in Transcription
  misc_feature: MA Experiment 20001911 PARAMETER Experiment Name: At_Drought_Reproduction_P Parameter: Age (day) Value: 40
  misc_feature: MA Experiment 20001911 PARAMETER Experiment Name: At_Drought_Reproduction_P Parameter: Organism Value: A. thaliana
  misc_feature: MA Experiment 20001911 PARAMETER Experiment Name: At_Drought_Reproduction_P Parameter: Plant Line Value: WS
  misc_feature: MA Experiment 20001911 PARAMETER Experiment Name: At_Drought_Reproduction_P Parameter: Timepoint (day) Value: 10
  misc_feature: MA Experiment 20001911 PARAMETER Experiment Name: At_Drought_Reproduction_P Parameter: Tissue Value: Flowers
  misc_feature: MA Experiment 20001911 PARAMETER Experiment Name: At_Drought_Reproduction_P Parameter: Treatment Value: Drought vs. No Drought
aaaaaattcgctattcaattcctttagtaagcttcacttttcacacttctctcactttctggtcagaaactttgtggatctagaagaacacacaaatcacaagagtgaaaaaagatgaacgacttgatgacgaaatcgtttatgagttacgttgacttgaaaaaagcagcgatgaaggatatggaagcaggacctgactttgatcttgagatggcttcgacgaaagcagacaagatggatgagaatctgtcatctttcttacaagaagcagagtatgtgaaagcagagatgggttttattagtagacactggctcggattgaacagtaccatgaagagagtaaaggtgttcacaaggcagagtctgtgaagtctcttcgtaacaagatctctaatgagattgtgtctggtttgaggaaggcgaaatcgattaagtcgaagctggaagagatggataaagcaaacaaggagattaaaaggctctctgggactccggtttacaggagcagaaccgctgtgactaacgggctgaggaagaaacttaaggaagtgatgatggagtttcaggggctgaggcaaaagatgatgagtgagtacaaggagactgttgagagaaggtacttcactgtcactggagaacatgctaatgatgagatgattgagaagatcattactgataacgctggaggtgaagagtttctcacgcgagcaattcaggaacatggtaaaggaaaggtcttggaaactgtggttgagattcaagataggtacgatgcagcaaaggagattgagaagagtctgttggagcttcaccaagtgtttcttgatatggctgtgatggttgaatcgcaaggtgaacagatggacgagatcgagcatcatgtgattaatgcgagccattacgtggctgatggagctaatgagctgaagactgcaaagagtcatcagagaaacagcagaaaatggatgtgcattggtatcattgtgctgcttttgatcattctcattgttgttatccccatcattaccagtttcagctcttcttgagatactggctatgttcactccttttgttttgtttcgctcttctttgtaccaatggatgtcttaatccttttgtgttcttaaaggatgtcttaatcctttcgtgtcttgtatccaatttcaatgaaatggtgaatgttt

SEQ ID NO: 22177 - protein, 198 aa, Arabidopsis thaliana
  peptide (1)..(198): Ceres Seq. ID no. 12339510
  misc_feature (105)..(167): Pfam Name: SNARE domain Pfam Description: SNARE domain
  misc_feature (1)..(192): Homolog of NCBI NO: 15236285 NR Description: syntaxin SYP123
  misc_feature (1)..(192): Homolog of NCBI NO: 15220328 NR Description: syntaxin SYP125; protein id: At1g11250.1
  misc_feature (1)..(192): Homolog of NCBI NO: 15219900 NR Description: syntaxin SYP124; protein id: At1g61290.1
  misc_feature (1)..(198): Homolog of NCBI NO: 15229865 NR Description: syntaxin SYP121
  misc_feature (1)..(191): Homolog of NCBI NO: 4206787 NR Description: syntaxin-related protein Nt-syr1 [Nicotiana
  misc_feature (1)..(198): Homolog of NCBI NO: 29788865 NR Description: putative cytokinesis-specific syntaxin-related
  misc_feature (1)..(155): Homolog of NCBI NO: 25311687 NR Description: protein F22O13.4 [imported] - Arabidopsis
  misc_feature (1)..(198): Homolog of NCBI NO: 28974542 NR Description: knolle [Antirrhinum majus]
  misc_feature (1)..(198): Homolog of NCBI NO: 5912543 NR Description: Knolle [Capsicum annuum]
  misc_feature (1)..(198): Homolog of NCBI NO: 15223261 NR Description: syntaxin SYP111 (KNOLLE)
MDKANKEIKRLSGTPVYRSRTAVTNGLRKKLKEVMMEFQGLRQKMMSEYKETVERRYFTVTGEHANDEMIEKIITDNAGGEEFLTRAIQEHGKGKVLETVVEIQDRYDAAKEIEKSLLELHQVFLDMAVMVESQGEQMDEIEHHVINASHYVADGANELKTAKSHQRNSRKWMCIGIIVLLLIILIVVIPIITSFSSS

SEQ ID NO: 22178 - protein, 164 aa, Arabidopsis thaliana
  peptide (1)..(164): Ceres Seq. ID no. 12339512
  misc_feature (71)..(133): Pfam Name: SNARE domain Pfam Description: SNARE domain
  misc_feature (1)..(158): Homolog of NCBI NO: 15236285 NR Description: syntaxin SYP123
  misc_feature (1)..(158): Homolog of NCBI NO: 15220328 NR Description: syntaxin SYP125; protein id: At1g11250.1
  misc_feature (1)..(158): Homolog of NCBI NO: 15219900 NR Description: syntaxin SYP124; protein id: At1g61290.1
  misc_feature (1)..(164): Homolog of NCBI NO: 15229865 NR Description: syntaxin SYP121
  misc_feature (1)..(157): Homolog of NCBI NO: 4206787 NR Description: syntaxin-related protein Nt-syr1 [Nicotiana
  misc_feature (1)..(164): Homolog of NCBI NO: 29788865 NR Description: putative cytokinesis-specific syntaxin-related
  misc_feature (1)..(121): Homolog of NCBI NO: 25311687 NR Description: protein F22O13.4 [imported] - Arabidopsis
  misc_feature (1)..(164): Homolog of NCBI NO: 28974542 NR Description: knolle [Antirrhinum majus]
  misc_feature (1)..(164): Homolog of NCBI NO: 5912543 NR Description: Knolle [Capsicum annuum]
  misc_feature (1)..(164): Homolog of NCBI NO: 15223261 NR Description: syntaxin SYP111 (KNOLLE)
MMEFQGLRQKMMSEYKETVERRYFTVTGEHANDEMIEKIITDNAGGEEFLTRAIQEHGKGKVLETVVEIQDRYDAAKEIEKSLLELHQVFLDMAVMVESQGEQMDEIEHHVINASHYVADGANELKTAKSHQRNSRKWMCIGIIVLLLIILIVVIPIITSFSSS

SEQ ID NO: 22179 - protein, 163 aa, Arabidopsis thaliana
  peptide (1)..(163): Ceres Seq. ID no. 12339513
  misc_feature (70)..(132): Pfam Name: SNARE domain Pfam Description: SNARE domain
  misc_feature (1)..(157): Homolog of NCBI NO: 15236285 NR Description: syntaxin SYP123
  misc_feature (1)..(157): Homolog of NCBI NO: 15220328 NR Description: syntaxin SYP125; protein id: At1g11250.1
  misc_feature (1)..(157): Homolog of NCBI NO: 15219900 NR Description: syntaxin SYP124; protein id: At1g61290.1
  misc_feature (1)..(163): Homolog of NCBI NO: 15229865 NR Description: syntaxin SYP121
  misc_feature (1)..(156): Homolog of NCBI NO: 4206787 NR Description: syntaxin-related protein Nt-syr1 [Nicotiana
  misc_feature (1)..(163): Homolog of NCBI NO: 29788865 NR Description: putative cytokinesis-specific syntaxin-related
  misc_feature (1)..(120): Homolog of NCBI NO: 25311687 NR Description: protein F22O13.4 [imported] - Arabidopsis
  misc_feature (1)..(163): Homolog of NCBI NO: 28974542 NR Description: knolle [Antirrhinum majus]
  misc_feature (1)..(163): Homolog of NCBI NO: 5912543 NR Description: Knolle [Capsicum annuum]
  misc_feature (1)..(163): Homolog of NCBI NO: 15223261 NR Description: syntaxin SYP111 (KNOLLE)
MEFQGLRQKMMSEYKETVERRYFTVTGEHANDEMIEKIITDNAGGEEFLTRAIQEHGKGKVLETVVEIQDRYDAAKEIEKSLLELHQVFLDMAVMVESQGEQMDEIEHHVINASHYVADGANELKTAKSHQRNSRKWMCIGIIVLLLIILIVVIPIITSFSSS

SEQ ID NO: 22180 - DNA, 1141 bp, Arabidopsis thaliana
  misc_feature (1)..(1141): Ceres Seq. ID no. 12327114
  misc_feature: MA Experiment ID: 108501 Result: Down-regulated in Transcription
  misc_feature: MA Experiment 108501 PARAMETER Experiment Name: At_ap2_floral_buds_cDNA_P Parameter: Plant Line Value: ap2 (Ler.)
  misc_feature: MA Experiment 108501 PARAMETER Experiment Name: At_ap2_floral_buds_cDNA_P Parameter: Tissue Value: Closed Flower
  misc_feature: MA Experiment ID: 108573 Result: Up-regulated in Transcription
  misc_feature: MA Experiment 108573 PARAMETER Experiment Name: At_Drought_cDNA_P Parameter: Timepoint (hr) Value: 6
  misc_feature: MA Experiment 108573 PARAMETER Experiment Name: At_Drought_cDNA_P Parameter: Tissue Value: Aerial
  misc_feature: MA Experiment 108573 PARAMETER Experiment Name: At_Drought_cDNA_P Parameter: Treatment Value: Drought vs. No Drought
  misc_feature: MA Experiment ID: 108577 Result: Down-regulated in Transcription
  misc_feature: MA Experiment 108577 PARAMETER Experiment Name: At_42deg_Heat_cDNA_P Parameter: Temperature (deg C) Value: 42 vs. 22
  misc_feature: MA Experiment 108577 PARAMETER Experiment Name: At_42deg_Heat_cDNA_P Parameter: Timepoint (hr) Value: 6
  misc_feature: MA Experiment 108577 PARAMETER Experiment Name: At_42deg_Heat_cDNA_P Parameter: Tissue Value: Aerial
  misc_feature: MA Experiment ID: 20000113 Result: Up-regulated in Transcription
  misc_feature: MA Experiment 20000113 PARAMETER Experiment Name: At_42deg_Heat_cDNA_P Parameter: Temperature (deg C) Value: 42 vs. 22
  misc_feature: MA Experiment 20000113 PARAMETER Experiment Name: At_42deg_Heat_cDNA_P Parameter: Timepoint (hr) Value: 8
  misc_feature: MA Experiment 20000113 PARAMETER Experiment Name: At_42deg_Heat_cDNA_P Parameter: Tissue Value: Aerial
  misc_feature: MA Experiment ID: 20000185 Result: Up-regulated in Transcription
  misc_feature: MA Experiment 20000185 PARAMETER Experiment Name: At_Roots__P Parameter: Age (day) Value: 7 vs. 21
  misc_feature: MA Experiment 20000185 PARAMETER Experiment Name: At_Roots__P Parameter: Organism Value: A. thaliana
  misc_feature: MA Experiment 20000185 PARAMETER Experiment Name: At_Roots__P Parameter: Tissue Value: Roots vs. Whole Plant
  misc_feature: MA Experiment ID: 20000265 Result: Up-regulated in Transcription
  misc_feature: MA Experiment 20000265 PARAMETER Experiment Name: At_Open_Flower_P Parameter: Age (day) Value: 21
  misc_feature: MA Experiment 20000265 PARAMETER Experiment Name: At_Open_Flower_P Parameter: Plant Line Value: WS
  misc_feature: MA Experiment 20000265 PARAMETER Experiment Name: At_Open_Flower_P Parameter: Tissue Value: Closed Flower vs. Whole Plant
  misc_feature: MA Experiment ID: 20000286 Result: Up-regulated in Transcription
  misc_feature: MA Experiment 20000286 PARAMETER Experiment Name: At_Open_Flower_P Parameter: Age (day) Value: 21
  misc_feature: MA Experiment 20000286 PARAMETER Experiment Name: At_Open_Flower_P Parameter: Plant Line Value: WS
  misc_feature: MA Experiment 20000286 PARAMETER Experiment Name: At_Open_Flower_P Parameter: Tissue Value: Half Open vs. Whole Plant
  misc_feature: MA Experiment ID: 20000439 Result: Up-regulated in Transcription
  misc_feature: MA Experiment 20000439 PARAMETER Experiment Name: At_Roots__P Parameter: Age (day) Value: 14 vs. 21
  misc_feature: MA Experiment 20000439 PARAMETER Experiment Name: At_Roots__P Parameter: Organism Value: A. thaliana
  misc_feature: MA Experiment 20000439 PARAMETER Experiment Name: At_Roots__P Parameter: Tissue Value: Roots vs. Whole Plant
  misc_feature: MA Experiment ID: 20000495 Result: Up-regulated in Transcription
  misc_feature: MA Experiment 20000495 PARAMETER Experiment Name: At_Guard_Cells_P Parameter: Harvest Date Value: 8/2/2002
  misc_feature: MA Experiment 20000495 PARAMETER Experiment Name: At_Guard_Cells_P Parameter: Organism Value: A. thaliana
  misc_feature: MA Experiment 20000495 PARAMETER Experiment Name: At_Guard_Cells_P Parameter: Tissue Value: Guard Cells vs. Leaves
  misc_feature: MA Experiment ID: 20001557 Result: Down-regulated in Transcription
  misc_feature: MA Experiment 20001557 PARAMETER Experiment Name: At_Drought_Soil_Dry_P Parameter: Age (day) Value: 27
  misc_feature: MA Experiment 20001557 PARAMETER Experiment Name: At_Drought_Soil_Dry_P Parameter: Organism Value: A. thaliana
  misc_feature: MA Experiment 20001557 PARAMETER Experiment Name: At_Drought_Soil_Dry_P Parameter: Plant Line Value: WS
  misc_feature: MA Experiment 20001557 PARAMETER Experiment Name: At_Drought_Soil_Dry_P Parameter: Post Timepoint (hr) Value: 3
  misc_feature: MA Experiment 20001557 PARAMETER Experiment Name: At_Drought_Soil_Dry_P Parameter: Post-Treatment Value: Re-Water vs. No Drought
  misc_feature: MA Experiment 20001557 PARAMETER Experiment Name: At_Drought_Soil_Dry_P Parameter: Timepoint (day) Value: 13
  misc_feature: MA Experiment 20001557 PARAMETER Experiment Name: At_Drought_Soil_Dry_P Parameter: Treatment Value: Drought vs. No Drought
  misc_feature: MA Experiment ID: 20001910 Result: Down-regulated in Transcription
  misc_feature: MA Experiment 20001910 PARAMETER Experiment Name: At_Drought_Reproduction_P Parameter: Age (day) Value: 37
  misc_feature: MA Experiment 20001910 PARAMETER Experiment Name: At_Drought_Reproduction_P Parameter: Organism Value: A. thaliana
  misc_feature: MA Experiment 20001910 PARAMETER Experiment Name: At_Drought_Reproduction_P Parameter: Plant Line Value: WS
  misc_feature: MA Experiment 20001910 PARAMETER Experiment Name: At_Drought_Reproduction_P Parameter: Timepoint (day) Value: 7
  misc_feature: MA Experiment 20001910 PARAMETER Experiment Name: At_Drought_Reproduction_P Parameter: Tissue Value: Flowers
  misc_feature: MA Experiment 20001910 PARAMETER Experiment Name: At_Drought_Reproduction_P Parameter: Treatment Value: Drought vs. No Drought
gaaaatggatcaagcaaagggaaaagtctgtgttactggtgcttcaggcttcttggcttcttggcttgtaaagaggcttctacttgaaggatatgaagttatcggaacagtcagagatccaggaaatgagaagaaacttgcgcacctatggaagttggaaggggcaaaggagagactacggttggtgaaggctgatttaatggaagaaggaagttttgataacgccataatgggatgccaaggagtgttccatactgcttctccggtgcttaaacctacctctaatccagaggaggagattctgagaccagctatagaaggaaccctgaatgtactgcgatcatgcaggaagaatccttccctgaagcgcgtggttctcacctcatcctcttcaacagtcaggatcagagatgattttgatcccaaaatccctcttgacgaatcaatttggacgtctgtggaactctgcaagcgcttccaggtctggtatgccttatcaaagacattagcggaacaagctgcatggaaattctctgaagaaaatggtattgacctcgtcactgttctaccatccttcctcgttggacccagtctgcctcctgatttatgttctacagcttccgatgtcctcggattactgaaaggagaaacagagaagttccaatggcatggacaaatggggtatgttcatatcgatgacgttgcacgaacccacatagtcgttttcgaacacgaagcagctcaaggcagatacatttgtagctctaacgttatcagtctagaggaactcgtttcattcctatctgctcgttacccatcactccctatccccaagaggtttgagaaactaaataggttgcattacgactttgacacctcgaagatacagagtctcgggctcaagttcaagtcccttgaagagatgttcgatgactgcattgcctcattagtcgagcaaggctatttatctactgttcttccataactcttggactagagaatatgtgcaaataagattggtctgaaatagtagtcatgtggattcacaatgaaagaatgggattggaaaacatgaaatcaaagattacaaacgatataatctttacttgtttatgaaccaaatcataacatatttcttctc

SEQ ID NO: 22181 - protein, 327 aa, Arabidopsis thaliana
  peptide (1)..(327): Ceres Seq. ID no. 12327115
  misc_feature (9)..(298): Pfam Name: NAD dependent epimerase/dehydratase family Pfam Description: NAD dependent epimerase/dehydratase family
  misc_feature (2)..(322): Homolog of NCBI NO: 7431406 NR Description: probable cinnamyl-alcohol dehydrogenase (EC
  misc_feature (2)..(323): Homolog of NCBI NO: 7488627 NR Description: probable cinnamyl-alcohol dehydrogenase (EC
  misc_feature (2)..(322): Homolog of NCBI NO: 5852203 NR Description: aldehyde reductase [Vigna radiata]
  misc_feature (6)..(327): Homolog of NCBI NO: 34905082 NR Description: putative dihydroflavonol 4-reductase
  misc_feature (5)..(322): Homolog of NCBI NO: 4581047 NR Description: putative dihydroflavonol reductase [Oryza sativa]
  misc_feature (5)..(322): Homolog of NCBI NO: 32352170 NR Description: dihydroflavonol reductase [Oryza sativa (japonica
  misc_feature (5)..(322): Homolog of NCBI NO: 14030554 NR Description: dihydro-flavanoid reductase-like protein [Zea
  misc_feature (161)..(281): Homolog of NCBI NO: 7486020 NR Description: hypothetical protein F23E12.20 - Arabidopsis
  misc_feature (2)..(133): Homolog of NCBI NO: 7486020 NR Description: hypothetical protein F23E12.20 - Arabidopsis
  misc_feature (2)..(327): Homolog of NCBI NO: 30690351 NR Description: dihydroflavonol 4-reductase (dihydrokaempferol
KMDQAKGKVCVTGASGFLASWLVKRLLLEGYEVIGTVRDPGNEKKLAHLWKLEGAKERLRLVKADLMEEGSFDNAIMGCQGVFHTASPVLKPTSNPEEEILRPAIEGTLNVLRSCRKNPSLKRVVLTSSSSTVRIRDDFDPKIPLDESIWTSVELCKRFQVWYALSKTLAEQAAWKFSEENGIDLVTVLPSFLVGPSLPPDLCSTASDVLGLLKGETEKFQWHGQMGYVHIDDVARTHIVVFEHEAAQGRYICSSNVISLEELVSFLSARYPSLPIPKRFEKLNRLHYDFDTSKIQSLGLKFKSLEEMFDDCIASLVEQGYLSTVLP

SEQ ID NO: 22182 - protein, 326 aa, Arabidopsis thaliana
  peptide (1)..(326): Ceres Seq. ID no. 12327116
  misc_feature (8)..(297): Pfam Name: NAD dependent epimerase/dehydratase family Pfam Description: NAD dependent epimerase/dehydratase family
  misc_feature (1)..(321): Homolog of NCBI NO: 7431406 NR Description: probable cinnamyl-alcohol dehydrogenase (EC
  misc_feature (1)..(322): Homolog of NCBI NO: 7488627 NR Description: probable cinnamyl-alcohol dehydrogenase (EC
  misc_feature (1)..(321): Homolog of NCBI NO: 5852203 NR Description: aldehyde reductase [Vigna radiata]
  misc_feature (5)..(326): Homolog of NCBI NO: 34905082 NR Description: putative dihydroflavonol 4-reductase
  misc_feature (4)..(321): Homolog of NCBI NO: 4581047 NR Description: putative dihydroflavonol reductase [Oryza sativa]
  misc_feature (4)..(321): Homolog of NCBI NO: 32352170 NR Description: dihydroflavonol reductase [Oryza sativa (japonica
  misc_feature (4)..(321): Homolog of NCBI NO: 14030554 NR Description: dihydro-flavanoid reductase-like protein [Zea
  misc_feature (160)..(280): Homolog of NCBI NO: 7486020 NR Description: hypothetical protein F23E12.20 - Arabidopsis
  misc_feature (1)..(132): Homolog of NCBI NO: 7486020 NR Description: hypothetical protein F23E12.20 - Arabidopsis
  misc_feature (1)..(326): Homolog of NCBI NO: 30690351 NR Description: dihydroflavonol 4-reductase (dihydrokaempferol
MDQAKGKVCVTGASGFLASWLVKRLLLEGYEVIGTVRDPGNEKKLAHLWKLEGAKERLRLVKADLMEEGSFDNAIMGCQGVFHTASPVLKPTSNPEEEILRPAIEGTLNVLRSCRKNPSLKRVVLTSSSSTVRIRDDFDPKIPLDESIWTSVELCKRFQVWYALSKTLAEQAAWKFSEENGIDLVTVLPSFLVGPSLPPDLCSTASDVLGLLKGETEKFQWHGQMGYVHIDDVARTHIVVFEHEAAQGRYICSSNVISLEELVSFLSARYPSLPIPKRFEKLNRLHYDFDTSKIQSLGLKFKSLEEMFDDCIASLVEQGYLSTVLP

SEQ ID NO: 22183 - protein, 261 aa, Arabidopsis thaliana
  peptide (1)..(261): Ceres Seq. ID no. 12327117
  misc_feature (1)..(232): Pfam Name: NAD dependent epimerase/dehydratase family Pfam Description: NAD dependent epimerase/dehydratase family
  misc_feature (1)..(257): Homolog of NCBI NO: 7488627 NR Description: probable cinnamyl-alcohol dehydrogenase (EC
  misc_feature (1)..(256): Homolog of NCBI NO: 5852203 NR Description: aldehyde reductase [Vigna radiata]
  misc_feature (1)..(261): Homolog of NCBI NO: 34905082 NR Description: putative dihydroflavonol 4-reductase
  misc_feature (1)..(256): Homolog of NCBI NO: 4581047 NR Description: putative dihydroflavonol reductase [Oryza sativa]
  misc_feature (1)..(256): Homolog of NCBI NO: 32352170 NR Description: dihydroflavonol reductase [Oryza sativa (japonica
  misc_feature (1)..(256): Homolog of NCBI NO: 7431406 NR Description: probable cinnamyl-alcohol dehydrogenase (EC
  misc_feature (1)..(256): Homolog of NCBI NO: 14030554 NR Description: dihydro-flavanoid reductase-like protein [Zea
  misc_feature (95)..(215): Homolog of NCBI NO: 7486020 NR Description: hypothetical protein F23E12.20 - Arabidopsis
  misc_feature (1)..(67): Homolog of NCBI NO: 7486020 NR Description: hypothetical protein F23E12.20 - Arabidopsis
  misc_feature (1)..(261): Homolog of NCBI NO: 30690351 NR Description: dihydroflavonol 4-reductase (dihydrokaempferol
MEEGSFDNAIMGCQGVFHTASPVLKPTSNPEEEILRPAIEGTLNVLRSCRKNPSLKRVVLTSSSSTVRIRDDFDPKIPLDESIWTSVELCKRFQVWYALSKTLAEQAAWKFSEENGIDLVTVLPSFLVGPSLPPDLCSTASDVLGLLKGETEKFQWHGQMGYVHIDDVARTHIVVFEHEAAQGRYICSSNVISLEELVSFLSARYPSLPIPKRFEKLNRLHYDFDTSKIQSLGLKFKSLEEMFDDCIASLVEQGYLSTVLP

SEQ ID NO: 22184 - DNA, 721 bp, Arabidopsis thaliana
  misc_feature (1)..(721): Ceres Seq. ID no. 12335287
  misc_feature: MA Experiment ID: 20000171 Result: Up-regulated in Transcription
  misc_feature: MA Experiment 20000171 PARAMETER Experiment Name: At_42deg_Heat_P Parameter: Age (day) Value: 14
  misc_feature: MA Experiment 20000171 PARAMETER Experiment Name: At_42deg_Heat_P Parameter: Organism Value: A. thaliana
  misc_feature: MA Experiment 20000171 PARAMETER Experiment Name: At_42deg_Heat_P Parameter: Plant Line Value: WS
  misc_feature: MA Experiment 20000171 PARAMETER Experiment Name: At_42deg_Heat_P Parameter: Temperature (deg C) Value: 42 vs. 22
  misc_feature: MA Experiment 20000171 PARAMETER Experiment Name: At_42deg_Heat_P Parameter: Timepoint (hr) Value: 1
  misc_feature: MA Experiment 20000171 PARAMETER Experiment Name: At_42deg_Heat_P Parameter: Tissue Value: Aerial
  misc_feature: MA Experiment ID: 20000173 Result: Up-regulated in Transcription
  misc_feature: MA Experiment 20000173 PARAMETER Experiment Name: At_42deg_Heat_P Parameter: Age (day) Value: 14
  misc_feature: MA Experiment 20000173 PARAMETER Experiment Name: At_42deg_Heat_P Parameter: Organism Value: A. thaliana
  misc_feature: MA Experiment 20000173 PARAMETER Experiment Name: At_42deg_Heat_P Parameter: Plant Line Value: WS
  misc_feature: MA Experiment 20000173 PARAMETER Experiment Name: At_42deg_Heat_P Parameter: Temperature (deg C) Value: 42 vs. 22
  misc_feature: MA Experiment 20000173 PARAMETER Experiment Name: At_42deg_Heat_P Parameter: Timepoint (hr) Value: 6
  misc_feature: MA Experiment 20000173 PARAMETER Experiment Name: At_42deg_Heat_P Parameter: Tissue Value: Aerial
  misc_feature: MA Experiment ID: 20000179 Result: Up-regulated in Transcription
  misc_feature: MA Experiment 20000179 PARAMETER Experiment Name: At_Germinating_Seeds_P Parameter: Age (hr) Value: 6 vs. 0
  misc_feature: MA Experiment 20000179 PARAMETER Experiment Name: At_Germinating_Seeds_P Parameter: Tissue Value: Germinating Seeds
  misc_feature: MA Experiment ID: 20000180 Result: Up-regulated in Transcription
  misc_feature: MA Experiment 20000180 PARAMETER Experiment Name: At_Germinating_Seeds_P Parameter: Age (hr) Value: 24 vs. 0
  misc_feature: MA Experiment 20000180 PARAMETER Experiment Name: At_Germinating_Seeds_P Parameter: Tissue Value: Germinating Seeds
  misc_feature: MA Experiment ID: 20000234 Result: Up-regulated in Transcription
  misc_feature: MA Experiment 20000234 PARAMETER Experiment Name: At_Siliques_P Parameter: Age (day) Value: 21
  misc_feature: MA Experiment 20000234 PARAMETER Experiment Name: At_Siliques_P Parameter: Organism Value: A. thaliana
  misc_feature: MA Experiment 20000234 PARAMETER Experiment Name: At_Siliques_P Parameter: Plant Line Value: WS
  misc_feature: MA Experiment 20000234 PARAMETER Experiment Name: At_Siliques_P Parameter: Tissue Value: Less Than 5mm Siliques vs. Whole Plant
  misc_feature: MA Experiment ID: 20000235 Result: Up-regulated in Transcription
  misc_feature: MA Experiment 20000235 PARAMETER Experiment Name: At_Siliques_P Parameter: Age (day) Value: 21
  misc_feature: MA Experiment 20000235 PARAMETER Experiment Name: At_Siliques_P Parameter: Organism Value: A. thaliana
  misc_feature: MA Experiment 20000235 PARAMETER Experiment Name: At_Siliques_P Parameter: Plant Line Value: WS
  misc_feature: MA Experiment 20000235 PARAMETER Experiment Name: At_Siliques_P Parameter: Tissue Value: 5-10mm Siliques vs. Whole Plant
  misc_feature: MA Experiment ID: 20000264 Result: Up-regulated in Transcription
  misc_feature: MA Experiment 20000264 PARAMETER Experiment Name: At_Open_Flower_P Parameter: Age (day) Value: 21
  misc_feature: MA Experiment 20000264 PARAMETER Experiment Name: At_Open_Flower_P Parameter: Plant Line Value: WS
  misc_feature: MA Experiment 20000264 PARAMETER Experiment Name: At_Open_Flower_P Parameter: Tissue Value: Open Flower vs. Whole Plant
  misc_feature: MA Experiment ID: 20000443 Result: Up-regulated in Transcription
  misc_feature: MA Experiment 20000443 PARAMETER Experiment Name: At_1uM_BR-BRZ__P Parameter: Tissue Value: Shoot Apices
  misc_feature: MA Experiment 20000443 PARAMETER Experiment Name: At_1uM_BR-BRZ__P Parameter: Treatment Value: 1uM BRZ vs. No Treatment
  misc_feature: MA Experiment ID: 20000456 Result: Up-regulated in Transcription
  misc_feature: MA Experiment 20000456 PARAMETER Experiment Name: At_100uM_BA_P Parameter: Age (day) Value: 14
  misc_feature: MA Experiment 20000456 PARAMETER Experiment Name: At_100uM_BA_P Parameter: Organism Value: A. thaliana
  misc_feature: MA Experiment 20000456 PARAMETER Experiment Name: At_100uM_BA_P Parameter: Plant Line Value: WS
  misc_feature: MA Experiment 20000456 PARAMETER Experiment Name: At_100uM_BA_P Parameter: Timepoint (hr) Value: 6
  misc_feature: MA Experiment 20000456 PARAMETER Experiment Name: At_100uM_BA_P Parameter: Tissue Value: Aerial
  misc_feature: MA Experiment 20000456 PARAMETER Experiment Name: At_100uM_BA_P Parameter: Treatment Value: 100uM BA vs. No Treatment
  misc_feature: MA Experiment ID: 20000709 Result: Up-regulated in Transcription
  misc_feature: MA Experiment 20000709 PARAMETER Experiment Name: At_15mM_NH4NO3_L-to-H_P Parameter: Age (hr) Value: 14
  misc_feature: MA Experiment 20000709 PARAMETER Experiment Name: At_15mM_NH4NO3_L-to-H_P Parameter: Organism Value: A. thaliana
  misc_feature: MA Experiment 20000709 PARAMETER Experiment Name: At_15mM_NH4NO3_L-to-H_P Parameter: Plant Line Value: WS
  misc_feature: MA Experiment 20000709 PARAMETER Experiment Name: At_15mM_NH4NO3_L-to-H_P Parameter: Timepoint (hr) Value: 4
  misc_feature: MA Experiment 20000709 PARAMETER Experiment Name: At_15mM_NH4NO3_L-to-H_P Parameter: Tissue Value: Aerial
  misc_feature: MA Experiment 20000709 PARAMETER Experiment Name: At_15mM_NH4NO3_L-to-H_P Parameter: Treatment Value: 15mM NH4NO3 vs. 30mM Mannitol
  misc_feature: MA Experiment ID: 20001450 Result: Down-regulated in Transcription
  misc_feature: MA Experiment 20001450 PARAMETER Experiment Name: At_Far-red-induction_P Parameter: Age (day) Value: 7
  misc_feature: MA Experiment 20001450 PARAMETER Experiment Name: At_Far-red-induction_P Parameter: Light Value: Far-red vs. White
  misc_feature: MA Experiment 20001450 PARAMETER Experiment Name: At_Far-red-induction_P Parameter: Organism Value: A. thaliana
  misc_feature: MA Experiment 20001450 PARAMETER Experiment Name: At_Far-red-induction_P Parameter: Plant Line Value: Columbia
  misc_feature: MA Experiment 20001450 PARAMETER Experiment Name: At_Far-red-induction_P Parameter: Timepoint (hr) Value: 8
  misc_feature: MA Experiment 20001450 PARAMETER Experiment Name: At_Far-red-induction_P Parameter: Tissue Value: Whole Plant
  misc_feature: MA Experiment ID: 20001451 Result: Down-regulated in Transcription
  misc_feature: MA Experiment 20001451 PARAMETER Experiment Name: At_Far-red-induction_P Parameter: Age (day) Value: 7
  misc_feature: MA Experiment 20001451 PARAMETER Experiment Name: At_Far-red-induction_P Parameter: Light Value: Far-red vs. White
  misc_feature: MA Experiment 20001451 PARAMETER Experiment Name: At_Far-red-induction_P Parameter: Organism Value: A. thaliana
  misc_feature: MA Experiment 20001451 PARAMETER Experiment Name: At_Far-red-induction_P Parameter: Plant Line Value: Columbia
  misc_feature: MA Experiment 20001451 PARAMETER Experiment Name: At_Far-red-induction_P Parameter: Timepoint (hr) Value: 24
  misc_feature: MA Experiment 20001451 PARAMETER Experiment Name: At_Far-red-induction_P Parameter: Tissue Value: Whole Plant
  misc_feature: MA Experiment ID: 20001557 Result: Up-regulated in Transcription
  misc_feature: MA Experiment 20001557 PARAMETER Experiment Name: At_Drought_Soil_Dry_P Parameter: Age (day) Value: 27
  misc_feature: MA Experiment 20001557 PARAMETER Experiment Name: At_Drought_Soil_Dry_P Parameter: Organism Value: A. thaliana
  misc_feature: MA Experiment 20001557 PARAMETER Experiment Name: At_Drought_Soil_Dry_P Parameter: Plant Line Value: WS
  misc_feature: MA Experiment 20001557 PARAMETER Experiment Name: At_Drought_Soil_Dry_P Parameter: Post Timepoint (hr) Value: 3
  misc_feature: MA Experiment 20001557 PARAMETER Experiment Name: At_Drought_Soil_Dry_P Parameter: Post-Treatment Value: Re-Water vs. No Drought
  misc_feature: MA Experiment 20001557 PARAMETER Experiment Name: At_Drought_Soil_Dry_P Parameter: Timepoint (day) Value: 13
  misc_feature: MA Experiment 20001557 PARAMETER Experiment Name: At_Drought_Soil_Dry_P Parameter: Treatment Value: Drought vs. No Drought
  misc_feature: MA Experiment ID: 20001768 Result: Up-regulated in Transcription
  misc_feature: MA Experiment 20001768 PARAMETER Experiment Name: At_Far-red-enriched-adult_P Parameter: Age (day) Value: 28
  misc_feature: MA Experiment 20001768 PARAMETER Experiment Name: At_Far-red-enriched-adult_P Parameter: Light Value: Far-red enriched vs. White
  misc_feature: MA Experiment 20001768 PARAMETER Experiment Name: At_Far-red-enriched-adult_P Parameter: Organism Value: A. thaliana
  misc_feature: MA Experiment 20001768 PARAMETER Experiment Name: At_Far-red-enriched-adult_P Parameter: Plant Line Value: Columbia
  misc_feature: MA Experiment 20001768 PARAMETER Experiment Name: At_Far-red-enriched-adult_P Parameter: Timepoint (hr) Value: 1
  misc_feature: MA Experiment 20001768 PARAMETER Experiment Name: At_Far-red-enriched-adult_P Parameter: Tissue Value: Aerial
aatcataaaatcgaaattcaattcgtcggaaaattgttcagatttcgaaatcaaccgagaaaatgtcgctgattccaagcttcttcggcaacaacaggcgaatcaacaacaacatattcgatccattctcactcgacgtatgggatccattcaaggaacttcaattcccgtcaccgtcttcgtcggcgatagcaaacggacgtgtggattggaaagagacggcggaggcgcacgtgttcaaggcggatttaccggggatgaagaaagaagaggttaaagtagagattgaggatgatagtgtgcttaagatcagcggagagagacacgttgagaaagaggagaagcaggacacgtggcatcgtgtagagagatcgagtgggggattctcgaggaagtttaggttaccggagaatgtgaagatggatcaagttaaagcttcaatggagaatggtgttttgactgtgactgtgcctaaagtggagactaataagaagaaggctcaagttaagtctattgatatctctggctaagccaatttagcttgatttgagttctctctgggtcttgactttgtgtgtgtgtgtctctgatgattatggttcttcgtttgattgtagttttaaactaataatcaatggaagctagtaacttgtgtgacaagtaaatgtatggtggagaaatgtgtgtatttggattataatagaaatacctattttcatcc

SEQ ID NO: 22185 - protein, 155 aa, Arabidopsis thaliana
  peptide (1)..(155): Ceres Seq. ID no. 12335288
  misc_feature (1)..(155): Homolog of NCBI NO: 3336892 NR Description: Hsp20.0 protein [Lycopersicon peruvianum]
  misc_feature (1)..(155): Homolog of NCBI NO: 123556 NR Description: 18.2 KD CLASS I HEAT SHOCK PROTEIN
  misc_feature (1)..(155): Homolog of NCBI NO: 4836469 NR Description: 17.7 kD class I small heat shock protein
  misc_feature (1)..(155): Homolog of NCBI NO: 4836473 NR Description: 17.6 kD class I small heat shock protein
  misc_feature (1)..(155): Homolog of NCBI NO: 123538 NR Description: 17.5 KD CLASS I HEAT SHOCK PROTEIN (HSP 17.5-M)
  misc_feature (1)..(155): Homolog of NCBI NO: 3341464 NR Description: Hsp20.1 protein [Lycopersicon peruvianum]
  misc_feature (1)..(155): Homolog of NCBI NO: 15227552 NR Description: putative small heat shock protein
  misc_feature (1)..(155): Homolog of NCBI NO: 15222395 NR Description: heat shock protein, putative
  misc_feature (1)..(155): Homolog of NCBI NO: 15218934 NR Description: heat shock protein, putative
  misc_feature (1)..(155): Homolog of NCBI NO: 21592809 NR Description: heat shock protein, putative [Arabidopsis
MSLIPSFFGNNRRINNNIFDPFSLDVWDPFKELQFPSPSSSAIANGRVDWKETAEAHVFKADLPGMKKEEVKVEIEDDSVLKISGERHVEKEEKQDTWHRVERSSGGFSRKFRLPENVKMDQVKASMENGVLTVTVPKVETNKKKAQVKSIDISG

SEQ ID NO: 22186 - protein, 91 aa, Arabidopsis thaliana
  peptide (1)..(91): Ceres Seq. ID no. 12335289
IIKSKFNSSENCSDFEINRENVADSKLLRQQQANQQQHIRSILTRRMGSIQGTSIPVTVFVGDSKRTCGLERDGGGARVQGGFTGDEERRG

SEQ ID NO: 22187 - protein, 90 aa, Arabidopsis thaliana
  peptide (1)..(90): Ceres Seq. ID no. 12335290
  misc_feature (1)..(90): Homolog of NCBI NO: 3336892 NR Description: Hsp20.0 protein [Lycopersicon peruvianum]
  misc_feature (1)..(90): Homolog of NCBI NO: 123556 NR Description: 18.2 KD CLASS I HEAT SHOCK PROTEIN
  misc_feature (1)..(90): Homolog of NCBI NO: 4836469 NR Description: 17.7 kD class I small heat shock protein
  misc_feature (1)..(90): Homolog of NCBI NO: 4836473 NR Description: 17.6 kD class I small heat shock protein
  misc_feature (1)..(90): Homolog of NCBI NO: 123538 NR Description: 17.5 KD CLASS I HEAT SHOCK PROTEIN (HSP 17.5-M)
  misc_feature (1)..(90): Homolog of NCBI NO: 3341464 NR Description: Hsp20.1 protein [Lycopersicon peruvianum]
  misc_feature (1)..(90): Homolog of NCBI NO: 15227552 NR Description: putative small heat shock protein
  misc_feature (1)..(90): Homolog of NCBI NO: 15222395 NR Description: heat shock protein, putative
  misc_feature (1)..(90): Homolog of NCBI NO: 15218934 NR Description: heat shock protein, putative
  misc_feature (1)..(90): Homolog of NCBI NO: 21592809 NR Description: heat shock protein, putative [Arabidopsis
MKKEEVKVEIEDDSVLKISGERHVEKEEKQDTWHRVERSSGGFSRKFRLPENVKMDQVKASMENGVLTVTVPKVETNKKKAQVKSIDISG

SEQ ID NO: 22188 - DNA, 1155 bp, Arabidopsis thaliana
  misc_feature (1)..(1155): Ceres Seq. ID no. 12377359
  misc_feature: MA Experiment ID: 20000093 Result: Up-regulated in Transcription
  misc_feature: MA Experiment 20000093 PARAMETER Experiment Name: At_42deg_Heat_cDNA_P Parameter: Temperature (deg C) Value: 42 vs. 22
  misc_feature: MA Experiment 20000093 PARAMETER Experiment Name: At_42deg_Heat_cDNA_P Parameter: Timepoint (hr) Value: 0.5
  misc_feature: MA Experiment 20000093 PARAMETER Experiment Name: At_42deg_Heat_cDNA_P Parameter: Tissue Value: Aerial
  misc_feature: MA Experiment ID: 20000173 Result: Up-regulated in Transcription
  misc_feature: MA Experiment 20000173 PARAMETER Experiment Name: At_42deg_Heat_P Parameter: Age (day) Value: 14
  misc_feature: MA Experiment 20000173 PARAMETER Experiment Name: At_42deg_Heat_P Parameter: Organism Value: A. thaliana
  misc_feature: MA Experiment 20000173 PARAMETER Experiment Name: At_42deg_Heat_P Parameter: Plant Line Value: WS
  misc_feature: MA Experiment 20000173 PARAMETER Experiment Name: At_42deg_Heat_P Parameter: Temperature (deg C) Value: 42 vs. 22
  misc_feature: MA Experiment 20000173 PARAMETER Experiment Name: At_42deg_Heat_P Parameter: Timepoint (hr) Value: 6
  misc_feature: MA Experiment 20000173 PARAMETER Experiment Name: At_42deg_Heat_P Parameter: Tissue Value: Aerial
  misc_feature: MA Experiment ID: 20000180 Result: Down-regulated in Transcription
  misc_feature: MA Experiment 20000180 PARAMETER Experiment Name: At_Germinating_Seeds_P Parameter: Age (hr) Value: 24 vs. 0
  misc_feature: MA Experiment 20000180 PARAMETER Experiment Name: At_Germinating_Seeds_P Parameter: Tissue Value: Germinating Seeds
  misc_feature: MA Experiment ID: 20000227 Result: Up-regulated in Transcription
  misc_feature: MA Experiment 20000227 PARAMETER Experiment Name: At_Root-Tips-vs-Tops_P Parameter: Tissue Value: Root Tips vs. Root Tops
  misc_feature: MA Experiment ID: 20000307 Result: Down-regulated in Transcription
  misc_feature: MA Experiment 20000307 PARAMETER Experiment Name: At_Germinating_Seeds_Sub_P Parameter: Age (hr) Value: 24 vs. 0
  misc_feature: MA Experiment 20000307 PARAMETER Experiment Name: At_Germinating_Seeds_Sub_P Parameter: Organism Value: A. thaliana
  misc_feature: MA Experiment 20000307 PARAMETER Experiment Name: At_Germinating_Seeds_Sub_P Parameter: Plant Line Value: WS
  misc_feature: MA Experiment 20000307 PARAMETER Experiment Name: At_Germinating_Seeds_Sub_P Parameter: Tissue Value: Germinating Seeds
  misc_feature: MA Experiment ID: 20000328 Result: Up-regulated in Transcription
  misc_feature: MA Experiment 20000328 PARAMETER Experiment Name: At_42deg_Heat_Sub_P Parameter: Age (day) Value: 14
  misc_feature: MA Experiment 20000328 PARAMETER Experiment Name: At_42deg_Heat_Sub_P Parameter: Organism Value: A. thaliana
  misc_feature: MA Experiment 20000328 PARAMETER Experiment Name: At_42deg_Heat_Sub_P Parameter: Plant Line Value: WS
  misc_feature: MA Experiment 20000328 PARAMETER Experiment Name: At_42deg_Heat_Sub_P Parameter: Temperature (deg C) Value: 42 vs. 22
  misc_feature: MA Experiment 20000328 PARAMETER Experiment Name: At_42deg_Heat_Sub_P Parameter: Timepoint (hr) Value: 6
  misc_feature: MA Experiment 20000328 PARAMETER Experiment Name: At_42deg_Heat_Sub_P Parameter: Tissue Value: Aerial
  misc_feature: MA Experiment ID: 20000440 Result: Up-regulated in Transcription
  misc_feature: MA Experiment 20000440 PARAMETER Experiment Name: At_Closed-Flower__Sub_P Parameter: Tissue Value: Closed Flower vs. Whole Plant
  misc_feature: MA Experiment ID: 20001458 Result: Up-regulated in Transcription
  misc_feature: MA Experiment 20001458 PARAMETER Experiment Name: At_50mM_NH4NO3_L-to-H_P Parameter: Age (day) Value: Undefined
  misc_feature: MA Experiment 20001458 PARAMETER Experiment Name: At_50mM_NH4NO3_L-to-H_P Parameter: Organism Value: Undefined
  misc_feature: MA Experiment 20001458 PARAMETER Experiment Name: At_50mM_NH4NO3_L-to-H_P Parameter: Plant Line Value: Undefined
  misc_feature: MA Experiment 20001458 PARAMETER Experiment Name: At_50mM_NH4NO3_L-to-H_P Parameter: Timepoint (hr) Value: 2
  misc_feature: MA Experiment 20001458 PARAMETER Experiment Name: At_50mM_NH4NO3_L-to-H_P Parameter: Tissue Value: Siliques
  misc_feature: MA Experiment 20001458 PARAMETER Experiment Name: At_50mM_NH4NO3_L-to-H_P Parameter: Treatment Value: 50mM NH4NO3 vs. 100mM Manitol
  misc_feature: MA Experiment ID: 20001555 Result: Up-regulated in Transcription
  misc_feature: MA Experiment 20001555 PARAMETER Experiment Name: At_Drought_Soil_Dry_P Parameter: Age (day) Value: 24
  misc_feature: MA Experiment 20001555 PARAMETER Experiment Name: At_Drought_Soil_Dry_P Parameter: Organism Value: A. thaliana
  misc_feature: MA Experiment 20001555 PARAMETER Experiment Name: At_Drought_Soil_Dry_P Parameter: Plant Line Value: WS
  misc_feature: MA Experiment 20001555 PARAMETER Experiment Name: At_Drought_Soil_Dry_P Parameter: Post Timepoint (hr) Value: None
  misc_feature: MA Experiment 20001555 PARAMETER Experiment Name: At_Drought_Soil_Dry_P Parameter: Post-Treatment Value: None
  misc_feature: MA Experiment 20001555 PARAMETER Experiment Name: At_Drought_Soil_Dry_P Parameter: Timepoint (day) Value: 10
  misc_feature: MA Experiment 20001555 PARAMETER Experiment Name: At_Drought_Soil_Dry_P Parameter: Treatment Value: Drought vs. No Drought
  misc_feature: MA Experiment ID: 20001556 Result: Up-regulated in Transcription
  misc_feature: MA Experiment 20001556 PARAMETER Experiment Name: At_Drought_Soil_Dry_P Parameter: Age (day) Value: 26
  misc_feature: MA Experiment 20001556 PARAMETER Experiment Name: At_Drought_Soil_Dry_P Parameter: Organism Value: A. thaliana
  misc_feature: MA Experiment 20001556 PARAMETER Experiment Name: At_Drought_Soil_Dry_P Parameter: Plant Line Value: WS
  misc_feature: MA Experiment 20001556 PARAMETER Experiment Name: At_Drought_Soil_Dry_P Parameter: Post Timepoint (hr) Value: None
  misc_feature: MA Experiment 20001556 PARAMETER Experiment Name: At_Drought_Soil_Dry_P Parameter: Post-Treatment Value: None
  misc_feature: MA Experiment 20001556 PARAMETER Experiment Name: At_Drought_Soil_Dry_P Parameter: Timepoint (day) Value: 12
  misc_feature: MA Experiment 20001556 PARAMETER Experiment Name: At_Drought_Soil_Dry_P Parameter: Treatment Value: Drought vs. No Drought
  misc_feature: MA Experiment ID: 20001558 Result: Up-regulated in Transcription
  misc_feature: MA Experiment 20001558 PARAMETER Experiment Name: At_Drought_Soil_Dry_P Parameter: Age (day) Value: 27
  misc_feature: MA Experiment 20001558 PARAMETER Experiment Name: At_Drought_Soil_Dry_P Parameter: Organism Value: A. thaliana
  misc_feature: MA Experiment 20001558 PARAMETER Experiment Name: At_Drought_Soil_Dry_P Parameter: Plant Line Value: WS
  misc_feature: MA Experiment 20001558 PARAMETER Experiment Name: At_Drought_Soil_Dry_P Parameter: Post Timepoint (hr) Value: 6
  misc_feature: MA Experiment 20001558 PARAMETER Experiment Name: At_Drought_Soil_Dry_P Parameter: Post-Treatment Value: Re-Water vs. No Drought
  misc_feature: MA Experiment 20001558 PARAMETER Experiment Name: At_Drought_Soil_Dry_P Parameter: Timepoint (day) Value: 13
  misc_feature: MA Experiment 20001558 PARAMETER Experiment Name: At_Drought_Soil_Dry_P Parameter: Treatment Value: Drought vs. No Drought
  misc_feature: MA Experiment ID: 20001560 Result: Up-regulated in Transcription
  misc_feature: MA Experiment 20001560 PARAMETER Experiment Name: At_Drought_Soil_Dry_P Parameter: Age (day) Value: 28
  misc_feature: MA Experiment 20001560 PARAMETER Experiment Name: At_Drought_Soil_Dry_P Parameter: Organism Value: A. thaliana
  misc_feature: MA Experiment 20001560 PARAMETER Experiment Name: At_Drought_Soil_Dry_P Parameter: Plant Line Value: WS
  misc_feature: MA Experiment 20001560 PARAMETER Experiment Name: At_Drought_Soil_Dry_P Parameter: Post Timepoint (hr) Value: None
  misc_feature: MA Experiment 20001560 PARAMETER Experiment Name: At_Drought_Soil_Dry_P Parameter: Post-Treatment Value: None
  misc_feature: MA Experiment 20001560 PARAMETER Experiment Name: At_Drought_Soil_Dry_P Parameter: Timepoint (day) Value: 14
  misc_feature: MA Experiment 20001560 PARAMETER Experiment Name: At_Drought_Soil_Dry_P Parameter: Treatment Value: Drought vs. No Drought
  misc_feature: MA Experiment ID: 20001757 Result: Up-regulated in Transcription
  misc_feature: MA Experiment 20001757 PARAMETER Experiment Name: At_50mM_NH4NO3_L-to-H_P Parameter: Timepoint (hr) Value: 6
  misc_feature: MA Experiment 20001757 PARAMETER Experiment Name: At_50mM_NH4NO3_L-to-H_P Parameter: Tissue Value: Leaf
  misc_feature: MA Experiment 20001757 PARAMETER Experiment Name: At_50mM_NH4NO3_L-to-H_P Parameter: Treatment Value: 50mM NH4NO3 vs 100mM Mannitol
atggtgatgagaaagctacagttaccgttgagccagacgcagaaggttaggtttgagagagcaatcgagcggcttcaatcactgtcgtcgtcggctaactctgacgcttctgttatcgtcaccgactctattcccgtcaaccatgacgatgccttcctcaagggacatggaacttccgaggtcgatggtgagttgctcgcgacggtctgtggagtagtggagcgtgtggataagcttgtctatgtacgcaccttgcgagccaggtacaagcctgaagttggggatattgtggtaggccgtgtcattgaggttgctcaaaaacgttggagagtggagctcaacttcaatcaggatggagtactgatgctttcttccatgaacatgcctgatggtattcagaggcgaagaacctctgtggatgaactcaatatgcggaatatctttgtagagcatgatgtcgtatgtgctgaagtacgcaactttcagcatgatggtagcttgcagttacaagccagaagtcagaagtatggcaagctcgagaagggacaacttctgaaggtcgatccttacttggttaagagaagcaaacatcactttcattacgtagaaagtcttgggattgatttgattattggctgcaatggtttcatatgggttggagaacatgtcgaagtgagagatcctatggcaatagatgatcagaaagatgaggaaatgatctcatcctcctccacaggaaaagagcaaagccatattccactcgagactcgacaaaccatatgcagaatcgggaatgcgatacgtgtcttgtctaatctaggcttcaccgtgacactagaagtaatcatggagactgttaacctcagtaactcaaagaatattgacatacatgatatgcttggatcagagtttcacgttgtggtagcagagaatgaagctgaaagaagacgtacaaagaggaaaaagtgaaaactacccctttttgtcactgatgtatcagagacttgtaacgtgtattagatcattcggtcttgtttgttactcagcttctattgaaagttcgaattttaatctgattgagatatgtagtatgatggatgtgtttgatactattaactgtacatcagattagattagtcgagttatgtcttttgg

SEQ ID NO: 22189 - protein, 322 aa, Arabidopsis thaliana
  peptide (1)..(322): Ceres Seq. ID no. 12377360
  misc_feature (25)..(246): Homolog of NCBI NO: 6321860 NR Description: Ribosomal RNA Processing; Rrp4p [Saccharomyces
  misc_feature (27)..(294): Homolog of NCBI NO: 17544090 NR Description: Ribosomal RNA processing like (34.1 kD)
  misc_feature (27)..(303): Homolog of NCBI NO: 39584168 NR Description: Hypothetical protein CBG05449 [Caenorhabditis
  misc_feature (21)..(271): Homolog of NCBI NO: 24762324 NR Description: CG3931-PA [Drosophila melanogaster]
  misc_feature (21)..(271): Homolog of NCBI NO: 21428348 NR Description: GM02257p [Drosophila melanogaster]
  misc_feature (39)..(224): Homolog of NCBI NO: 19923403 NR Description: homolog of Yeast RRP4 (ribosomal RNA processing
  misc_feature (28)..(227): Homolog of NCBI NO: 21450259 NR Description: hypothetical protein MGC30456 [Mus musculus]
  misc_feature (39)..(278): Homolog of NCBI NO: 19113896 NR Description: conserved hypothetical protein
  misc_feature (38)..(292): Homolog of NCBI NO: 20378673 NR Description: exonuclease [Phytophthora sojae]
  misc_feature (1)..(322): Homolog of NCBI NO: 15218790 NR Description: hypothetical protein; protein id: At1g03360.1
  misc_feature (25)..(246): Homolog of NCBI NO: 6321860 NR Description: Ribosomal RNA Processing; Rrp4p [Saccharomyces
  misc_feature (27)..(294): Homolog of NCBI NO: 17544090 NR Description: Ribosomal RNA processing like (34.1 kD)
  misc_feature (27)..(303): Homolog of NCBI NO: 39584168 NR Description: Hypothetical protein CBG05449 [Caenorhabditis
  misc_feature (21)..(271): Homolog of NCBI NO: 24762324 NR Description: CG3931-PA [Drosophila melanogaster]
  misc_feature (21)..(271): Homolog of NCBI NO: 21428348 NR Description: GM02257p [Drosophila melanogaster]
  misc_feature (39)..(224): Homolog of NCBI NO: 19923403 NR Description: homolog of Yeast RRP4 (ribosomal RNA processing
  misc_feature (28)..(227): Homolog of NCBI NO: 21450259 NR Description: hypothetical protein MGC30456 [Mus musculus]
  misc_feature (39)..(278): Homolog of NCBI NO: 19113896 NR Description: conserved hypothetical protein
  misc_feature (38)..(292): Homolog of NCBI NO: 20378673 NR Description: exonuclease [Phytophthora sojae]
  misc_feature (1)..(322): Homolog of NCBI NO: 15218790 NR Description: hypothetical protein; protein id: At1g03360.1
MVMRKLQLPLSQTQKVRFERAIERLQSLSSSANSDASVIVTDSIPVNHDDAFLKGHGTSEVDGELLATVCGVVERVDKLVYVRTLRARYKPEVGDIVVGRVIEVAQKRWRVELNFNQDGVLMLSSMNMPDGIQRRRTSVDELNMRNIFVEHDVVCAEVRNFQHDGSLQLQARSQKYGKLEKGQLLKVDPYLVKRSKHHFHYVESLGIDLIIGCNGFIWVGEHVEVRDPMAIDDQKDEEMISSSSTGKEQSHIPLETRQTICRIGNAIRVLSNLGFTVTLEVIMETVNLSNSKNIDIHDMLGSEFHVVVAENEAERRRTKRKK

SEQ ID NO: 22190 - protein, 320 aa, Arabidopsis thaliana
  peptide (1)..(320): Ceres Seq. ID no. 12377361
  misc_feature (23)..(244): Homolog of NCBI NO: 6321860 NR Description: Ribosomal RNA Processing; Rrp4p [Saccharomyces
  misc_feature (25)..(292): Homolog of NCBI NO: 17544090 NR Description: Ribosomal RNA processing like (34.1 kD)
  misc_feature (25)..(301): Homolog of NCBI NO: 39584168 NR Description: Hypothetical protein CBG05449 [Caenorhabditis
  misc_feature (19)..(269): Homolog of NCBI NO: 24762324 NR Description: CG3931-PA [Drosophila melanogaster]
  misc_feature (19)..(269): Homolog of NCBI NO: 21428348 NR Description: GM02257p [Drosophila melanogaster]
  misc_feature (37)..(222): Homolog of NCBI NO: 19923403 NR Description: homolog of Yeast RRP4 (ribosomal RNA processing
  misc_feature (26)..(225): Homolog of NCBI NO: 21450259 NR Description: hypothetical protein MGC30456 [Mus musculus]
  misc_feature (37)..(276): Homolog of NCBI NO: 19113896 NR Description: conserved hypothetical protein
  misc_feature (36)..(290): Homolog of NCBI NO: 20378673 NR Description: exonuclease [Phytophthora sojae]
  misc_feature (1)..(320): Homolog of NCBI NO: 15218790 NR Description: hypothetical protein; protein id: At1g03360.1
  misc_feature (23)..(244): Homolog of NCBI NO: 6321860 NR Description: Ribosomal RNA Processing; Rrp4p [Saccharomyces
  misc_feature (25)..(292): Homolog of NCBI NO: 17544090 NR Description: Ribosomal RNA processing like (34.1 kD)
  misc_feature (25)..(301): Homolog of NCBI NO: 39584168 NR Description: Hypothetical protein CBG05449 [Caenorhabditis
  misc_feature (19)..(269): Homolog of NCBI NO: 24762324 NR Description: CG3931-PA [Drosophila melanogaster]
  misc_feature (19)..(269): Homolog of NCBI NO: 21428348 NR Description: GM02257p [Drosophila melanogaster]
  misc_feature (37)..(222): Homolog of NCBI NO: 19923403 NR Description: homolog of Yeast RRP4 (ribosomal RNA processing
  misc_feature (26)..(225): Homolog of NCBI NO: 21450259 NR Description: hypothetical protein MGC30456 [Mus musculus]
  misc_feature (37)..(276): Homolog of NCBI NO: 19113896 NR Description: conserved hypothetical protein
  misc_feature (36)..(290): Homolog of NCBI NO: 20378673 NR Description: exonuclease [Phytophthora sojae]
  misc_feature (1)..(320): Homolog of NCBI NO: 15218790 NR Description: hypothetical protein; protein id: At1g03360.1
MRKLQLPLSQTQKVRFERAIERLQSLSSSANSDASVIVTDSIPVNHDDAFLKGHGTSEVDGELLATVCGVVERVDKLVYVRTLRARYKPEVGDIVVGRVIEVAQKRWRVELNFNQDGVLMLSSMNMPDGIQRRRTSVDELNMRNIFVEHDVVCAEVRNFQHDGSLQLQARSQKYGKLEKGQLLKVDPYLVKRSKHHFHYVESLGIDLIIGCNGFIWVGEHVEVRDPMAIDDQKDEEMISSSSTGKEQSHIPLETRQTICRIGNAIRVLSNLGFTVTLEVIMETVNLSNSKNIDIHDMLGSEFHVVVAENEAERRRTKRKK

SEQ ID NO: 22191 - protein, 201 aa, Arabidopsis thaliana
  peptide (1)..(201): Ceres Seq. ID no. 12377362
  misc_feature (1)..(125): Homolog of NCBI NO: 6321860 NR Description: Ribosomal RNA Processing; Rrp4p [Saccharomyces
  misc_feature (1)..(173): Homolog of NCBI NO: 17544090 NR Description: Ribosomal RNA processing like (34.1 kD)
  misc_feature (1)..(182): Homolog of NCBI NO: 39584168 NR Description: Hypothetical protein CBG05449 [Caenorhabditis
  misc_feature (1)..(150): Homolog of NCBI NO: 24762324 NR Description: CG3931-PA [Drosophila melanogaster]
  misc_feature (1)..(150): Homolog of NCBI NO: 21428348 NR Description: GM02257p [Drosophila melanogaster]
  misc_feature (1)..(103): Homolog of NCBI NO: 19923403 NR Description: homolog of Yeast RRP4 (ribosomal RNA processing
  misc_feature (1)..(106): Homolog of NCBI NO: 21450259 NR Description: hypothetical protein MGC30456 [Mus musculus]
  misc_feature (1)..(157): Homolog of NCBI NO: 19113896 NR Description: conserved hypothetical protein
  misc_feature (1)..(171): Homolog of NCBI NO: 20378673 NR Description: exonuclease [Phytophthora sojae]
  misc_feature (1)..(201): Homolog of NCBI NO: 15218790 NR Description: hypothetical protein; protein id: At1g03360.1
  misc_feature (1)..(125): Homolog of NCBI NO: 6321860 NR Description: Ribosomal RNA Processing; Rrp4p [Saccharomyces
  misc_feature (1)..(173): Homolog of NCBI NO: 17544090 NR Description: Ribosomal RNA processing like (34.1 kD)
  misc_feature (1)..(182): Homolog of NCBI NO: 39584168 NR Description: Hypothetical protein CBG05449 [Caenorhabditis
  misc_feature (1)..(150): Homolog of NCBI NO: 24762324 NR Description: CG3931-PA [Drosophila melanogaster]
  misc_feature (1)..(150): Homolog of NCBI NO: 21428348 NR Description: GM02257p [Drosophila melanogaster]
  misc_feature (1)..(103): Homolog of NCBI NO: 19923403 NR Description: homolog of Yeast RRP4 (ribosomal RNA processing
  misc_feature (1)..(106): Homolog of NCBI NO: 21450259 NR Description: hypothetical protein MGC30456 [Mus musculus]
  misc_feature (1)..(157): Homolog of NCBI NO: 19113896 NR Description: conserved hypothetical protein
  misc_feature (1)..(171): Homolog of NCBI NO: 20378673 NR Description: exonuclease [Phytophthora sojae]
  misc_feature (1)..(201): Homolog of NCBI NO: 15218790 NR Description: hypothetical protein; protein id: At1g03360.1
MLSSMNMPDGIQRRRTSVDELNMRNIFVEHDVVCAEVRNFQHDGSLQLQARSQKYGKLEKGQLLKVDPYLVKRSKHHFHYVESLGIDLIIGCNGFIWVGEHVEVRDPMAIDDQKDEEMISSSSTGKEQSHIPLETRQTICRIGNAIRVLSNLGFTVTLEVIMETVNLSNSKNIDIHDMLGSEFHVVVAENEAERRRTKRKK

SEQ ID NO: 22192 - DNA, 1115 bp, Arabidopsis thaliana
  misc_feature (1)..(1115): Ceres Seq. ID no. 12334730
  misc_feature: MA Experiment ID: 108434 Result: Down-regulated in Transcription
  misc_feature: MA Experiment 108434 PARAMETER Experiment Name: At_Root_Tips_cDNA_P Parameter: Tissue Value: Root Tips
  misc_feature: MA Experiment ID: 108461 Result: Up-regulated in Transcription
  misc_feature: MA Experiment 108461 PARAMETER Experiment Name: At_Germinating_Seeds_cDNA_P Parameter: Age (day) Value: 1 vs. 0
  misc_feature: MA Experiment 108461 PARAMETER Experiment Name: At_Germinating_Seeds_cDNA_P Parameter: Tissue Value: Germinating Seeds
  misc_feature: MA Experiment ID: 108462 Result: Up-regulated in Transcription
  misc_feature: MA Experiment 108462 PARAMETER Experiment Name: At_Germinating_Seeds_cDNA_P Parameter: Age (day) Value: 2 vs. 0
  misc_feature: MA Experiment 108462 PARAMETER Experiment Name: At_Germinating_Seeds_cDNA_P Parameter: Tissue Value: Germinating Seeds
  misc_feature: MA Experiment ID: 108463 Result: Up-regulated in Transcription
  misc_feature: MA Experiment 108463 PARAMETER Experiment Name: At_Germinating_Seeds_cDNA_P Parameter: Age (day) Value: 3 vs. 0
  misc_feature: MA Experiment 108463 PARAMETER Experiment Name: At_Germinating_Seeds_cDNA_P Parameter: Tissue Value: Germinating Seeds
  misc_feature: MA Experiment ID: 108572 Result: Up-regulated in Transcription
  misc_feature: MA Experiment 108572 PARAMETER Experiment Name: At_Drought_cDNA_P Parameter: Timepoint (hr) Value: 1
  misc_feature: MA Experiment 108572 PARAMETER Experiment Name: At_Drought_cDNA_P Parameter: Tissue Value: Aerial
  misc_feature: MA Experiment 108572 PARAMETER Experiment Name: At_Drought_cDNA_P Parameter: Treatment Value: Drought vs. No Drought
  misc_feature: MA Experiment ID: 108573 Result: Up-regulated in Transcription
  misc_feature: MA Experiment 108573 PARAMETER Experiment Name: At_Drought_cDNA_P Parameter: Timepoint (hr) Value: 6
  misc_feature: MA Experiment 108573 PARAMETER Experiment Name: At_Drought_cDNA_P Parameter: Tissue Value: Aerial
  misc_feature: MA Experiment 108573 PARAMETER Experiment Name: At_Drought_cDNA_P Parameter: Treatment Value: Drought vs. No Drought
  misc_feature: MA Experiment ID: 108594 Result: Down-regulated in Transcription
  misc_feature: MA Experiment 108594 PARAMETER Experiment Name: At_Ler-rhl_Root_cDNA_P Parameter: Plant Line Value: null
  misc_feature: MA Experiment ID: 20000069 Result: Up-regulated in Transcription
  misc_feature: MA Experiment 20000069 PARAMETER Experiment Name: At_100uM_ABA_Mutants_cDNA_P Parameter: Plant Line Value: CS23
  misc_feature: MA Experiment 20000069 PARAMETER Experiment Name: At_100uM_ABA_Mutants_cDNA_P Parameter: Timepoint (hr) Value: 6
  misc_feature: MA Experiment 20000069 PARAMETER Experiment Name: At_100uM_ABA_Mutants_cDNA_P Parameter: Tissue Value: Aerial
  misc_feature: MA Experiment 20000069 PARAMETER Experiment Name: At_100uM_ABA_Mutants_cDNA_P Parameter: Treatment Value: 100uM ABA vs. No Treatment
  misc_feature: MA Experiment ID: 20000071 Result: Up-regulated in Transcription
  misc_feature: MA Experiment 20000071 PARAMETER Experiment Name: At_100uM_ABA_Mutants_cDNA_P Parameter: Plant Line Value: CS8104
  misc_feature: MA Experiment 20000071 PARAMETER Experiment Name: At_100uM_ABA_Mutants_cDNA_P Parameter: Timepoint (hr) Value: 6
  misc_feature: MA Experiment 20000071 PARAMETER Experiment Name: At_100uM_ABA_Mutants_cDNA_P Parameter: Tissue Value: Aerial
  misc_feature: MA Experiment 20000071 PARAMETER Experiment Name: At_100uM_ABA_Mutants_cDNA_P Parameter: Treatment Value: 100uM ABA vs. No Treatment
  misc_feature: MA Experiment ID: 20000072 Result: Up-regulated in Transcription
  misc_feature: MA Experiment 20000072 PARAMETER Experiment Name: At_100uM_ABA_Mutants_cDNA_P Parameter: Plant Line Value: CS8105
  misc_feature: MA Experiment 20000072 PARAMETER Experiment Name: At_100uM_ABA_Mutants_cDNA_P Parameter: Timepoint (hr) Value: 6
  misc_feature: MA Experiment 20000072 PARAMETER Experiment Name: At_100uM_ABA_Mutants_cDNA_P Parameter: Tissue Value: Aerial
  misc_feature: MA Experiment 20000072 PARAMETER Experiment Name: At_100uM_ABA_Mutants_cDNA_P Parameter: Treatment Value: 100uM ABA vs. No Treatment
  misc_feature: MA Experiment ID: 20000086 Result: Up-regulated in Transcription
  misc_feature: MA Experiment 20000086 PARAMETER Experiment Name: At_100uM_ABA_Mutants_cDNA_P Parameter: Plant Line Value: CS22
  misc_feature: MA Experiment 20000086 PARAMETER Experiment Name: At_100uM_ABA_Mutants_cDNA_P Parameter: Timepoint (hr) Value: 6
  misc_feature: MA Experiment 20000086 PARAMETER Experiment Name: At_100uM_ABA_Mutants_cDNA_P Parameter: Tissue Value: Aerial
  misc_feature: MA Experiment 20000086 PARAMETER Experiment Name: At_100uM_ABA_Mutants_cDNA_P Parameter: Treatment Value: 100uM ABA vs. No Treatment
  misc_feature: MA Experiment ID: 20000180 Result: Up-regulated in Transcription
  misc_feature: MA Experiment 20000180 PARAMETER Experiment Name: At_Germinating_Seeds_P Parameter: Age (hr) Value: 24 vs. 0
  misc_feature: MA Experiment 20000180 PARAMETER Experiment Name: At_Germinating_Seeds_P Parameter: Tissue Value: Germinating Seeds
  misc_feature: MA Experiment ID: 20000184 Result: Up-regulated in Transcription
  misc_feature: MA Experiment 20000184 PARAMETER Experiment Name: At_Shoots__P Parameter: Age (day) Value: 7
  misc_feature: MA Experiment 20000184 PARAMETER Experiment Name: At_Shoots__P Parameter: Tissue Value: Shoots vs. Whole Plant
  misc_feature: MA Experiment ID: 20000227 Result: Down-regulated in Transcription
  misc_feature: MA Experiment 20000227 PARAMETER Experiment Name: At_Root-Tips-vs-Tops_P Parameter: Tissue Value: Root Tips vs. Root Tops
  misc_feature: MA Experiment ID: 20000439 Result: Up-regulated in Transcription
  misc_feature: MA Experiment 20000439 PARAMETER Experiment Name: At_Roots__P Parameter: Age (day) Value: 14 vs. 21
  misc_feature: MA Experiment 20000439 PARAMETER Experiment Name: At_Roots__P Parameter: Organism Value: A. thaliana
  misc_feature: MA Experiment 20000439 PARAMETER Experiment Name: At_Roots__P Parameter: Tissue Value: Roots vs. Whole Plant
  misc_feature: MA Experiment ID: 20000451 Result: Down-regulated in Transcription
  misc_feature: MA Experiment 20000451 PARAMETER Experiment Name: At_CS6879_Shoots-Roots_P Parameter: Age (day) Value: 14
  misc_feature: MA Experiment 20000451 PARAMETER Experiment Name: At_CS6879_Shoots-Roots_P Parameter: Organism Value: A. thaliana
  misc_feature: MA Experiment 20000451 PARAMETER Experiment Name: At_CS6879_Shoots-Roots_P Parameter: Plant Line Value: CS6879 vs. WS
  misc_feature: MA Experiment 20000451 PARAMETER Experiment Name: At_CS6879_Shoots-Roots_P Parameter: Tissue Value: Roots
  misc_feature: MA Experiment ID: 20000460 Result: Down-regulated in Transcription
  misc_feature: MA Experiment 20000460 PARAMETER Experiment Name: At_10percent_PEG_P Parameter: Age (day) Value: 12
  misc_feature: MA Experiment 20000460 PARAMETER Experiment Name: At_10percent_PEG_P Parameter: Organism Value: A. thaliana
  misc_feature: MA Experiment 20000460 PARAMETER Experiment Name: At_10percent_PEG_P Parameter: Plant Line Value: WS
  misc_feature: MA Experiment 20000460 PARAMETER Experiment Name: At_10percent_PEG_P Parameter: Timepoint (day) Value: 12
  misc_feature: MA Experiment 20000460 PARAMETER Experiment Name: At_10percent_PEG_P Parameter: Tissue Value: Whole Plant
  misc_feature: MA Experiment 20000460 PARAMETER Experiment Name: At_10percent_PEG_P Parameter: Treatment Value: 10percent PEG vs. No Treatment
  misc_feature: MA Experiment ID: 20000573 Result: Up-regulated in Transcription
  misc_feature: MA Experiment 20000573 PARAMETER Experiment Name: At_100uM_ABA_Mutants__P Parameter: Organism Value: A. thaliana
  misc_feature: MA Experiment 20000573 PARAMETER Experiment Name: At_100uM_ABA_Mutants__P Parameter: Plant Line Value: CS22 vs. Ler wt
  misc_feature: MA Experiment 20000573 PARAMETER Experiment Name: At_100uM_ABA_Mutants__P Parameter: Timepoint (hr) Value: N/A
  misc_feature: MA Experiment 20000573 PARAMETER Experiment Name: At_100uM_ABA_Mutants__P Parameter: Tissue Value: Whole Plant
  misc_feature: MA Experiment 20000573 PARAMETER Experiment Name: At_100uM_ABA_Mutants__P Parameter: Treatment Value: None
  misc_feature: MA Experiment ID: 20000574 Result: Up-regulated in Transcription
  misc_feature: MA Experiment 20000574 PARAMETER Experiment Name: At_100uM_ABA_Mutants__P Parameter: Organism Value: A. thaliana
  misc_feature: MA Experiment 20000574 PARAMETER Experiment Name: At_100uM_ABA_Mutants__P Parameter: Plant Line Value: CS23 vs. Ler wt
  misc_feature: MA Experiment 20000574 PARAMETER Experiment Name: At_100uM_ABA_Mutants__P Parameter: Timepoint (hr) Value: N/A
  misc_feature: MA Experiment 20000574 PARAMETER Experiment Name: At_100uM_ABA_Mutants__P Parameter: Tissue Value: Whole Plant
  misc_feature: MA Experiment 20000574 PARAMETER Experiment Name: At_100uM_ABA_Mutants__P Parameter: Treatment Value: None
  misc_feature: MA Experiment ID: 20000575 Result: Down-regulated in Transcription
  misc_feature: MA Experiment 20000575 PARAMETER Experiment Name: At_100uM_ABA_Mutants__P Parameter: Organism Value: A. thaliana
  misc_feature: MA Experiment 20000575 PARAMETER Experiment Name: At_100uM_ABA_Mutants__P Parameter: Plant Line Value: CS22
  misc_feature: MA Experiment 20000575 PARAMETER Experiment Name: At_100uM_ABA_Mutants__P Parameter: Timepoint (hr) Value: 6
  misc_feature: MA Experiment 20000575 PARAMETER Experiment Name: At_100uM_ABA_Mutants__P Parameter: Tissue Value: Whole Plant
  misc_feature: MA Experiment 20000575 PARAMETER Experiment Name: At_100uM_ABA_Mutants__P Parameter: Treatment Value: 1uM ABA vs. No Treatment
  misc_feature: MA Experiment ID: 20000576 Result: Down-regulated in Transcription
  misc_feature: MA Experiment 20000576 PARAMETER Experiment Name: At_100uM_ABA_Mutants__P Parameter: Organism Value: A. thaliana
  misc_feature: MA Experiment 20000576 PARAMETER Experiment Name: At_100uM_ABA_Mutants__P Parameter: Plant Line Value: CS23
  misc_feature: MA Experiment 20000576 PARAMETER Experiment Name: At_100uM_ABA_Mutants__P Parameter: Timepoint (hr) Value: 6
  misc_feature: MA Experiment 20000576 PARAMETER Experiment Name: At_100uM_ABA_Mutants__P Parameter: Tissue Value: Whole Plant
  misc_feature: MA Experiment 20000576 PARAMETER Experiment Name: At_100uM_ABA_Mutants__P Parameter: Treatment Value: 1uM ABA vs. No Treatment
aatcataacttaagccaacctagcaattataataaaagaaaattatgaacggcgaaggaaaggtggtttgcgtcaccggagcttccggatacatagcttcttggattgttaagcttttgctcctccgtggctacaccgtcagggccaccgtccgaaatccaatggatacaaagaaaacaaagcatcttcttacacttgaaggtgcaagtgaaagactaaaactgttcaaatcagatcttttggaagaaggttctttcgatcaagctatagagggatgcgacggtgtcttccatactgcctctccagtttcattcaccgttacagatcctcagactgagatgatcgatccggcggttaatggtactttgaacgttttgagaacgtgcgccaaagtttcttctgtgaagagggtcattgtaacatcgtccactgctgctactctttctattaacccaaacgacgtggtggacgaaaccgtcttcaccgatctaagtgtttacttagcgatgaaggcatggtatggatattcaaaaactttggctgaggaaacagcgtggcggtttgctaaagaaaacgggatcgatttggttgtaatgaatccaggaaacgtgatcgaaccagttttgcagccaactcttaattactctgtagaagtgattgtggatctgataaatggtaaaaacccttccaatagtttttactataggttcatggacgtgagagatgtttctcttgctcacatcaaagcgttcgaggtcccttctgctagtggcagatacatacttgctgatccagatgtaacaatgaaagacattcaaaagcttttacatgaactttttcctgatttgtgccgtgttgataaggataatgagaatgaggtgggtgaaatggcatacaaagtgtgtgtcgataaattgaaaagtttgggaattgagttcactcctatcaaagaatctctcaaggatactgttgttagccttaaggagaggtgtcttcttatatgatctttgacatggactccttgtcatatctttatttttcttgtgatttttaataataaatatgatgtctattgtctaagctttcacttaatgaaatatttgattataatcttc

SEQ ID NO: 22193 - protein, 319 aa, Arabidopsis thaliana
  peptide (1)..(319): Ceres Seq. ID no. 12334731
  misc_feature (8)..(130): Pfam Name: NAD dependent epimerase/dehydratase family Pfam Description: NAD dependent epimerase/dehydratase family
  misc_feature (2)..(315): Homolog of NCBI NO: 15239741 NR Description: cinnamyl-alcohol dehydrogenase - like protein
  misc_feature (38)..(318): Homolog of NCBI NO: 16648726 NR Description: At1g09500/F14J9_16 [Arabidopsis thaliana]
  misc_feature (38)..(318): Homolog of NCBI NO: 30681183 NR Description: cinnamyl-alcohol dehydrogenase (CAD) family
  misc_feature (5)..(318): Homolog of NCBI NO: 15217531 NR Description: putative cinnamyl alcohol dehydrogenase; protein
  misc_feature (5)..(318): Homolog of NCBI NO: 15217530 NR Description: putative cinnamyl alcohol dehydrogenase
  misc_feature (1)..(318): Homolog of NCBI NO: 25284016 NR Description: hypothetical protein [imported] - Arabidopsis
  misc_feature (1)..(318): Homolog of NCBI NO: 15217528 NR Description: putative cinnamyl alcohol dehydrogenase; protein
  misc_feature (1)..(318): Homolog of NCBI NO: 15217529 NR Description: putative cinnamyl alcohol dehydrogenase
  misc_feature (1)..(319): Homolog of NCBI NO: 12597772 NR Description: cinnamyl alcohol dehydrogenase, putative
  misc_feature (1)..(319): Homolog of NCBI NO: 30697406 NR Description: cinnamyl-alcohol dehydrogenase (CAD) family
MNGEGKVVCVTGASGYIASWIVKLLLLRGYTVRATVRNPMDTKKTKHLLTLEGASERLKLFKSDLLEEGSFDQAIEGCDGVFHTASPVSFTVTDPQTEMIDPAVNGTLNVLRTCAKVSSVKRVIVTSSTAATLSINPNDVVDETVFTDLSVYLAMKAWYGYSKTLAEETAWRFAKENGIDLVVMNPGNVIEPVLQPTLNYSVEVIVDLINGKNPSNSFYYRFMDVRDVSLAHIKAFEVPSASGRYILADPDVTMKDIQKLLHELFPDLCRVDKDNENEVGEMAYKVCVDKLKSLGIEFTPIKESLKDTVVSLKERCLLI

SEQ ID NO: 22194 - protein, 280 aa, Arabidopsis thaliana
  peptide (1)..(280): Ceres Seq. ID no. 12334732
  misc_feature (1)..(91): Pfam Name: NAD dependent epimerase/dehydratase family Pfam Description: NAD dependent epimerase/dehydratase family
  misc_feature (1)..(276): Homolog of NCBI NO: 15239741 NR Description: cinnamyl-alcohol dehydrogenase - like protein
  misc_feature (1)..(279): Homolog of NCBI NO: 16648726 NR Description: At1g09500/F14J9_16 [Arabidopsis thaliana]
  misc_feature (1)..(279): Homolog of NCBI NO: 30681183 NR Description: cinnamyl-alcohol dehydrogenase (CAD) family
  misc_feature (1)..(279): Homolog of NCBI NO: 15217531 NR Description: putative cinnamyl alcohol dehydrogenase; protein
  misc_feature (1)..(279): Homolog of NCBI NO: 15217530 NR Description: putative cinnamyl alcohol dehydrogenase
  misc_feature (1)..(279): Homolog of NCBI NO: 25284016 NR Description: hypothetical protein [imported] - Arabidopsis
  misc_feature (1)..(279): Homolog of NCBI NO: 15217528 NR Description: putative cinnamyl alcohol dehydrogenase; protein
  misc_feature (1)..(279): Homolog of NCBI NO: 15217529 NR Description: putative cinnamyl alcohol dehydrogenase
  misc_feature (1)..(280): Homolog of NCBI NO: 12597772 NR Description: cinnamyl alcohol dehydrogenase, putative
  misc_feature (1)..(280): Homolog of NCBI NO: 30697406 NR Description: cinnamyl-alcohol dehydrogenase (CAD) family
MDTKKTKHLLTLEGASERLKLFKSDLLEEGSFDQAIEGCDGVFHTASPVSFTVTDPQTEMIDPAVNGTLNVLRTCAKVSSVKRVIVTSSTAATLSINPNDVVDETVFTDLSVYLAMKAWYGYSKTLAEETAWRFAKENGIDLVVMNPGNVIEPVLQPTLNYSVEVIVDLINGKNPSNSFYYRFMDVRDVSLAHIKAFEVPSASGRYILADPDVTMKDIQKLLHELFPDLCRVDKDNENEVGEMAYKVCVDKLKSLGIEFTPIKESLKDTVVSLKERCLLI

SEQ ID NO: 22195 - protein, 221 aa, Arabidopsis thaliana
  peptide (1)..(221): Ceres Seq. ID no. 12334733
  misc_feature (1)..(196): Pfam Name: 3-beta hydroxysteroid dehydrogenase/isomerase family Pfam Description: 3-beta hydroxysteroid dehydrogenase/isomerase
  misc_feature (1)..(220): Homolog of NCBI NO: 15217530 NR Description: putative cinnamyl alcohol dehydrogenase
  misc_feature (1)..(220): Homolog of NCBI NO: 25284016 NR Description: hypothetical protein [imported] - Arabidopsis
  misc_feature (1)..(220): Homolog of NCBI NO: 15217528 NR Description: putative cinnamyl alcohol dehydrogenase; protein
  misc_feature (1)..(217): Homolog of NCBI NO: 15239741 NR Description: cinnamyl-alcohol dehydrogenase - like protein
  misc_feature (1)..(220): Homolog of NCBI NO: 30681183 NR Description: cinnamyl-alcohol dehydrogenase (CAD) family
  misc_feature (1)..(220): Homolog of NCBI NO: 15217531 NR Description: putative cinnamyl alcohol dehydrogenase; protein
  misc_feature (1)..(220): Homolog of NCBI NO: 16648726 NR Description: At1g09500/F14J9_16 [Arabidopsis thaliana]
  misc_feature (1)..(220): Homolog of NCBI NO: 15217529 NR Description: putative cinnamyl alcohol dehydrogenase
  misc_feature (1)..(221): Homolog of NCBI NO: 12597772 NR Description: cinnamyl alcohol dehydrogenase, putative
  misc_feature (1)..(221): Homolog of NCBI NO: 30697406 NR Description: cinnamyl-alcohol dehydrogenase (CAD) family
MIDPAVNGTLNVLRTCAKVSSVKRVIVTSSTAATLSINPNDVVDETVFTDLSVYLAMKAWYGYSKTLAEETAWRFAKENGIDLVVMNPGNVIEPVLQPTLNYSVEVIVDLINGKNPSNSFYYRFMDVRDVSLAHIKAFEVPSASGRYILADPDVTMKDIQKLLHELFPDLCRVDKDNENEVGEMAYKVCVDKLKSLGIEFTPIKESLKDTVVSLKERCLLI

SEQ ID NO: 22196 - DNA, 896 bp, Arabidopsis thaliana
  misc_feature (1)..(896): Ceres Seq. ID no. 12559164
  misc_feature: MA Experiment ID: 108595 Result: Up-regulated in Transcription
  misc_feature: MA Experiment 108595 PARAMETER Experiment Name: At_Ler-pi_Ovule_cDNA_P Parameter: Plant Line Value: null
gtcttttttcttttaacaaatcccaactttttccttgttgtttgttgttgctgaaactagaagatggatttgctaccatcaagatataagattcacaagacaaagttaagatggatcttaacaatgatgacgatgatgatgatgatggtgatgagaagaggagaatcaatgagattagatatggaatcaggtaacacaaaatgtatctccgatgacatcaaaacaaattacatgaccgttgggacttattccatcgtcaatcccaacgaaggtcaccatcttcctccttctcacaaactcttcgtcactgtgtcatctcctaaagggaaaagccatcatcatgcagagaatgtagagtccgggaaattcgtgtacacggcagaagaaaccggcgattacatgacgtgttttgtggctccaggttatagacctaccgcaaaattcgcggttgatttcgagtggaaaagcggtgttgaggctaaagattggaccactatcgccaagagaggccaaataaccatgctggaggtggaggtgaggaagctactcgacgtgacagaaactatacatgaagaaatgtttcagctccgagagagggaacgggaaatgcaagagttaaaccgatcaacgaattcaagaatggcagctctcagtttactgtcgttcgtggtaacaatgtcggtcgcgggtttacaactatggcacctcaagtcattcttggagaggaagaagctcctctgatcaaacttgttgcttcgattacttttaaacagattttgatgcttatacttacttaaccaatcaatagtcttcatcttgaattttgagaaactaaaatagcaaattttgcttagaccaaagtcaagatcatatatttgcactagtttgttctctgc

SEQ ID NO: 22197 - protein, 225 aa, Arabidopsis thaliana
  peptide (1)..(225): Ceres Seq. ID no. 12559165
  misc_feature (20)..(225): Pfam Name: emp24/gp25L/p24 family Pfam Description: emp24/gp25L/p24 family
  misc_feature (35)..(225): Homolog of NCBI NO: 15223027 NR Description: unknown protein; protein id: At1g14010.1
  misc_feature (20)..(225): Homolog of NCBI NO: 15227591 NR Description: putative Golgi-associated membrane trafficking
  misc_feature (35)..(225): Homolog of NCBI NO: 18921314 NR Description: putative transmembrane protein [Oryza sativa]
  misc_feature (35)..(225): Homolog of NCBI NO: 12597802 NR Description: unknown protein [Arabidopsis thaliana]
  misc_feature (21)..(225): Homolog of NCBI NO: 22330523 NR Description: unknown protein
  misc_feature (19)..(225): Homolog of NCBI NO: 21618241 NR Description: unknown [Arabidopsis thaliana]
  misc_feature (24)..(225): Homolog of NCBI NO: 33146897 NR Description: putative transmembrane protein
  misc_feature (19)..(225): Homolog of NCBI NO: 18396016 NR Description: expressed protein
  misc_feature (22)..(225): Homolog of NCBI NO: 15228586 NR Description: transmembrane trafficking protein, putative
  misc_feature (1)..(225): Homolog of NCBI NO: 11994711 NR Description: golgi-associated membrane trafficking
MDLLPSRYKIHKTKLRWILTMMTMMMMMVMRRGESMRLDMESGNTKCISDDIKTNYMTVGTYSIVNPNEGHHLPPSHKLFVTVSSPKGKSHHHAENVESGKFVYTAEETGDYMTCFVAPGYRPTAKFAVDFEWKSGVEAKDWTTIAKRGQITMLEVEVRKLLDVTETIHEEMFQLREREREMQELNRSTNSRMAALSLLSFVVTMSVAGLQLWHLKSFLERKKLL

SEQ ID NO: 22198 - protein, 205 aa, Arabidopsis thaliana
  peptide (1)..(205): Ceres Seq. ID no. 12559166
  misc_feature (1)..(205): Pfam Name: emp24/gp25L/p24 family Pfam Description: emp24/gp25L/p24 family
  misc_feature (15)..(205): Homolog of NCBI NO: 15223027 NR Description: unknown protein; protein id: At1g14010.1
  misc_feature (1)..(205): Homolog of NCBI NO: 15227591 NR Description: putative Golgi-associated membrane trafficking
  misc_feature (15)..(205): Homolog of NCBI NO: 18921314 NR Description: putative transmembrane protein [Oryza sativa]
  misc_feature (15)..(205): Homolog of NCBI NO: 12597802 NR Description: unknown protein [Arabidopsis thaliana]
  misc_feature (1)..(205): Homolog of NCBI NO: 22330523 NR Description: unknown protein
  misc_feature (1)..(205): Homolog of NCBI NO: 21618241 NR Description: unknown [Arabidopsis thaliana]
  misc_feature (4)..(205): Homolog of NCBI NO: 33146897 NR Description: putative transmembrane protein
  misc_feature (1)..(205): Homolog of NCBI NO: 18396016 NR Description: expressed protein
  misc_feature (2)..(205): Homolog of NCBI NO: 15228586 NR Description: transmembrane trafficking protein, putative
  misc_feature (1)..(205): Homolog of NCBI NO: 11994711 NR Description: golgi-associated membrane trafficking
MMTMMMMMVMRRGESMRLDMESGNTKCISDDIKTNYMTVGTYSIVNPNEGHHLPPSHKLFVTVSSPKGKSHHHAENVESGKFVYTAEETGDYMTCFVAPGYRPTAKFAVDFEWKSGVEAKDWTTIAKRGQITMLEVEVRKLLDVTETIHEEMFQLREREREMQELNRSTNSRMAALSLLSFVVTMSVAGLQLWHLKSFLERKKLL

SEQ ID NO: 22199 - protein, 204 aa, Arabidopsis thaliana
  peptide (1)..(204): Ceres Seq. ID no. 12559167
  misc_feature (1)..(204): Pfam Name: emp24/gp25L/p24 family Pfam Description: emp24/gp25L/p24 family
  misc_feature (14)..(204): Homolog of NCBI NO: 15223027 NR Description: unknown protein; protein id: At1g14010.1
  misc_feature (1)..(204): Homolog of NCBI NO: 15227591 NR Description: putative Golgi-associated membrane trafficking
  misc_feature (14)..(204): Homolog of NCBI NO: 18921314 NR Description: putative transmembrane protein [Oryza sativa]
  misc_feature (14)..(204): Homolog of NCBI NO: 12597802 NR Description: unknown protein [Arabidopsis thaliana]
  misc_feature (1)..(204): Homolog of NCBI NO: 22330523 NR Description: unknown protein
  misc_feature (1)..(204): Homolog of NCBI NO: 21618241 NR Description: unknown [Arabidopsis thaliana]
  misc_feature (3)..(204): Homolog of NCBI NO: 33146897 NR Description: putative transmembrane protein
  misc_feature (1)..(204): Homolog of NCBI NO: 18396016 NR Description: expressed protein
  misc_feature (1)..(204): Homolog of NCBI NO: 15228586 NR Description: transmembrane trafficking protein, putative
  misc_feature (1)..(204): Homolog of NCBI NO: 11994711 NR Description: golgi-associated membrane trafficking
MTMMMMMVMRRGESMRLDMESGNTKCISDDIKTNYMTVGTYSIVNPNEGHHLPPSHKLFVTVSSPKGKSHHHAENVESGKFVYTAEETGDYMTCFVAPGYRPTAKFAVDFEWKSGVEAKDWTTIAKRGQITMLEVEVRKLLDVTETIHEEMFQLREREREMQELNRSTNSRMAALSLLSFVVTMSVAGLQLWHLKSFLERKKLL

SEQ ID NO: 22200 - DNA, 1164 bp, Arabidopsis thaliana
  misc_feature (1)..(1164): Ceres Seq. ID no. 13497612
  misc_feature: MA Experiment ID: 108469 Result: Up-regulated in Transcription
  misc_feature: MA Experiment ID: 108474 Result: Down-regulated in Transcription
  misc_feature: MA Experiment 108474 PARAMETER Experiment Name: At_Drought_Flowers_cDNA_P Parameter: Timepoint (hr) Value: null
  misc_feature: MA Experiment 108474 PARAMETER Experiment Name: At_Drought_Flowers_cDNA_P Parameter: Treatment Value: Drought vs. No Drought
  misc_feature: MA Experiment ID: 108573 Result: Up-regulated in Transcription
  misc_feature: MA Experiment 108573 PARAMETER Experiment Name: At_Drought_cDNA_P Parameter: Timepoint (hr) Value: 6
  misc_feature: MA Experiment 108573 PARAMETER Experiment Name: At_Drought_cDNA_P Parameter: Tissue Value: Aerial
  misc_feature: MA Experiment 108573 PARAMETER Experiment Name: At_Drought_cDNA_P Parameter: Treatment Value: Drought vs. No Drought
  misc_feature: MA Experiment ID: 108579 Result: Up-regulated in Transcription
  misc_feature: MA Experiment 108579 PARAMETER Experiment Name: At_4deg_Cold_cDNA_P Parameter: Temperature (deg C) Value: 4 vs. 22
  misc_feature: MA Experiment 108579 PARAMETER Experiment Name: At_4deg_Cold_cDNA_P Parameter: Timepoint (hr) Value: 6
  misc_feature: MA Experiment 108579 PARAMETER Experiment Name: At_4deg_Cold_cDNA_P Parameter: Tissue Value: Aerial
  misc_feature: MA Experiment ID: 20000173 Result: Up-regulated in Transcription
  misc_feature: MA Experiment 20000173 PARAMETER Experiment Name: At_42deg_Heat_P Parameter: Age (day) Value: 14
  misc_feature: MA Experiment 20000173 PARAMETER Experiment Name: At_42deg_Heat_P Parameter: Organism Value: A. thaliana
  misc_feature: MA Experiment 20000173 PARAMETER Experiment Name: At_42deg_Heat_P Parameter: Plant Line Value: WS
  misc_feature: MA Experiment 20000173 PARAMETER Experiment Name: At_42deg_Heat_P Parameter: Temperature (deg C) Value: 42 vs. 22
  misc_feature: MA Experiment 20000173 PARAMETER Experiment Name: At_42deg_Heat_P Parameter: Timepoint (hr) Value: 6
  misc_feature: MA Experiment 20000173 PARAMETER Experiment Name: At_42deg_Heat_P Parameter: Tissue Value: Aerial
  misc_feature: MA Experiment ID: 20000224 Result: Down-regulated in Transcription
  misc_feature: MA Experiment ID: 20000437 Result: Up-regulated in Transcription
  misc_feature: MA Experiment 20000437 PARAMETER Experiment Name: At_Drought_P Parameter: Age (day) Value: 8
  misc_feature: MA Experiment 20000437 PARAMETER Experiment Name: At_Drought_P Parameter: Organism Value: A. thaliana
  misc_feature: MA Experiment 20000437 PARAMETER Experiment Name: At_Drought_P Parameter: Plant Line Value: WS
  misc_feature: MA Experiment 20000437 PARAMETER Experiment Name: At_Drought_P Parameter: Timepoint (hr) Value: 24
  misc_feature: MA Experiment 20000437 PARAMETER Experiment Name: At_Drought_P Parameter: Tissue Value: Whole Plant
  misc_feature: MA Experiment 20000437 PARAMETER Experiment Name: At_Drought_P Parameter: Treatment Value: Drought vs. No Drought
  misc_feature: MA Experiment ID: 20001248 Result: Up-regulated in Transcription
  misc_feature: MA Experiment 20001248 PARAMETER Experiment Name: At_Far-red-induction_P Parameter: Age (day) Value: 7
  misc_feature: MA Experiment 20001248 PARAMETER Experiment Name: At_Far-red-induction_P Parameter: Light Value: Far-red vs. White
  misc_feature: MA Experiment 20001248 PARAMETER Experiment Name: At_Far-red-induction_P Parameter: Organism Value: A. thaliana
  misc_feature: MA Experiment 20001248 PARAMETER Experiment Name: At_Far-red-induction_P Parameter: Plant Line Value: Columbia
  misc_feature: MA Experiment 20001248 PARAMETER Experiment Name: At_Far-red-induction_P Parameter: Timepoint (hr) Value: 4
  misc_feature: MA Experiment 20001248 PARAMETER Experiment Name: At_Far-red-induction_P Parameter: Tissue Value: Whole Plant
catcgctgtctggaagagctcggttcgagtcatcgctgtctggaacagcgatgactcgagaaccgatctcctccctctctctcttaaccactaagcaaaaatcccatctttctatataaacctctctcccaactctgctacttcccaccgtaaatcgtttctgggttcttaagaataacatggcctcgtcatcatcatcatcttatagattccaatctgggtcttaccctctttcgtcaagtccttctcttgggaatttcgtcgaacgcattaaagacgcttgtcatttccttgtctctgctgttttgggtaccattatctccgcgatcttgaccttcttcttcgcactagtgggcacattgctaggggcacttacaggagctttgataggtcaagaaactgagagtggtttcattagaggagcagcaattggagccatttcgggagctgttttctctatcgaggtctttgaatcatctctggatctctggaaatccgatgagtcgggtttcggatgttttctctacttgattgatgtcattgttagtcttctaagcgggagacttgtacgagagcgcattggtcctgcaatgctaagtgcagtgcaaagtcaaatgggagctgtggatacagcttttgatgatcacacaagcctttttgatacaggaggctcaaaaggattgacaggagaccttgttgagaaaatcccaaagatgacaatcactggcaacaataacactgatgcttctgagaacacagactcatgttctgtttgtcttcaggatttccagctcggtgaaacagttagaagcttgcctcattgtcatcacatgtttcacttaccttgcatagacaattggctccttagacacggttcttgcccgatgtgtagacgtgatatttaatctcttcatctctccatcgtccgtctctcataatgcagtttaacctcgcagttcagatatttctacagctcgtacatcaagagtctgctctgctcttcttccctcctccttgagtttcatgtaaattccagttcttttggctgtttacaattacgatacctctcttactctttcagagtcattgtaggactcctagttctctaatgtacaaagaaacacaaaaatagagtttttgttttatctaattctttactctggc

SEQ ID NO: 22201 - protein, 241 aa, Arabidopsis thaliana
  peptide (1)..(241): Ceres Seq. ID no. 13497613
  misc_feature (196)..(237): Pfam Name: Zinc finger, C3HC4 type (RING finger) Pfam Description: Zinc finger, C3HC4 type (RING finger)
  misc_feature (19)..(241): Homolog of NCBI NO: 37536572 NR Description: hypothetical protein [Oryza sativa (japonica
  misc_feature (200)..(241): Homolog of NCBI NO: 15233363 NR Description: expressed protein [Arabidopsis thaliana]
  misc_feature (7)..(211): Homolog of NCBI NO: 15233363 NR Description: expressed protein [Arabidopsis thaliana]
  misc_feature (14)..(241): Homolog of NCBI NO: 15239242 NR Description: zinc finger (C3HC4-type RING finger) protein
  misc_feature (7)..(241): Homolog of NCBI NO: 27524902 NR Description: NEP1-interacting protein [Arabidopsis thaliana]
  misc_feature (7)..(241): Homolog of NCBI NO: 26451101 NR Description: unknown protein [Arabidopsis thaliana]
  misc_feature (1)..(241): Homolog of NCBI NO: 25411815 NR Description: hypothetical protein At2g17730 [imported] -
  misc_feature (1)..(241): Homolog of NCBI NO: 26452210 NR Description: unknown protein [Arabidopsis thaliana]
  misc_feature (1)..(241): Homolog of NCBI NO: 30680091 NR Description: expressed protein [Arabidopsis thaliana]
  misc_feature (1)..(241): Homolog of NCBI NO: 7485279 NR Description: hypothetical protein A_TM017A05.9 - Arabidopsis
MASSSSSSYRFQSGSYPLSSSPSLGNFVERIKDACHFLVSAVLGTIISAILTFFFALVGTLLGALTGALIGQETESGFIRGAAIGAISGAVFSIEVFESSLDLWKSDESGFGCFLYLIDVIVSLLSGRLVRERIGPAMLSAVQSQMGAVDTAFDDHTSLFDTGGSKGLTGDLVEKIPKMTITGNNNTDASENTDSCSVCLQDFQLGETVRSLPHCHHMFHLPCIDNWLLRHGSCPMCRRDI

SEQ ID NO: 22202 - DNA, 1305 bp, Arabidopsis thaliana
  misc_feature (1)..(1305): Ceres Seq. ID no. 12334870
  misc_feature: MA Experiment ID: 108461 Result: Up-regulated in Transcription
  misc_feature: MA Experiment 108461 PARAMETER Experiment Name: At_Germinating_Seeds_cDNA_P Parameter: Age (day) Value: 1 vs. 0
  misc_feature: MA Experiment 108461 PARAMETER Experiment Name: At_Germinating_Seeds_cDNA_P Parameter: Tissue Value: Germinating Seeds
  misc_feature: MA Experiment ID: 108462 Result: Up-regulated in Transcription
  misc_feature: MA Experiment 108462 PARAMETER Experiment Name: At_Germinating_Seeds_cDNA_P Parameter: Age (day) Value: 2 vs. 0
  misc_feature: MA Experiment 108462 PARAMETER Experiment Name: At_Germinating_Seeds_cDNA_P Parameter: Tissue Value: Germinating Seeds
  misc_feature: MA Experiment ID: 108463 Result: Up-regulated in Transcription
  misc_feature: MA Experiment 108463 PARAMETER Experiment Name: At_Germinating_Seeds_cDNA_P Parameter: Age (day) Value: 3 vs. 0
  misc_feature: MA Experiment 108463 PARAMETER Experiment Name: At_Germinating_Seeds_cDNA_P Parameter: Tissue Value: Germinating Seeds
  misc_feature: MA Experiment ID: 108464 Result: Up-regulated in Transcription
  misc_feature: MA Experiment 108464 PARAMETER Experiment Name: At_Germinating_Seeds_cDNA_P Parameter: Age (day) Value: 4 vs. 0
  misc_feature: MA Experiment 108464 PARAMETER Experiment Name: At_Germinating_Seeds_cDNA_P Parameter: Tissue Value: Germinating Seeds
  misc_feature: MA Experiment ID: 108577 Result: Up-regulated in Transcription
  misc_feature: MA Experiment 108577 PARAMETER Experiment Name: At_42deg_Heat_cDNA_P Parameter: Temperature (deg C) Value: 42 vs. 22
  misc_feature: MA Experiment 108577 PARAMETER Experiment Name: At_42deg_Heat_cDNA_P Parameter: Timepoint (hr) Value: 6
  misc_feature: MA Experiment 108577 PARAMETER Experiment Name: At_42deg_Heat_cDNA_P Parameter: Tissue Value: Aerial
  misc_feature: MA Experiment ID: 108594 Result: Up-regulated in Transcription
  misc_feature: MA Experiment 108594 PARAMETER Experiment Name: At_Ler-rhl_Root_cDNA_P Parameter: Plant Line Value: null
  misc_feature: MA Experiment ID: 20000166 Result: Down-regulated in Transcription
  misc_feature: MA Experiment 20000166 PARAMETER Experiment Name: At_100uM_ABA_P Parameter: Age (day) Value: 14
  misc_feature: MA Experiment 20000166 PARAMETER Experiment Name: At_100uM_ABA_P Parameter: Organism Value: A. thaliana
  misc_feature: MA Experiment 20000166 PARAMETER Experiment Name: At_100uM_ABA_P Parameter: Plant Line Value: WS
  misc_feature: MA Experiment 20000166 PARAMETER Experiment Name: At_100uM_ABA_P Parameter: Timepoint (hr) Value: 1
  misc_feature: MA Experiment 20000166 PARAMETER Experiment Name: At_100uM_ABA_P Parameter: Tissue Value: Aerial
  misc_feature: MA Experiment 20000166 PARAMETER Experiment Name: At_100uM_ABA_P Parameter: Treatment Value: 100uM ABA vs. No Treatment
  misc_feature: MA Experiment ID: 20000184 Result: Up-regulated in Transcription
  misc_feature: MA Experiment 20000184 PARAMETER Experiment Name: At_Shoots__P Parameter: Age (day) Value: 7
  misc_feature: MA Experiment 20000184 PARAMETER Experiment Name: At_Shoots__P Parameter: Tissue Value: Shoots vs. Whole Plant
  misc_feature: MA Experiment ID: 20000213 Result: Down-regulated in Transcription
  misc_feature: MA Experiment 20000213 PARAMETER Experiment Name: At_4deg_Cold_P Parameter: Timepoint (hr) Value: 2
  misc_feature: MA Experiment ID: 20000224 Result: Down-regulated in Transcription
  misc_feature: MA Experiment ID: 20000227 Result: Up-regulated in Transcription
  misc_feature: MA Experiment 20000227 PARAMETER Experiment Name: At_Root-Tips-vs-Tops_P Parameter: Tissue Value: Root Tips vs. Root Tops
  misc_feature: MA Experiment ID: 20000234 Result: Down-regulated in Transcription
  misc_feature: MA Experiment 20000234 PARAMETER Experiment Name: At_Siliques_P Parameter: Age (day) Value: 21
  misc_feature: MA Experiment 20000234 PARAMETER Experiment Name: At_Siliques_P Parameter: Organism Value: A. thaliana
  misc_feature: MA Experiment 20000234 PARAMETER Experiment Name: At_Siliques_P Parameter: Plant Line Value: WS
  misc_feature: MA Experiment 20000234 PARAMETER Experiment Name: At_Siliques_P Parameter: Tissue Value: Less Than 5mm Siliques vs. Whole Plant
  misc_feature: MA Experiment ID: 20000308 Result: Down-regulated in Transcription
  misc_feature: MA Experiment 20000308 PARAMETER Experiment Name: At_100mM_NaCl__P Parameter: Age (day) Value: 17
  misc_feature: MA Experiment 20000308 PARAMETER Experiment Name: At_100mM_NaCl__P Parameter: Organism Value: A. thaliana
  misc_feature: MA Experiment 20000308 PARAMETER Experiment Name: At_100mM_NaCl__P Parameter: Plant Line Value: WS
  misc_feature: MA Experiment 20000308 PARAMETER Experiment Name: At_100mM_NaCl__P Parameter: Timepoint (hr) Value: 72
  misc_feature: MA Experiment 20000308 PARAMETER Experiment Name: At_100mM_NaCl__P Parameter: Tissue Value: Whole Plant
  misc_feature: MA Experiment 20000308 PARAMETER Experiment Name: At_100mM_NaCl__P Parameter: Treatment Value: 100mM NaCl vs. No Treatment
  misc_feature: MA Experiment ID: 20000576 Result: Down-regulated in Transcription
  misc_feature: MA Experiment 20000576 PARAMETER Experiment Name: At_100uM_ABA_Mutants__P Parameter: Organism Value: A. thaliana
  misc_feature: MA Experiment 20000576 PARAMETER Experiment Name: At_100uM_ABA_Mutants__P Parameter: Plant Line Value: CS23
  misc_feature: MA Experiment 20000576 PARAMETER Experiment Name: At_100uM_ABA_Mutants__P Parameter: Timepoint (hr) Value: 6
  misc_feature: MA Experiment 20000576 PARAMETER Experiment Name: At_100uM_ABA_Mutants__P Parameter: Tissue Value: Whole Plant
  misc_feature: MA Experiment 20000576 PARAMETER Experiment Name: At_100uM_ABA_Mutants__P Parameter: Treatment Value: 1uM ABA vs. No Treatment
  misc_feature: MA Experiment ID: 20000794 Result: Up-regulated in Transcription
  misc_feature: MA Experiment 20000794 PARAMETER Experiment Name: At_Petals_P Parameter: Age (day) Value: 23-25 days
  misc_feature: MA Experiment 20000794 PARAMETER Experiment Name: At_Petals_P Parameter: Plant Line Value: WS
  misc_feature: MA Experiment 20000794 PARAMETER Experiment Name: At_Petals_P Parameter: Tissue Value: Petals vs. Whole plant
  misc_feature: MA Experiment ID: 20001247 Result: Up-regulated in Transcription
  misc_feature: MA Experiment 20001247 PARAMETER Experiment Name: At_Far-red-induction_P Parameter: Age (day) Value: 7
  misc_feature: MA Experiment 20001247 PARAMETER Experiment Name: At_Far-red-induction_P Parameter: Light Value: Far-red vs. White
  misc_feature: MA Experiment 20001247 PARAMETER Experiment Name: At_Far-red-induction_P Parameter: Organism Value: A. thaliana
  misc_feature: MA Experiment 20001247 PARAMETER Experiment Name: At_Far-red-induction_P Parameter: Plant Line Value: Columbia
  misc_feature: MA Experiment 20001247 PARAMETER Experiment Name: At_Far-red-induction_P Parameter: Timepoint (hr) Value: 1
  misc_feature: MA Experiment 20001247 PARAMETER Experiment Name: At_Far-red-induction_P Parameter: Tissue Value: Whole Plant
  misc_feature: MA Experiment ID: 20001248 Result: Up-regulated in Transcription
  misc_feature: MA Experiment 20001248 PARAMETER Experiment Name: At_Far-red-induction_P Parameter: Age (day) Value: 7
  misc_feature: MA Experiment 20001248 PARAMETER Experiment Name: At_Far-red-induction_P Parameter: Light Value: Far-red vs. White
  misc_feature: MA Experiment 20001248 PARAMETER Experiment Name: At_Far-red-induction_P Parameter: Organism Value: A. thaliana
  misc_feature: MA Experiment 20001248 PARAMETER Experiment Name: At_Far-red-induction_P Parameter: Plant Line Value: Columbia
  misc_feature: MA Experiment 20001248 PARAMETER Experiment Name: At_Far-red-induction_P Parameter: Timepoint (hr) Value: 4
  misc_feature: MA Experiment 20001248 PARAMETER Experiment Name: At_Far-red-induction_P Parameter: Tissue Value: Whole Plant
  misc_feature: MA Experiment ID: 20001450 Result: Up-regulated in Transcription
  misc_feature: MA Experiment 20001450 PARAMETER Experiment Name: At_Far-red-induction_P Parameter: Age (day) Value: 7
  misc_feature: MA Experiment 20001450 PARAMETER Experiment Name: At_Far-red-induction_P Parameter: Light Value: Far-red vs. White
  misc_feature: MA Experiment 20001450 PARAMETER Experiment Name: At_Far-red-induction_P Parameter: Organism Value: A. thaliana
  misc_feature: MA Experiment 20001450 PARAMETER Experiment Name: At_Far-red-induction_P Parameter: Plant Line Value: Columbia
  misc_feature: MA Experiment 20001450 PARAMETER Experiment Name: At_Far-red-induction_P Parameter: Timepoint (hr) Value: 8
  misc_feature: MA Experiment 20001450 PARAMETER Experiment Name: At_Far-red-induction_P Parameter: Tissue Value: Whole Plant
  misc_feature: MA Experiment ID: 20001451 Result: Up-regulated in Transcription
  misc_feature: MA Experiment 20001451 PARAMETER Experiment Name: At_Far-red-induction_P Parameter: Age (day) Value: 7
  misc_feature: MA Experiment 20001451 PARAMETER Experiment Name: At_Far-red-induction_P Parameter: Light Value: Far-red vs. White
  misc_feature: MA Experiment 20001451 PARAMETER Experiment Name: At_Far-red-induction_P Parameter: Organism Value: A. thaliana
  misc_feature: MA Experiment 20001451 PARAMETER Experiment Name: At_Far-red-induction_P Parameter: Plant Line Value: Columbia
  misc_feature: MA Experiment 20001451 PARAMETER Experiment Name: At_Far-red-induction_P Parameter: Timepoint (hr) Value: 24
  misc_feature: MA Experiment 20001451 PARAMETER Experiment Name: At_Far-red-induction_P Parameter: Tissue Value: Whole Plant
  misc_feature: MA Experiment ID: 20001557 Result: Up-regulated in Transcription
  misc_feature: MA Experiment 20001557 PARAMETER Experiment Name: At_Drought_Soil_Dry_P Parameter: Age (day) Value: 27
  misc_feature: MA Experiment 20001557 PARAMETER Experiment Name: At_Drought_Soil_Dry_P Parameter: Organism Value: A. thaliana
  misc_feature: MA Experiment 20001557 PARAMETER Experiment Name: At_Drought_Soil_Dry_P Parameter: Plant Line Value: WS
  misc_feature: MA Experiment 20001557 PARAMETER Experiment Name: At_Drought_Soil_Dry_P Parameter: Post Timepoint (hr) Value: 3
  misc_feature: MA Experiment 20001557 PARAMETER Experiment Name: At_Drought_Soil_Dry_P Parameter: Post-Treatment Value: Re-Water vs. No Drought
  misc_feature: MA Experiment 20001557 PARAMETER Experiment Name: At_Drought_Soil_Dry_P Parameter: Timepoint (day) Value: 13
  misc_feature: MA Experiment 20001557 PARAMETER Experiment Name: At_Drought_Soil_Dry_P Parameter: Treatment Value: Drought vs. No Drought
  misc_feature: MA Experiment ID: 20001904 Result: Up-regulated in Transcription
  misc_feature: MA Experiment 20001904 PARAMETER Experiment Name: At_Drought_Reproduction_P Parameter: Age (day) Value: 37
  misc_feature: MA Experiment 20001904 PARAMETER Experiment Name: At_Drought_Reproduction_P Parameter: Organism Value: A. thaliana
  misc_feature: MA Experiment 20001904 PARAMETER Experiment Name: At_Drought_Reproduction_P Parameter: Plant Line Value: WS
  misc_feature: MA Experiment 20001904 PARAMETER Experiment Name: At_Drought_Reproduction_P Parameter: Timepoint (day) Value: 7
  misc_feature: MA Experiment 20001904 PARAMETER Experiment Name: At_Drought_Reproduction_P Parameter: Tissue Value: Rosettes
  misc_feature: MA Experiment 20001904 PARAMETER Experiment Name: At_Drought_Reproduction_P Parameter: Treatment Value: Drought vs. No Drought
  misc_feature: MA Experiment ID: 20001905 Result: Up-regulated in Transcription
  misc_feature: MA Experiment 20001905 PARAMETER Experiment Name: At_Drought_Reproduction_P Parameter: Age (day) Value: 40
  misc_feature: MA Experiment 20001905 PARAMETER Experiment Name: At_Drought_Reproduction_P Parameter: Organism Value: A. thaliana
  misc_feature: MA Experiment 20001905 PARAMETER Experiment Name: At_Drought_Reproduction_P Parameter: Plant Line Value: WS
  misc_feature: MA Experiment 20001905 PARAMETER Experiment Name: At_Drought_Reproduction_P Parameter: Timepoint (day) Value: 10
  misc_feature: MA Experiment 20001905 PARAMETER Experiment Name: At_Drought_Reproduction_P Parameter: Tissue Value: Rosettes
  misc_feature: MA Experiment 20001905 PARAMETER Experiment Name: At_Drought_Reproduction_P Parameter: Treatment Value: Drought vs. No Drought
atagtttcgtgtggacctaactaaaactagtcgtaactcattcatggaggctttgttctgctctgagatacccaacaacaacatcagatcttccattaacgatctatcttcttcttcttcatatacatggccaatgatcatgacctcctcttcttcttcttcttcatctcccacaatcatgaacatagagaacattcctagatgcgactgggatctctctctttccgccgttgtttcctccgcatccaccggatcagacgctatcggagcaatcgagttcgaccctaccggagagatcatagctacgggaggaatcgcaagaaagatcagatcgtatcgtttaagctctttgttagagtcacgtgacgatcacgtaacagcttcagagagctgtatttgcacgccggcgaagcttagtagtctcaaatggagacccgatttttccggtcgggttatcgggtcaggagattacgacggagttgtcaccgagtacgacgtggagaaacaagtgcctgtttccgagagagacgagcatggaggtagaaggatttggagcgtggactacacgctttacaatggctctcttctaggcgcgtcaggctccgacgacggaacggttcaaatgtgggatccacgtaacggagggacgttagaagaaacggttaggcccggtggtggagcggcgatttgttcggtagagttcgatccgttcggtggatcttccatagccgttggatgtgctgaccagaatgcctacgtgtatgacatcagaagactagtggaccctttgatcgtattagacggccataccaaaacggtgacgtatgctcgattcatggattctcacacgatcgttaccggttcgaccgacgggagcttgaagcaatgggatatagataatggacggcgcgtggttcgcacgtaccgagggcatgtgaatagccggaactttgttgggttgtcggtttggagacatggtggtttggtcgtgtccgggtcagagaataaccaagtgtttgtgtacgataagaggtgggaggaaccggtttgggtttgtggattgggtcatacgaaccggtttggatctgaccgacggtttgttagtagtgtgtgtttgagacaagtggatgaagattggtgcacacttgtggccggaggatccgatggggctttagaaattttctcgggcaaacagagctaatcagtatttatattatttttttctgctcatgattaatacaaactgtttttcagttgattttatactgtctatagttattaattttaatatgattgaatgttact

SEQ ID NO: 22203 - protein, 385 aa, Arabidopsis thaliana
  peptide (1)..(385): Ceres Seq. ID no. 12334871
  misc_feature (341)..(381): Pfam Name: WD domain, G-beta repeat Pfam Description: WD domain, G-beta repeat
  misc_feature (341)..(381): Pfam Name: WD domain, G-beta repeat Pfam Description: WD domain, G-beta repeat
  misc_feature (71)..(379): Homolog of NCBI NO: 15029364 NR Description: photoregulatory zinc-finger protein COP1 [Rosa
  misc_feature (71)..(379): Homolog of NCBI NO: 34910754 NR Description: P0042A10.6 [Oryza sativa (japonica
  misc_feature (71)..(379): Homolog of NCBI NO: 4090943 NR Description: COP1 homolog [Lycopersicon esculentum]
  misc_feature (71)..(379): Homolog of NCBI NO: 15219179 NR Description: phytochrome A supressor spa1, putative; protein
  misc_feature (71)..(379): Homolog of NCBI NO: 11127996 NR Description: COP1 [Ipomoea nil]
  misc_feature (71)..(379): Homolog of NCBI NO: 15029364 NR Description: photoregulatory zinc-finger protein COP1 [Rosa
  misc_feature (71)..(379): Homolog of NCBI NO: 4090943 NR Description: COP1 homolog [Lycopersicon esculentum]
  misc_feature (71)..(379): Homolog of NCBI NO: 11127996 NR Description: COP1 [Ipomoea nil]
  misc_feature (1)..(385): Homolog of NCBI NO: 21592812 NR Description: contains similarity to photomorphogenesis
  misc_feature (1)..(385): Homolog of NCBI NO: 15242945 NR Description: G-protein beta-subunit (transducin) family
  misc_feature (53)..(384): Homolog of NCBI NO: 10176840 NR Description: contains similarity to photomorphogenesis
  misc_feature (149)..(384): Homolog of NCBI NO: 18420709 NR Description: G-protein beta-subunit (transducin) family
  misc_feature (71)..(379): Homolog of NCBI NO: 9294263 NR Description: photomorphogenesis repressor protein-like
  misc_feature (71)..(379): Homolog of NCBI NO: 15219179 NR Description: phytochrome A supressor spa1, putative; protein
  misc_feature (71)..(379): Homolog of NCBI NO: 34910754 NR Description: P0042A10.6 [Oryza sativa (japonica
  misc_feature (71)..(379): Homolog of NCBI NO: 9294263 NR Description: photomorphogenesis repressor protein-like
  misc_feature (149)..(384): Homolog of NCBI NO: 18420709 NR Description: G-protein beta-subunit (transducin) family
  misc_feature (53)..(384): Homolog of NCBI NO: 10176840 NR Description: contains similarity to photomorphogenesis
  misc_feature (1)..(385): Homolog of NCBI NO: 15242945 NR Description: G-protein beta-subunit (transducin) family
  misc_feature (1)..(385): Homolog of NCBI NO: 21592812 NR Description: contains similarity to photomorphogenesis
MEALFCSEIPNNNIRSSINDLSSSSSYTWPMIMTSSSSSSSSPTIMNIENIPRCDWDLSLSAVVSSASTGSDAIGAIEFDPTGEIIATGGIARKIRSYRLSSLLESRDDHVTASESCICTPAKLSSLKWRPDFSGRVIGSGDYDGVVTEYDVEKQVPVSERDEHGGRRIWSVDYTLYNGSLLGASGSDDGTVQMWDPRNGGTLEETVRPGGGAAICSVEFDPFGGSSIAVGCADQNAYVYDIRRLVDPLIVLDGHTKTVTYARFMDSHTIVTGSTDGSLKQWDIDNGRRVVRTYRGHVNSRNFVGLSVWRHGGLVVSGSENNQVFVYDKRWEEPVWVCGLGHTNRFGSDRRFVSSVCLRQVDEDWCTLVAGGSDGALEIFSGKQS

SEQ ID NO: 22204 - protein, 355 aa, Arabidopsis thaliana
  peptide (1)..(355): Ceres Seq. ID no. 12334872
  misc_feature (311)..(351): Pfam Name: WD domain, G-beta repeat Pfam Description: WD domain, G-beta repeat
  misc_feature (311)..(351): Pfam Name: WD domain, G-beta repeat Pfam Description: WD domain, G-beta repeat
  misc_feature (41)..(349): Homolog of NCBI NO: 15029364 NR Description: photoregulatory zinc-finger protein COP1 [Rosa
  misc_feature (41)..(349): Homolog of NCBI NO: 34910754 NR Description: P0042A10.6 [Oryza sativa (japonica
  misc_feature (41)..(349): Homolog of NCBI NO: 4090943 NR Description: COP1 homolog [Lycopersicon esculentum]
  misc_feature (41)..(349): Homolog of NCBI NO: 15219179 NR Description: phytochrome A supressor spa1, putative; protein
  misc_feature (41)..(349): Homolog of NCBI NO: 11127996 NR Description: COP1 [Ipomoea nil]
  misc_feature (41)..(349): Homolog of NCBI NO: 15029364 NR Description: photoregulatory zinc-finger protein COP1 [Rosa
  misc_feature (41)..(349): Homolog of NCBI NO: 4090943 NR Description: COP1 homolog [Lycopersicon esculentum]
  misc_feature (41)..(349): Homolog of NCBI NO: 11127996 NR Description: COP1 [Ipomoea nil]
  misc_feature (1)..(355): Homolog of NCBI NO: 21592812 NR Description: contains similarity to photomorphogenesis
  misc_feature (1)..(355): Homolog of NCBI NO: 15242945 NR Description: G-protein beta-subunit (transducin) family
  misc_feature (23)..(354): Homolog of NCBI NO: 10176840 NR Description: contains similarity to photomorphogenesis
  misc_feature (119)..(354): Homolog of NCBI NO: 18420709 NR Description: G-protein beta-subunit (transducin) family
  misc_feature (41)..(349): Homolog of NCBI NO: 9294263 NR Description: photomorphogenesis repressor protein-like
  misc_feature (41)..(349): Homolog of NCBI NO: 15219179 NR Description: phytochrome A supressor spa1, putative; protein
  misc_feature (41)..(349): Homolog of NCBI NO: 34910754 NR Description: P0042A10.6 [Oryza sativa (japonica
  misc_feature (41)..(349): Homolog of NCBI NO: 9294263 NR Description: photomorphogenesis repressor protein-like
  misc_feature (119)..(354): Homolog of NCBI NO: 18420709 NR Description: G-protein beta-subunit (transducin) family
  misc_feature (23)..(354): Homolog of NCBI NO: 10176840 NR Description: contains similarity to photomorphogenesis
  misc_feature (1)..(355): Homolog of NCBI NO: 15242945 NR Description: G-protein beta-subunit (transducin) family
  misc_feature (1)..(355): Homolog of NCBI NO: 21592812 NR Description: contains similarity to photomorphogenesis
MIMTSSSSSSSSPTIMNIENIPRCDWDLSLSAVVSSASTGSDAIGAIEFDPTGEIIATGGIARKIRSYRLSSLLESRDDHVTASESCICTPAKLSSLKWRPDFSGRVIGSGDYDGVVTEYDVEKQVPVSERDEHGGRRIWSVDYTLYNGSLLGASGSDDGTVQMWDPRNGGTLEETVRPGGGAAICSVEFDPFGGSSIAVGCADQNAYVYDIRRLVDPLIVLDGHTKTVTYARFMDSHTIVTGSTDGSLKQWDIDNGRRVVRTYRGHVNSRNFVGLSVWRHGGLVVSGSENNQVFVYDKRWEEPVWVCGLGHTNRFGSDRRFVSSVCLRQVDEDWCTLVAGGSDGALEIFSGKQS

SEQ ID NO: 22205 - protein, 353 aa, Arabidopsis thaliana
  peptide (1)..(353): Ceres Seq. ID no. 12334873
  misc_feature (309)..(349): Pfam Name: WD domain, G-beta repeat Pfam Description: WD domain, G-beta repeat
  misc_feature (309)..(349): Pfam Name: WD domain, G-beta repeat Pfam Description: WD domain, G-beta repeat
  misc_feature (39)..(347): Homolog of NCBI NO: 15029364 NR Description: photoregulatory zinc-finger protein COP1 [Rosa
  misc_feature (39)..(347): Homolog of NCBI NO: 34910754 NR Description: P0042A10.6 [Oryza sativa (japonica
  misc_feature (39)..(347): Homolog of NCBI NO: 4090943 NR Description: COP1 homolog [Lycopersicon esculentum]
  misc_feature (39)..(347): Homolog of NCBI NO: 15219179 NR Description: phytochrome A supressor spa1, putative; protein
  misc_feature (39)..(347): Homolog of NCBI NO: 11127996 NR Description: COP1 [Ipomoea nil]
  misc_feature (39)..(347): Homolog of NCBI NO: 15029364 NR Description: photoregulatory zinc-finger protein COP1 [Rosa
  misc_feature (39)..(347): Homolog of NCBI NO: 4090943 NR Description: COP1 homolog [Lycopersicon esculentum]
  misc_feature (39)..(347): Homolog of NCBI NO: 11127996 NR Description: COP1 [Ipomoea nil]
  misc_feature (1)..(353): Homolog of NCBI NO: 21592812 NR Description: contains similarity to photomorphogenesis
  misc_feature (1)..(353): Homolog of NCBI NO: 15242945 NR Description: G-protein beta-subunit (transducin) family
  misc_feature (21)..(352): Homolog of NCBI NO: 10176840 NR Description: contains similarity to photomorphogenesis
  misc_feature (117)..(352): Homolog of NCBI NO: 18420709 NR Description: G-protein beta-subunit (transducin) family
  misc_feature (39)..(347): Homolog of NCBI NO: 9294263 NR Description: photomorphogenesis repressor protein-like
  misc_feature (39)..(347): Homolog of NCBI NO: 15219179 NR Description: phytochrome A supressor spa1, putative; protein
  misc_feature (39)..(347): Homolog of NCBI NO: 34910754 NR Description: P0042A10.6 [Oryza sativa (japonica
  misc_feature (39)..(347): Homolog of NCBI NO: 9294263 NR Description: photomorphogenesis repressor protein-like
  misc_feature (117)..(352): Homolog of NCBI NO: 18420709 NR Description: G-protein beta-subunit (transducin) family
  misc_feature (21)..(352): Homolog of NCBI NO: 10176840 NR Description: contains similarity to photomorphogenesis
  misc_feature (1)..(353): Homolog of NCBI NO: 15242945 NR Description: G-protein beta-subunit (transducin) family
  misc_feature (1)..(353): Homolog of NCBI NO: 21592812 NR Description: contains similarity to photomorphogenesis
MTSSSSSSSSPTIMNIENIPRCDWDLSLSAVVSSASTGSDAIGAIEFDPTGEIIATGGIARKIRSYRLSSLLESRDDHVTASESCICTPAKLSSLKWRPDFSGRVIGSGDYDGVVTEYDVEKQVPVSERDEHGGRRIWSVDYTLYNGSLLGASGSDDGTVQMWDPRNGGTLEETVRPGGGAAICSVEFDPFGGSSIAVGCADQNAYVYDIRRLVDPLIVLDGHTKTVTYARFMDSHTIVTGSTDGSLKQWDIDNGRRVVRTYRGHVNSRNFVGLSVWRHGGLVVSGSENNQVFVYDKRWEEPVWVCGLGHTNRFGSDRRFVSSVCLRQVDEDWCTLVAGGSDGALEIFSGKQS

SEQ ID NO: 22206 - DNA, 1087 bp, Arabidopsis thaliana
  misc_feature (1)..(1087): Ceres Seq. ID no. 12327341
  misc_feature: MA Experiment ID: 108434 Result: Down-regulated in Transcription
  misc_feature: MA Experiment 108434 PARAMETER Experiment Name: At_Root_Tips_cDNA_P Parameter: Tissue Value: Root Tips
  misc_feature: MA Experiment ID: 108462 Result: Up-regulated in Transcription
  misc_feature: MA Experiment 108462 PARAMETER Experiment Name: At_Germinating_Seeds_cDNA_P Parameter: Age (day) Value: 2 vs. 0
  misc_feature: MA Experiment 108462 PARAMETER Experiment Name: At_Germinating_Seeds_cDNA_P Parameter: Tissue Value: Germinating Seeds
  misc_feature: MA Experiment ID: 108463 Result: Up-regulated in Transcription
  misc_feature: MA Experiment 108463 PARAMETER Experiment Name: At_Germinating_Seeds_cDNA_P Parameter: Age (day) Value: 3 vs. 0
  misc_feature: MA Experiment 108463 PARAMETER Experiment Name: At_Germinating_Seeds_cDNA_P Parameter: Tissue Value: Germinating Seeds
  misc_feature: MA Experiment ID: 108464 Result: Up-regulated in Transcription
  misc_feature: MA Experiment 108464 PARAMETER Experiment Name: At_Germinating_Seeds_cDNA_P Parameter: Age (day) Value: 4 vs. 0
  misc_feature: MA Experiment 108464 PARAMETER Experiment Name: At_Germinating_Seeds_cDNA_P Parameter: Tissue Value: Germinating Seeds
  misc_feature: MA Experiment ID: 108473 Result: Up-regulated in Transcription
  misc_feature: MA Experiment 108473 PARAMETER Experiment Name: At_Drought_Flowers_cDNA_P Parameter: Timepoint (hr) Value: 7 d
  misc_feature: MA Experiment 108473 PARAMETER Experiment Name: At_Drought_Flowers_cDNA_P Parameter: Tissue Value: Flower
  misc_feature: MA Experiment 108473 PARAMETER Experiment Name: At_Drought_Flowers_cDNA_P Parameter: Treatment Value: Drought vs. No Drought
  misc_feature: MA Experiment ID: 108573 Result: Down-regulated in Transcription
  misc_feature: MA Experiment 108573 PARAMETER Experiment Name: At_Drought_cDNA_P Parameter: Timepoint (hr) Value: 6
  misc_feature: MA Experiment 108573 PARAMETER Experiment Name: At_Drought_cDNA_P Parameter: Tissue Value: Aerial
  misc_feature: MA Experiment 108573 PARAMETER Experiment Name: At_Drought_cDNA_P Parameter: Treatment Value: Drought vs. No Drought
  misc_feature: MA Experiment ID: 108585 Result: Up-regulated in Transcription
  misc_feature: MA Experiment 108585 PARAMETER Experiment Name: At_5mM_NaNP_cDNA_P Parameter: Timepoint (hr) Value: 6
  misc_feature: MA Experiment 108585 PARAMETER Experiment Name: At_5mM_NaNP_cDNA_P Parameter: Tissue Value: Aerial
  misc_feature: MA Experiment 108585 PARAMETER Experiment Name: At_5mM_NaNP_cDNA_P Parameter: Treatment Value: null
  misc_feature: MA Experiment ID: 108594 Result: Up-regulated in Transcription
  misc_feature: MA Experiment 108594 PARAMETER Experiment Name: At_Ler-rhl_Root_cDNA_P Parameter: Plant Line Value: null
  misc_feature: MA Experiment ID: 108595 Result: Up-regulated in Transcription
  misc_feature: MA Experiment 108595 PARAMETER Experiment Name: At_Ler-pi_Ovule_cDNA_P Parameter: Plant Line Value: null
  misc_feature: MA Experiment ID: 108609 Result: Down-regulated in Transcription
  misc_feature: MA Experiment 108609 PARAMETER Experiment Name: At_100uM_ABA_cDNA_P Parameter: Timepoint (hr) Value: 24
  misc_feature: MA Experiment 108609 PARAMETER Experiment Name: At_100uM_ABA_cDNA_P Parameter: Tissue Value: Aerial
  misc_feature: MA Experiment 108609 PARAMETER Experiment Name: At_100uM_ABA_cDNA_P Parameter: Treatment Value: 100uM ABA vs. No Treatment
  misc_feature: MA Experiment ID: 20000068 Result: Up-regulated in Transcription
  misc_feature: MA Experiment ID: 20000070 Result: Up-regulated in Transcription
  misc_feature: MA Experiment 20000070 PARAMETER Experiment Name: At_100uM_ABA_Mutants_cDNA_P Parameter: Plant Line Value: CS24
  misc_feature: MA Experiment 20000070 PARAMETER Experiment Name: At_100uM_ABA_Mutants_cDNA_P Parameter: Timepoint (hr) Value: 6
  misc_feature: MA Experiment 20000070 PARAMETER Experiment Name: At_100uM_ABA_Mutants_cDNA_P Parameter: Tissue Value: Aerial
  misc_feature: MA Experiment 20000070 PARAMETER Experiment Name: At_100uM_ABA_Mutants_cDNA_P Parameter: Treatment Value: 100uM ABA vs. No Treatment
  misc_feature: MA Experiment ID: 20000088 Result: Up-regulated in Transcription
  misc_feature: MA Experiment 20000088 PARAMETER Experiment Name: At_100uM_ABA_Mutants_cDNA_P Parameter: Plant Line Value: Landsberg
  misc_feature: MA Experiment 20000088 PARAMETER Experiment Name: At_100uM_ABA_Mutants_cDNA_P Parameter: Timepoint (hr) Value: 6
  misc_feature: MA Experiment 20000088 PARAMETER Experiment Name: At_100uM_ABA_Mutants_cDNA_P Parameter: Tissue Value: Aerial
  misc_feature: MA Experiment 20000088 PARAMETER Experiment Name: At_100uM_ABA_Mutants_cDNA_P Parameter: Treatment Value: 100uM ABA vs. No Treatment
  misc_feature: MA Experiment ID: 20000089 Result: Up-regulated in Transcription
  misc_feature: MA Experiment ID: 20000093 Result: Down-regulated in Transcription
  misc_feature: MA Experiment 20000093 PARAMETER Experiment Name: At_42deg_Heat_cDNA_P Parameter: Temperature (deg C) Value: 42 vs. 22
  misc_feature: MA Experiment 20000093 PARAMETER Experiment Name: At_42deg_Heat_cDNA_P Parameter: Timepoint (hr) Value: 0.5
  misc_feature: MA Experiment 20000093 PARAMETER Experiment Name: At_42deg_Heat_cDNA_P Parameter: Tissue Value: Aerial
  misc_feature: MA Experiment ID: 20000117 Result: Up-regulated in Transcription
  misc_feature: MA Experiment 20000117 PARAMETER Experiment Name: At_100uM_ABA_Mutants_cDNA_P Parameter: Plant Line Value: Columbia
  misc_feature: MA Experiment 20000117 PARAMETER Experiment Name: At_100uM_ABA_Mutants_cDNA_P Parameter: Timepoint (hr) Value: 6
  misc_feature: MA Experiment 20000117 PARAMETER Experiment Name: At_100uM_ABA_Mutants_cDNA_P Parameter: Tissue Value: Aerial
  misc_feature: MA Experiment 20000117 PARAMETER Experiment Name: At_100uM_ABA_Mutants_cDNA_P Parameter: Treatment Value: 100uM ABA vs. No Treatment
  misc_feature: MA Experiment ID: 20000214 Result: Down-regulated in Transcription
  misc_feature: MA Experiment 20000214 PARAMETER Experiment Name: At_4deg_Cold_P Parameter: Timepoint (hr) Value: 6
  misc_feature: MA Experiment ID: 20000235 Result: Down-regulated in Transcription
  misc_feature: MA Experiment 20000235 PARAMETER Experiment Name: At_Siliques_P Parameter: Age (day) Value: 21
  misc_feature: MA Experiment 20000235 PARAMETER Experiment Name: At_Siliques_P Parameter: Organism Value: A. thaliana
  misc_feature: MA Experiment 20000235 PARAMETER Experiment Name: At_Siliques_P Parameter: Plant Line Value: WS
  misc_feature: MA Experiment 20000235 PARAMETER Experiment Name: At_Siliques_P Parameter: Tissue Value: 5-10mm Siliques vs. Whole Plant
  misc_feature: MA Experiment ID: 20000439 Result: Down-regulated in Transcription
  misc_feature: MA Experiment 20000439 PARAMETER Experiment Name: At_Roots__P Parameter: Age (day) Value: 14 vs. 21
  misc_feature: MA Experiment 20000439 PARAMETER Experiment Name: At_Roots__P Parameter: Organism Value: A. thaliana
  misc_feature: MA Experiment 20000439 PARAMETER Experiment Name: At_Roots__P Parameter: Tissue Value: Roots vs. Whole Plant
  misc_feature: MA Experiment ID: 20000455 Result: Down-regulated in Transcription
  misc_feature: MA Experiment 20000455 PARAMETER Experiment Name: At_100uM_ABA_P Parameter: Age (day) Value: 16
  misc_feature: MA Experiment 20000455 PARAMETER Experiment Name: At_100uM_ABA_P Parameter: Organism Value: A. thaliana
  misc_feature: MA Experiment 20000455 PARAMETER Experiment Name: At_100uM_ABA_P Parameter: Plant Line Value: WS
  misc_feature: MA Experiment 20000455 PARAMETER Experiment Name: At_100uM_ABA_P Parameter: Timepoint (hr) Value: 48
  misc_feature: MA Experiment 20000455 PARAMETER Experiment Name: At_100uM_ABA_P Parameter: Tissue Value: Aerial
  misc_feature: MA Experiment 20000455 PARAMETER Experiment Name: At_100uM_ABA_P Parameter: Treatment Value: 100uM ABA vs. No Treatment
  misc_feature: MA Experiment ID: 20000527 Result: Down-regulated in Transcription
  misc_feature: MA Experiment 20000527 PARAMETER Experiment Name: At_10percent_PEG_P Parameter: Age (day) Value: 20
  misc_feature: MA Experiment 20000527 PARAMETER Experiment Name: At_10percent_PEG_P Parameter: Organism Value: A. thaliana
  misc_feature: MA Experiment 20000527 PARAMETER Experiment Name: At_10percent_PEG_P Parameter: Plant Line Value: WS
  misc_feature: MA Experiment 20000527 PARAMETER Experiment Name: At_10percent_PEG_P Parameter: Timepoint (day) Value: 20
  misc_feature: MA Experiment 20000527 PARAMETER Experiment Name: At_10percent_PEG_P Parameter: Tissue Value: Whole Plant
  misc_feature: MA Experiment 20000527 PARAMETER Experiment Name: At_10percent_PEG_P Parameter: Treatment Value: 10percent PEG vs. No Treatment
  misc_feature: MA Experiment ID: 20001248 Result: Down-regulated in Transcription
  misc_feature: MA Experiment 20001248 PARAMETER Experiment Name: At_Far-red-induction_P Parameter: Age (day) Value: 7
  misc_feature: MA Experiment 20001248 PARAMETER Experiment Name: At_Far-red-induction_P Parameter: Light Value: Far-red vs. White
  misc_feature: MA Experiment 20001248 PARAMETER Experiment Name: At_Far-red-induction_P Parameter: Organism Value: A. thaliana
  misc_feature: MA Experiment 20001248 PARAMETER Experiment Name: At_Far-red-induction_P Parameter: Plant Line Value: Columbia
  misc_feature: MA Experiment 20001248 PARAMETER Experiment Name: At_Far-red-induction_P Parameter: Timepoint (hr) Value: 4
  misc_feature: MA Experiment 20001248 PARAMETER Experiment Name: At_Far-red-induction_P Parameter: Tissue Value: Whole Plant
  misc_feature: MA Experiment ID: 20001555 Result: Up-regulated in Transcription
  misc_feature: MA Experiment 20001555 PARAMETER Experiment Name: At_Drought_Soil_Dry_P Parameter: Age (day) Value: 24
  misc_feature: MA Experiment 20001555 PARAMETER Experiment Name: At_Drought_Soil_Dry_P Parameter: Organism Value: A. thaliana
  misc_feature: MA Experiment 20001555 PARAMETER Experiment Name: At_Drought_Soil_Dry_P Parameter: Plant Line Value: WS
  misc_feature: MA Experiment 20001555 PARAMETER Experiment Name: At_Drought_Soil_Dry_P Parameter: Post Timepoint (hr) Value: None
  misc_feature: MA Experiment 20001555 PARAMETER Experiment Name: At_Drought_Soil_Dry_P Parameter: Post-Treatment Value: None
  misc_feature: MA Experiment 20001555 PARAMETER Experiment Name: At_Drought_Soil_Dry_P Parameter: Timepoint (day) Value: 10
  misc_feature: MA Experiment 20001555 PARAMETER Experiment Name: At_Drought_Soil_Dry_P Parameter: Treatment Value: Drought vs. No Drought
  misc_feature: MA Experiment ID: 20001559 Result: Up-regulated in Transcription
  misc_feature: MA Experiment 20001559 PARAMETER Experiment Name: At_Drought_Soil_Dry_P Parameter: Age (day) Value: 28
  misc_feature: MA Experiment 20001559 PARAMETER Experiment Name: At_Drought_Soil_Dry_P Parameter: Organism Value: A. thaliana
  misc_feature: MA Experiment 20001559 PARAMETER Experiment Name: At_Drought_Soil_Dry_P Parameter: Plant Line Value: WS
  misc_feature: MA Experiment 20001559 PARAMETER Experiment Name: At_Drought_Soil_Dry_P Parameter: Post Timepoint (hr) Value: 29
  misc_feature: MA Experiment 20001559 PARAMETER Experiment Name: At_Drought_Soil_Dry_P Parameter: Post-Treatment Value: Re-Water vs. No Drought
  misc_feature: MA Experiment 20001559 PARAMETER Experiment Name: At_Drought_Soil_Dry_P Parameter: Timepoint (day) Value: 14
  misc_feature: MA Experiment 20001559 PARAMETER Experiment Name: At_Drought_Soil_Dry_P Parameter: Treatment Value: Drought vs. No Drought
  misc_feature: MA Experiment ID: 20001560 Result: Down-regulated in Transcription
  misc_feature: MA Experiment 20001560 PARAMETER Experiment Name: At_Drought_Soil_Dry_P Parameter: Age (day) Value: 28
  misc_feature: MA Experiment 20001560 PARAMETER Experiment Name: At_Drought_Soil_Dry_P Parameter: Organism Value: A. thaliana
  misc_feature: MA Experiment 20001560 PARAMETER Experiment Name: At_Drought_Soil_Dry_P Parameter: Plant Line Value: WS
  misc_feature: MA Experiment 20001560 PARAMETER Experiment Name: At_Drought_Soil_Dry_P Parameter: Post Timepoint (hr) Value: None
  misc_feature: MA Experiment 20001560 PARAMETER Experiment Name: At_Drought_Soil_Dry_P Parameter: Post-Treatment Value: None
  misc_feature: MA Experiment 20001560 PARAMETER Experiment Name: At_Drought_Soil_Dry_P Parameter: Timepoint (day) Value: 14
  misc_feature: MA Experiment 20001560 PARAMETER Experiment Name: At_Drought_Soil_Dry_P Parameter: Treatment Value: Drought vs. No Drought
  misc_feature: MA Experiment ID: 20001905 Result: Up-regulated in Transcription
  misc_feature: MA Experiment 20001905 PARAMETER Experiment Name: At_Drought_Reproduction_P Parameter: Age (day) Value: 40
  misc_feature: MA Experiment 20001905 PARAMETER Experiment Name: At_Drought_Reproduction_P Parameter: Organism Value: A. thaliana
  misc_feature: MA Experiment 20001905 PARAMETER Experiment Name: At_Drought_Reproduction_P Parameter: Plant Line Value: WS
  misc_feature: MA Experiment 20001905 PARAMETER Experiment Name: At_Drought_Reproduction_P Parameter: Timepoint (day) Value: 10
  misc_feature: MA Experiment 20001905 PARAMETER Experiment Name: At_Drought_Reproduction_P Parameter: Tissue Value: Rosettes
  misc_feature: MA Experiment 20001905 PARAMETER Experiment Name: At_Drought_Reproduction_P Parameter: Treatment Value: Drought vs. No Drought
  misc_feature: MA Experiment ID: 20001906 Result: Up-regulated in Transcription
  misc_feature: MA Experiment 20001906 PARAMETER Experiment Name: At_Drought_Reproduction_P Parameter: Age (day) Value: 35
  misc_feature: MA Experiment 20001906 PARAMETER Experiment Name: At_Drought_Reproduction_P Parameter: Organism Value: A. thaliana
  misc_feature: MA Experiment 20001906 PARAMETER Experiment Name: At_Drought_Reproduction_P Parameter: Plant Line Value: WS
  misc_feature: MA Experiment 20001906 PARAMETER Experiment Name: At_Drought_Reproduction_P Parameter: Timepoint (day) Value: 5
  misc_feature: MA Experiment 20001906 PARAMETER Experiment Name: At_Drought_Reproduction_P Parameter: Tissue Value: Siliques
  misc_feature: MA Experiment 20001906 PARAMETER Experiment Name: At_Drought_Reproduction_P Parameter: Treatment Value: Drought vs. No Drought
  misc_feature: MA Experiment ID: 20001911 Result: Up-regulated in Transcription
  misc_feature: MA Experiment 20001911 PARAMETER Experiment Name: At_Drought_Reproduction_P Parameter: Age (day) Value: 40
  misc_feature: MA Experiment 20001911 PARAMETER Experiment Name: At_Drought_Reproduction_P Parameter: Organism Value: A. thaliana
  misc_feature: MA Experiment 20001911 PARAMETER Experiment Name: At_Drought_Reproduction_P Parameter: Plant Line Value: WS
  misc_feature: MA Experiment 20001911 PARAMETER Experiment Name: At_Drought_Reproduction_P Parameter: Timepoint (day) Value: 10
  misc_feature: MA Experiment 20001911 PARAMETER Experiment Name: At_Drought_Reproduction_P Parameter: Tissue Value: Flowers
  misc_feature: MA Experiment 20001911 PARAMETER Experiment Name: At_Drought_Reproduction_P Parameter: Treatment Value: Drought vs. No Drought
actctctttcttcttcattcatcattctcacttaagtttcccagaaaataaaagagctatgaagtttggtaagagtctcagcaatcagatcgagcaaactcttcctgaatggcaagacaagttcttgtcttacaaagaactcaaaaaacgactcaaactcatcggttccaaaaccgccgatcgtcccgttaaacgactccgtttagatgagttttccgtcggaatatcgaaagaagagatcaatttcatccaattgttagaagacgagttggagaaattcaacaatttcttcgttgagaaggaagaagaatatatcatcagactaaaggaatttagagatagaattgcgaaagctaaggattcaatggagaagatgataaaaatcaggaaggagattgttgatttccatggagaaatggttcttcttgagaattacagtgctcttaattacactggattggttaagatactgaagaagtatgacaaaagaactggtgatctcatgcgtttacctttcatccagaaagttcttcagcaacctttttacactactgacttattgttcaagcttgtcaaggaatctgaggcaatgcttgatcagatcttccctgctaacgaaactgagtctgagattatccaagcagagttatcagagcataagttcatggagagtcttcatatgaagagcacaatcgctgccttgcgggttttgaaggagatcaggagtggaagttctactgttagtgtgttttcattgccgcctctacagttaaatggcttagatgagacatggaagaagattccattgttggagcaagaagccaaatagagagtgagacagaggcacactcgctctattccacttttttatacaatagaagaagctaacagattaaacaagacattatcatcaatgtacacaaaaaggcagaagaaactataggatcatgtttctggatatcatctttggtcggtcataagtccttaggttacacaaaactgcaatgtaactttgtttctgtgttgggtgtgttgtagttgatgtaatatataccacttcagattaattattgatttcttcttttcc

SEQ ID NO: 22207 - protein, 275 aa, Arabidopsis thaliana
  peptide (1)..(275): Ceres Seq. ID no. 12327342
  misc_feature (20)..(177): Pfam Name: SPX domain Pfam Description: SPX domain
  misc_feature (20)..(60): Homolog of NCBI NO: 18417630 NR Description: ids-4 protein - like
  misc_feature (81)..(220): Homolog of NCBI NO: 18417630 NR Description: ids-4 protein - like
  misc_feature (10)..(60): Homolog of NCBI NO: 11358467 NR Description: ids-4 protein-like - Arabidopsis thaliana
  misc_feature (81)..(220): Homolog of NCBI NO: 11358467 NR Description: ids-4 protein-like - Arabidopsis thaliana
  misc_feature (20)..(269): Homolog of NCBI NO: 15225414 NR Description: hypothetical protein; protein id: At2g45130.1
  misc_feature (20)..(255): Homolog of NCBI NO: 37533962 NR Description: hypothetical protein [Oryza sativa (japonica
  misc_feature (20)..(255): Homolog of NCBI NO: 31415907 NR Description: putative SPX domain containing protein
  misc_feature (20)..(240): Homolog of NCBI NO: 15225770 NR Description: unknown protein; protein id: At2g26660.1
  misc_feature (20)..(275): Homolog of NCBI NO: 21592813 NR Description: ids4-like protein [Arabidopsis thaliana]
  misc_feature (20)..(275): Homolog of NCBI NO: 15241275 NR Description: ids4-like protein
LSFFFIHHSHLSFPENKRAMKFGKSLSNQIEQTLPEWQDKFLSYKELKKRLKLIGSKTADRPVKRLRLDEFSVGISKEEINFIQLLEDELEKFNNFFVEKEEEYIIRLKEFRDRIAKAKDSMEKMIKIRKEIVDFHGEMVLLENYSALNYTGLVKILKKYDKRTGDLMRLPFIQKVLQQPFYTTDLLFKLVKESEAMLDQIFPANETESEIIQAELSEHKFMESLHMKSTIAALRVLKEIRSGSSTVSVFSLPPLQLNGLDETWKKIPLLEQEAK

SEQ ID NO: 22208 - protein, 256 aa, Arabidopsis thaliana
  peptide (1)..(256): Ceres Seq. ID no. 12327343
  misc_feature (1)..(158): Pfam Name: SPX domain Pfam Description: SPX domain
  misc_feature (1)..(256): Homolog of NCBI NO: 21592813 NR Description: ids4-like protein [Arabidopsis thaliana]
  misc_feature (1)..(41): Homolog of NCBI NO: 18417630 NR Description: ids-4 protein - like
  misc_feature (1)..(41): Homolog of NCBI NO: 11358467 NR Description: ids-4 protein-like - Arabidopsis thaliana
  misc_feature (1)..(250): Homolog of NCBI NO: 15225414 NR Description: hypothetical protein; protein id: At2g45130.1
  misc_feature (1)..(236): Homolog of NCBI NO: 31415907 NR Description: putative SPX domain containing protein
  misc_feature (1)..(221): Homolog of NCBI NO: 15225770 NR Description: unknown protein; protein id: At2g26660.1
  misc_feature (1)..(236): Homolog of NCBI NO: 37533962 NR Description: hypothetical protein [Oryza sativa (japonica
  misc_feature (62)..(201): Homolog of NCBI NO: 11358467 NR Description: ids-4 protein-like - Arabidopsis thaliana
  misc_feature (62)..(201): Homolog of NCBI NO: 18417630 NR Description: ids-4 protein - like
  misc_feature (1)..(256): Homolog of NCBI NO: 15241275 NR Description: ids4-like protein
MKFGKSLSNQIEQTLPEWQDKFLSYKELKKRLKLIGSKTADRPVKRLRLDEFSVGISKEEINFIQLLEDELEKFNNFFVEKEEEYIIRLKEFRDRIAKAKDSMEKMIKIRKEIVDFHGEMVLLENYSALNYTGLVKILKKYDKRTGDLMRLPFIQKVLQQPFYTTDLLFKLVKESEAMLDQIFPANETESEIIQAELSEHKFMESLHMKSTIAALRVLKEIRSGSSTVSVFSLPPLQLNGLDETWKKIPLLEQEAK

SEQ ID NO: 22209 - protein, 154 aa, Arabidopsis thaliana
  peptide (1)..(154): Ceres Seq. ID no. 12327344
  misc_feature (1)..(56): Pfam Name: SPX domain Pfam Description: SPX domain
  misc_feature (1)..(131): Homolog of NCBI NO: 34897330 NR Description: putative signal transduction protein [Oryza
  misc_feature (1)..(119): Homolog of NCBI NO: 16506648 NR Description: IDS-4-like protein [Castanea sativa]
  misc_feature (1)..(99): Homolog of NCBI NO: 18417630 NR Description: ids-4 protein - like
  misc_feature (1)..(99): Homolog of NCBI NO: 11358467 NR Description: ids-4 protein-like - Arabidopsis thaliana
  misc_feature (1)..(148): Homolog of NCBI NO: 15225414 NR Description: hypothetical protein; protein id: At2g45130.1
  misc_feature (1)..(134): Homolog of NCBI NO: 37533962 NR Description: hypothetical protein [Oryza sativa (japonica
  misc_feature (1)..(134): Homolog of NCBI NO: 31415907 NR Description: putative SPX domain containing protein
  misc_feature (1)..(119): Homolog of NCBI NO: 15225770 NR Description: unknown protein; protein id: At2g26660.1
  misc_feature (1)..(154): Homolog of NCBI NO: 21592813 NR Description: ids4-like protein [Arabidopsis thaliana]
  misc_feature (1)..(154): Homolog of NCBI NO: 15241275 NR Description: ids4-like protein
MEKMIKIRKEIVDFHGEMVLLENYSALNYTGLVKILKKYDKRTGDLMRLPFIQKVLQQPFYTTDLLFKLVKESEAMLDQIFPANETESEIIQAELSEHKFMESLHMKSTIAALRVLKEIRSGSSTVSVFSLPPLQLNGLDETWKKIPLLEQEAK

SEQ ID NO: 22210 - DNA, 1468 bp, Arabidopsis thaliana
  misc_feature (1)..(1468): Ceres Seq. ID no. 13499872
  misc_feature: MA Experiment ID: 108462 Result: Down-regulated in Transcription
  misc_feature: MA Experiment 108462 PARAMETER Experiment Name: At_Germinating_Seeds_cDNA_P Parameter: Age (day) Value: 2 vs. 0
  misc_feature: MA Experiment 108462 PARAMETER Experiment Name: At_Germinating_Seeds_cDNA_P Parameter: Tissue Value: Germinating Seeds
  misc_feature: MA Experiment ID: 108464 Result: Down-regulated in Transcription
  misc_feature: MA Experiment 108464 PARAMETER Experiment Name: At_Germinating_Seeds_cDNA_P Parameter: Age (day) Value: 4 vs. 0
  misc_feature: MA Experiment 108464 PARAMETER Experiment Name: At_Germinating_Seeds_cDNA_P Parameter: Tissue Value: Germinating Seeds
atacgcaaacaaagtctcttcctttacccgtctacacgttcgaattttttctccgggtcgggtcaatgtcaagaacgacgagaattgtatataatcgtcgattcacgtggccgggtttatcatttactgctggatctcgttttcaattttgagtcagattccccccaattgagagattctagggttttaagatgattgaacatgggaactctacctttgattaccggagtattagagaagtcgctgcaaacgccggcgccggagccaccgcaggggctatcgcggcgacttttgtttgtccattagatgtgatcaaaacaaggttacaggttcttggtctccctgaagctccagcctctggtcaaagaggtggtgtaatcattacaagtctgaagaatataattaaggaagaaggttataggggaatgtatcgagggctttcaccaaccatcatagctctccttccaaattgggctgtctacttctcagtttatgggaagctaaaggatgtgctgcagtcaagtgatggcaagcttagtattgggtcaaacatgatagctgcagctggtgctggagctgccacatctattgcaactaatccgctttgggttgtcaagacaagattaatgacgcaaggaattaggcctggtgtggtaccttacaaaagtgtaatgtctgcatttagtaggatttgtcatgaagaaggagtgcgagggttgtacagtggcatattgccttctttggcgggagtaagccatgtcgcgatccagtttccagcttatgaaaaaattaagcaatacatggcaaagatggataatacatccgtggagaatctgagtcctgggaatgttgctattgcctcctccatcgcgaaagtgatcgcctctattttgacttacccacacgaggtaattagggcgaagcttcaagaacaagggcagattagaaatgctgagactaagtattcaggagtcattgattgcatcacaaaggtgttcagaagcgaagggattcctgggttgtaccgtggatgtgccactaatctactgaggacaactccatcagcagttattacatttacaacctatgagatgatgcttaggtttttccgacaagttgtgccaccagagactaataggtcggatgatcgcagaagagaagaagaaagaaagaatttagttagccgacgaggagaagaagaagataaagatttgggtttgagagaatcacaaactcaatctaataagatcagcactccccatatccctcttggaagcaaataaaactttttcagactcaagccatgcttcataggttttctttttttcgatgccatgttccaactacgtaatttttccccatgcggtgattgagttgtaaccttttctcgtggttctaacaaatgtgtaaactatcaataaactactttttggcccttttgatgatcagtgagtatttgaagatcgtg

SEQ ID NO: 22211 - protein, 363 aa, Arabidopsis thaliana
  peptide (1)..(363): Ceres Seq. ID no. 13499873
  misc_feature (23)..(291): Homolog of NCBI NO: 24652037 NR Description: CG8026-PA [Drosophila melanogaster]
  misc_feature (23)..(300): Homolog of NCBI NO: 6322185 NR Description: Hypothetical ORF; Yil006wp [Saccharomyces
  misc_feature (23)..(305): Homolog of NCBI NO: 6320831 NR Description: Hypothetical ORF; Yel006wp [Saccharomyces
  misc_feature (50)..(313): Homolog of NCBI NO: 7487567 NR Description: probable mitochondrial carrier protein
  misc_feature (27)..(311): Homolog of NCBI NO: 34914648 NR Description: OSJNBa0054L14.23 [Oryza sativa (japonica
  misc_feature (15)..(313): Homolog of NCBI NO: 18407372 NR Description: mitochondrial carrier protein family [Arabidopsis
  misc_feature (1)..(96): Homolog of NCBI NO: 25403521 NR Description: probable mitochondrial carrier protein
  misc_feature (112)..(363): Homolog of NCBI NO: 25403521 NR Description: probable mitochondrial carrier protein
  misc_feature (1)..(363): Homolog of NCBI NO: 11067279 NR Description: unknown protein [Arabidopsis thaliana]
  misc_feature (1)..(363): Homolog of NCBI NO: 18395659 NR Description: mitochondrial carrier protein family [Arabidopsis
MIEHGNSTFDYRSIREVAANAGAGATAGAIAATFVCPLDVIKTRLQVLGLPEAPASGQRGGVIITSLKNIIKEEGYRGMYRGLSPTIIALLPNWAVYFSVYGKLKDVLQSSDGKLSIGSNMIAAAGAGAATSIATNPLWVVKTRLMTQGIRPGVVPYKSVMSAFSRICHEEGVRGLYSGILPSLAGVSHVAIQFPAYEKIKQYMAKMDNTSVENLSPGNVAIASSIAKVIASILTYPHEVIRAKLQEQGQIRNAETKYSGVIDCITKVFRSEGIPGLYRGCATNLLRTTPSAVITFTTYEMMLRFFRQVVPPETNRSDDRRREEERKNLVSRRGEEEDKDLGLRESQTQSNKISTPHIPLGSK

SEQ ID NO: 22212 - protein, 285 aa, Arabidopsis thaliana
  peptide (1)..(285): Ceres Seq. ID no. 13499874
  misc_feature (1)..(213): Homolog of NCBI NO: 24652037 NR Description: CG8026-PA [Drosophila melanogaster]
  misc_feature (1)..(222): Homolog of NCBI NO: 6322185 NR Description: Hypothetical ORF; Yil006wp [Saccharomyces
  misc_feature (1)..(227): Homolog of NCBI NO: 6320831 NR Description: Hypothetical ORF; Yel006wp [Saccharomyces
  misc_feature (1)..(235): Homolog of NCBI NO: 7487567 NR Description: probable mitochondrial carrier protein
  misc_feature (1)..(233): Homolog of NCBI NO: 34914648 NR Description: OSJNBa0054L14.23 [Oryza sativa (japonica
  misc_feature (1)..(235): Homolog of NCBI NO: 18407372 NR Description: mitochondrial carrier protein family [Arabidopsis
  misc_feature (1)..(18): Homolog of NCBI NO: 25403521 NR Description: probable mitochondrial carrier protein
  misc_feature (34)..(285): Homolog of NCBI NO: 25403521 NR Description: probable mitochondrial carrier protein
  misc_feature (1)..(285): Homolog of NCBI NO: 11067279 NR Description: unknown protein [Arabidopsis thaliana]
  misc_feature (1)..(285): Homolog of NCBI NO: 18395659 NR Description: mitochondrial carrier protein family [Arabidopsis
MYRGLSPTIIALLPNWAVYFSVYGKLKDVLQSSDGKLSIGSNMIAAAGAGAATSIATNPLWVVKTRLMTQGIRPGVVPYKSVMSAFSRICHEEGVRGLYSGILPSLAGVSHVAIQFPAYEKIKQYMAKMDNTSVENLSPGNVAIASSIAKVIASILTYPHEVIRAKLQEQGQIRNAETKYSGVIDCITKVFRSEGIPGLYRGCATNLLRTTPSAVITFTTYEMMLRFFRQVVPPETNRSDDRRREEERKNLVSRRGEEEDKDLGLRESQTQSNKISTPHIPLGSK

SEQ ID NO: 22213 - protein, 243 aa, Arabidopsis thaliana
  peptide (1)..(243): Ceres Seq. ID no. 13499875
  misc_feature (1)..(128): Homolog of NCBI NO: 40741114 NR Description: hypothetical protein AN4387.2 [Aspergillus
  misc_feature (1)..(171): Homolog of NCBI NO: 24652037 NR Description: CG8026-PA [Drosophila melanogaster]
  misc_feature (1)..(180): Homolog of NCBI NO: 6322185 NR Description: Hypothetical ORF; Yil006wp [Saccharomyces
  misc_feature (1)..(185): Homolog of NCBI NO: 6320831 NR Description: Hypothetical ORF; Yel006wp [Saccharomyces
  misc_feature (1)..(193): Homolog of NCBI NO: 7487567 NR Description: probable mitochondrial carrier protein
  misc_feature (1)..(191): Homolog of NCBI NO: 34914648 NR Description: OSJNBa0054L14.23 [Oryza sativa (japonica
  misc_feature (1)..(193): Homolog of NCBI NO: 18407372 NR Description: mitochondrial carrier protein family [Arabidopsis
  misc_feature (1)..(243): Homolog of NCBI NO: 25403521 NR Description: probable mitochondrial carrier protein
  misc_feature (1)..(243): Homolog of NCBI NO: 11067279 NR Description: unknown protein [Arabidopsis thaliana]
  misc_feature (1)..(243): Homolog of NCBI NO: 18395659 NR Description: mitochondrial carrier protein family [Arabidopsis
MIAAAGAGAATSIATNPLWVVKTRLMTQGIRPGVVPYKSVMSAFSRICHEEGVRGLYSGILPSLAGVSHVAIQFPAYEKIKQYMAKMDNTSVENLSPGNVAIASSIAKVIASILTYPHEVIRAKLQEQGQIRNAETKYSGVIDCITKVFRSEGIPGLYRGCATNLLRTTPSAVITFTTYEMMLRFFRQVVPPETNRSDDRRREEERKNLVSRRGEEEDKDLGLRESQTQSNKISTPHIPLGSK

SEQ ID NO: 22214 - DNA, 1430 bp, Arabidopsis thaliana
  misc_feature (1)..(1430): Ceres Seq. ID no. 13487695
  misc_feature: MA Experiment ID: 108434 Result: Down-regulated in Transcription
  misc_feature: MA Experiment 108434 PARAMETER Experiment Name: At_Root_Tips_cDNA_P Parameter: Tissue Value: Root Tips
  misc_feature: MA Experiment ID: 108461 Result: Up-regulated in Transcription
  misc_feature: MA Experiment 108461 PARAMETER Experiment Name: At_Germinating_Seeds_cDNA_P Parameter: Age (day) Value: 1 vs. 0
  misc_feature: MA Experiment 108461 PARAMETER Experiment Name: At_Germinating_Seeds_cDNA_P Parameter: Tissue Value: Germinating Seeds
  misc_feature: MA Experiment ID: 108462 Result: Up-regulated in Transcription
  misc_feature: MA Experiment 108462 PARAMETER Experiment Name: At_Germinating_Seeds_cDNA_P Parameter: Age (day) Value: 2 vs. 0
  misc_feature: MA Experiment 108462 PARAMETER Experiment Name: At_Germinating_Seeds_cDNA_P Parameter: Tissue Value: Germinating Seeds
  misc_feature: MA Experiment ID: 108464 Result: Up-regulated in Transcription
  misc_feature: MA Experiment 108464 PARAMETER Experiment Name: At_Germinating_Seeds_cDNA_P Parameter: Age (day) Value: 4 vs. 0
  misc_feature: MA Experiment 108464 PARAMETER Experiment Name: At_Germinating_Seeds_cDNA_P Parameter: Tissue Value: Germinating Seeds
  misc_feature: MA Experiment ID: 108577 Result: Up-regulated in Transcription
  misc_feature: MA Experiment 108577 PARAMETER Experiment Name: At_42deg_Heat_cDNA_P Parameter: Temperature (deg C) Value: 42 vs. 22
  misc_feature: MA Experiment 108577 PARAMETER Experiment Name: At_42deg_Heat_cDNA_P Parameter: Timepoint (hr) Value: 6
  misc_feature: MA Experiment 108577 PARAMETER Experiment Name: At_42deg_Heat_cDNA_P Parameter: Tissue Value: Aerial
  misc_feature: MA Experiment ID: 108595 Result: Down-regulated in Transcription
  misc_feature: MA Experiment 108595 PARAMETER Experiment Name: At_Ler-pi_Ovule_cDNA_P Parameter: Plant Line Value: null
  misc_feature: MA Experiment ID: 20000072 Result: Down-regulated in Transcription
  misc_feature: MA Experiment 20000072 PARAMETER Experiment Name: At_100uM_ABA_Mutants_cDNA_P Parameter: Plant Line Value: CS8105
  misc_feature: MA Experiment 20000072 PARAMETER Experiment Name: At_100uM_ABA_Mutants_cDNA_P Parameter: Timepoint (hr) Value: 6
  misc_feature: MA Experiment 20000072 PARAMETER Experiment Name: At_100uM_ABA_Mutants_cDNA_P Parameter: Tissue Value: Aerial
  misc_feature: MA Experiment 20000072 PARAMETER Experiment Name: At_100uM_ABA_Mutants_cDNA_P Parameter: Treatment Value: 100uM ABA vs. No Treatment
  misc_feature: MA Experiment ID: 20000087 Result: Down-regulated in Transcription
  misc_feature: MA Experiment 20000087 PARAMETER Experiment Name: At_100uM_ABA_Mutants_cDNA_P Parameter: Plant Line Value: WS
  misc_feature: MA Experiment 20000087 PARAMETER Experiment Name: At_100uM_ABA_Mutants_cDNA_P Parameter: Timepoint (hr) Value: 6
  misc_feature: MA Experiment 20000087 PARAMETER Experiment Name: At_100uM_ABA_Mutants_cDNA_P Parameter: Tissue Value: Aerial
  misc_feature: MA Experiment 20000087 PARAMETER Experiment Name: At_100uM_ABA_Mutants_cDNA_P Parameter: Treatment Value: 100uM ABA vs. No Treatment
  misc_feature: MA Experiment ID: 20000306 Result: Up-regulated in Transcription
  misc_feature: MA Experiment 20000306 PARAMETER Experiment Name: At_Germinating_Seeds_Sub_P Parameter: Age (hr) Value: 6 vs. 0
  misc_feature: MA Experiment 20000306 PARAMETER Experiment Name: At_Germinating_Seeds_Sub_P Parameter: Organism Value: A. thaliana
  misc_feature: MA Experiment 20000306 PARAMETER Experiment Name: At_Germinating_Seeds_Sub_P Parameter: Plant Line Value: WS
  misc_feature: MA Experiment 20000306 PARAMETER Experiment Name: At_Germinating_Seeds_Sub_P Parameter: Tissue Value: Germinating Seeds
  misc_feature: MA Experiment ID: 20000307 Result: Up-regulated in Transcription
  misc_feature: MA Experiment 20000307 PARAMETER Experiment Name: At_Germinating_Seeds_Sub_P Parameter: Age (hr) Value: 24 vs. 0
  misc_feature: MA Experiment 20000307 PARAMETER Experiment Name: At_Germinating_Seeds_Sub_P Parameter: Organism Value: A. thaliana
  misc_feature: MA Experiment 20000307 PARAMETER Experiment Name: At_Germinating_Seeds_Sub_P Parameter: Plant Line Value: WS
  misc_feature: MA Experiment 20000307 PARAMETER Experiment Name: At_Germinating_Seeds_Sub_P Parameter: Tissue Value: Germinating Seeds
  misc_feature: MA Experiment ID: 20000440 Result: Down-regulated in Transcription
  misc_feature: MA Experiment 20000440 PARAMETER Experiment Name: At_Closed-Flower__Sub_P Parameter: Tissue Value: Closed Flower vs. Whole Plant
tggatgcaatgtatttgtctcgttttctcatccatttatatgattgctttcttctccacctcaccaatcactcctcctctaaacttttcttcactctcttgtctcttcaaacttcggttactccgttttagtcgacaacaatggcctctgtttcaaggaggttactgaggagagagacgatcccctgtttcagccacaccgtgaggaaactcttctccaccgttggatctccttcttttgctcagagactcagagatctccccaaagacttcccctctaccaacgccaaacgtgacgcctctctgcttattgggaaaacgcctcttgtgttcctcaacaaagtcactgaaggttgtgaagcgtatgttgcagccaaacaagaacatttccagccaacttgtagcattaaagacagaccagctatagccatgattgcagatgcagagaagaaaaaactaatcatccctggaaaaacaacactgatagagcctacttcaggaaacatgggaatcagtttggctttcatggctgctatgaaagggtacaggattataatgacgatgccttcgtacactagcttggagaggagagtgacgatgagatcctttggtgctgagcttgttctcactgatccagccaaaggaatgggtggaactgttaagaaagcttatgacctccttgatagtactcctgatgctttcatgtgtcaacagtttgctaatcctgcaaacactcagattcattttgatacaactggtcctgagatttgggaagatacacttggaaatgttgatatatttgtgatgggaattggcagtggaggcacagtctctggtgttggccgataccttaaatctaaaaaccccaatgtcaagatatatggagtggagcctgctgaaagcaacatactcaacggtggcaaaccaggtccacatgctatcacaggcaatggtgttggattcaaaccagaaatcttggatatggatgttatggagagtgttcttgaggttagtagtgaggatgctataaagatggctagagaattggcattgaaagaaggtctcatggttgggatatcgtcgggagctaacaccgtggcagcaattagactggcgaaaatgccagagaataaaggcaaactcattgtgacaattcatgcgagcttcggagaaagatatctgtcgtctgttctgtttgatgagctgaggaaagaagcagaggagatgaagccagtttcagtggattgatgaaggaagactgacactttaccaaaaatctcgggagcaaaagattataaaaagaaagatgtaagagtaataagtttgtgtttatattgttctattgttgatgtataatataatcacagtattgttgatgttgatcttggatattgaagatccaactaaataaagttcatcattttctgtttc

SEQ ID NO: 22215 - protein, 368 aa, Arabidopsis thaliana
  peptide (1)..(368): Ceres Seq. ID no. 13487696
  misc_feature (53)..(342): Pfam Name: Pyridoxal-phosphate dependent enzyme Pfam Description: Pyridoxal-phosphate dependent enzyme
  misc_feature (41)..(364): Homolog of NCBI NO: 421795 NR Description: cysteine synthase (EC 4.2.99.8) B precursor,
  misc_feature (41)..(364): Homolog of NCBI NO: 12644209 NR Description: CYSTEINE SYNTHASE, CHLOROPLAST PRECURSOR SULFHYDRYLASE) (O-ACETYLSERINE (THIOL)-LYASE) (CSASE B) (CS-B)
  misc_feature (41)..(364): Homolog of NCBI NO: 303902 NR Description: cysteine synthase [Spinacia oleracea]
  misc_feature (25)..(368): Homolog of NCBI NO: 38346461 NR Description: OSJNBa0019G23.9 [Oryza sativa (japonica
  misc_feature (25)..(368): Homolog of NCBI NO: 10241630 NR Description: cysteine synthase [Oryza sativa (indica
  misc_feature (1)..(368): Homolog of NCBI NO: 1071913 NR Description: cysteine synthase (EC 4.2.99.8) C precursor,
  misc_feature (45)..(368): Homolog of NCBI NO: 11995005 NR Description: beta-cyanoalanine synthase like protein [Solanum
  misc_feature (22)..(368): Homolog of NCBI NO: 11559260 NR Description: beta-cyanoalanine synthase [Solanum tuberosum]
  misc_feature (31)..(368): Homolog of NCBI NO: 30840956 NR Description: beta-cyanoalanine synthase [Betula pendula]
  misc_feature (1)..(368): Homolog of NCBI NO: 15233111 NR Description: cysteine synthase (O-acetylserine
MASVSRRLLRRETIPCFSHTVRKLFSTVGSPSFAQRLRDLPKDFPSTNAKRDASLLIGKTPLVFLNKVTEGCEAYVAAKQEHFQPTCSIKDRPAIAMIADAEKKKLIIPGKTTLIEPTSGNMGISLAFMAAMKGYRIIMTMPSYTSLERRVTMRSFGAELVLTDPAKGMGGTVKKAYDLLDSTPDAFMCQQFANPANTQIHFDTTGPEIWEDTLGNVDIFVMGIGSGGTVSGVGRYLKSKNPNVKIYGVEPAESNILNGGKPGPHAITGNGVGFKPEILDMDVMESVLEVSSEDAIKMARELALKEGLMVGISSGANTVAAIRLAKMPENKGKLIVTIHASFGERYLSSVLFDELRKEAEEMKPVSVD

SEQ ID NO: 22216 - protein, 272 aa, Arabidopsis thaliana
  peptide (1)..(272): Ceres Seq. ID no. 13487697
  misc_feature (1)..(246): Pfam Name: Pyridoxal-phosphate dependent enzyme Pfam Description: Pyridoxal-phosphate dependent enzyme
  misc_feature (1)..(268): Homolog of NCBI NO: 421795 NR Description: cysteine synthase (EC 4.2.99.8) B precursor,
  misc_feature (1)..(268): Homolog of NCBI NO: 12644209 NR Description: CYSTEINE SYNTHASE, CHLOROPLAST PRECURSOR SULFHYDRYLASE) (O-ACETYLSERINE (THIOL)-LYASE) (CSASE B) (CS-B)
  misc_feature (1)..(268): Homolog of NCBI NO: 303902 NR Description: cysteine synthase [Spinacia oleracea]
  misc_feature (1)..(272): Homolog of NCBI NO: 38346461 NR Description: OSJNBa0019G23.9 [Oryza sativa (japonica
  misc_feature (1)..(272): Homolog of NCBI NO: 10241630 NR Description: cysteine synthase [Oryza sativa (indica
  misc_feature (1)..(272): Homolog of NCBI NO: 1071913 NR Description: cysteine synthase (EC 4.2.99.8) C precursor,
  misc_feature (1)..(272): Homolog of NCBI NO: 11995005 NR Description: beta-cyanoalanine synthase like protein [Solanum
  misc_feature (1)..(272): Homolog of NCBI NO: 11559260 NR Description: beta-cyanoalanine synthase [Solanum tuberosum]
  misc_feature (1)..(272): Homolog of NCBI NO: 30840956 NR Description: beta-cyanoalanine synthase [Betula pendula]
  misc_feature (1)..(272): Homolog of NCBI NO: 15233111 NR Description: cysteine synthase (O-acetylserine
MIADAEKKKLIIPGKTTLIEPTSGNMGISLAFMAAMKGYRIIMTMPSYTSLERRVTMRSFGAELVLTDPAKGMGGTVKKAYDLLDSTPDAFMCQQFANPANTQIHFDTTGPEIWEDTLGNVDIFVMGIGSGGTVSGVGRYLKSKNPNVKIYGVEPAESNILNGGKPGPHAITGNGVGFKPEILDMDVMESVLEVSSEDAIKMARELALKEGLMVGISSGANTVAAIRLAKMPENKGKLIVTIHASFGERYLSSVLFDELRKEAEEMKPVSVD

SEQ ID NO: 22217 - protein, 247 aa, Arabidopsis thaliana
  peptide (1)..(247): Ceres Seq. ID no. 13487698
  misc_feature (1)..(221): Pfam Name: Pyridoxal-phosphate dependent enzyme Pfam Description: Pyridoxal-phosphate dependent enzyme
  misc_feature (1)..(243): Homolog of NCBI NO: 421795 NR Description: cysteine synthase (EC 4.2.99.8) B precursor,
  misc_feature (1)..(243): Homolog of NCBI NO: 12644209 NR Description: CYSTEINE SYNTHASE, CHLOROPLAST PRECURSOR SULFHYDRYLASE) (O-ACETYLSERINE (THIOL)-LYASE) (CSASE B) (CS-B)
  misc_feature (1)..(243): Homolog of NCBI NO: 303902 NR Description: cysteine synthase [Spinacia oleracea]
  misc_feature (1)..(247): Homolog of NCBI NO: 38346461 NR Description: OSJNBa0019G23.9 [Oryza sativa (japonica
  misc_feature (1)..(247): Homolog of NCBI NO: 10241630 NR Description: cysteine synthase [Oryza sativa (indica
  misc_feature (1)..(247): Homolog of NCBI NO: 1071913 NR Description: cysteine synthase (EC 4.2.99.8) C precursor,
  misc_feature (1)..(247): Homolog of NCBI NO: 11995005 NR Description: beta-cyanoalanine synthase like protein [Solanum
  misc_feature (1)..(247): Homolog of NCBI NO: 11559260 NR Description: beta-cyanoalanine synthase [Solanum tuberosum]
  misc_feature (1)..(247): Homolog of NCBI NO: 30840956 NR Description: beta-cyanoalanine synthase [Betula pendula]
  misc_feature (1)..(247): Homolog of NCBI NO: 15233111 NR Description: cysteine synthase (O-acetylserine
MGISLAFMAAMKGYRIIMTMPSYTSLERRVTMRSFGAELVLTDPAKGMGGTVKKAYDLLDSTPDAFMCQQFANPANTQIHFDTTGPEIWEDTLGNVDIFVMGIGSGGTVSGVGRYLKSKNPNVKIYGVEPAESNILNGGKPGPHAITGNGVGFKPEILDMDVMESVLEVSSEDAIKMARELALKEGLMVGISSGANTVAAIRLAKMPENKGKLIVTIHASFGERYLSSVLFDELRKEAEEMKPVSVD

SEQ ID NO: 22218 - DNA, 1443 bp, Arabidopsis thaliana
  misc_feature (1)..(1443): Ceres Seq. ID no. 12371389
  misc_feature: MA Experiment ID: 108434 Result: Down-regulated in Transcription
  misc_feature: MA Experiment 108434 PARAMETER Experiment Name: At_Root_Tips_cDNA_P Parameter: Tissue Value: Root Tips
  misc_feature: MA Experiment ID: 108461 Result: Up-regulated in Transcription
  misc_feature: MA Experiment 108461 PARAMETER Experiment Name: At_Germinating_Seeds_cDNA_P Parameter: Age (day) Value: 1 vs. 0
  misc_feature: MA Experiment 108461 PARAMETER Experiment Name: At_Germinating_Seeds_cDNA_P Parameter: Tissue Value: Germinating Seeds
  misc_feature: MA Experiment ID: 108462 Result: Up-regulated in Transcription
  misc_feature: MA Experiment 108462 PARAMETER Experiment Name: At_Germinating_Seeds_cDNA_P Parameter: Age (day) Value: 2 vs. 0
  misc_feature: MA Experiment 108462 PARAMETER Experiment Name: At_Germinating_Seeds_cDNA_P Parameter: Tissue Value: Germinating Seeds
  misc_feature: MA Experiment ID: 108463 Result: Up-regulated in Transcription
  misc_feature: MA Experiment 108463 PARAMETER Experiment Name: At_Germinating_Seeds_cDNA_P Parameter: Age (day) Value: 3 vs. 0
  misc_feature: MA Experiment 108463 PARAMETER Experiment Name: At_Germinating_Seeds_cDNA_P Parameter: Tissue Value: Germinating Seeds
  misc_feature: MA Experiment ID: 108464 Result: Up-regulated in Transcription
  misc_feature: MA Experiment 108464 PARAMETER Experiment Name: At_Germinating_Seeds_cDNA_P Parameter: Age (day) Value: 4 vs. 0
  misc_feature: MA Experiment 108464 PARAMETER Experiment Name: At_Germinating_Seeds_cDNA_P Parameter: Tissue Value: Germinating Seeds
  misc_feature: MA Experiment ID: 108488 Result: Down-regulated in Transcription
  misc_feature: MA Experiment ID: 108585 Result: Up-regulated in Transcription
  misc_feature: MA Experiment 108585 PARAMETER Experiment Name: At_5mM_NaNP_cDNA_P Parameter: Timepoint (hr) Value: 6
  misc_feature: MA Experiment 108585 PARAMETER Experiment Name: At_5mM_NaNP_cDNA_P Parameter: Tissue Value: Aerial
  misc_feature: MA Experiment 108585 PARAMETER Experiment Name: At_5mM_NaNP_cDNA_P Parameter: Treatment Value: null
  misc_feature: MA Experiment ID: 108594 Result: Down-regulated in Transcription
  misc_feature: MA Experiment 108594 PARAMETER Experiment Name: At_Ler-rhl_Root_cDNA_P Parameter: Plant Line Value: null
  misc_feature: MA Experiment ID: 108595 Result: Up-regulated in Transcription
  misc_feature: MA Experiment 108595 PARAMETER Experiment Name: At_Ler-pi_Ovule_cDNA_P Parameter: Plant Line Value: null
  misc_feature: MA Experiment ID: 108668 Result: Up-regulated in Transcription
  misc_feature: MA Experiment 108668 PARAMETER Experiment Name: At_2mM_SA_cDNA_P Parameter: Plant Line Value: WS
  misc_feature: MA Experiment 108668 PARAMETER Experiment Name: At_2mM_SA_cDNA_P Parameter: Timepoint (hr) Value: 6
  misc_feature: MA Experiment 108668 PARAMETER Experiment Name: At_2mM_SA_cDNA_P Parameter: Treatment Value: 2mM SA vs. No Treatment
  misc_feature: MA Experiment ID: 20000182 Result: Up-regulated in Transcription
  misc_feature: MA Experiment 20000182 PARAMETER Experiment Name: At_2mM_SA_P Parameter: Age (day) Value: 14
  misc_feature: MA Experiment 20000182 PARAMETER Experiment Name: At_2mM_SA_P Parameter: Organism Value: A. thaliana
  misc_feature: MA Experiment 20000182 PARAMETER Experiment Name: At_2mM_SA_P Parameter: Plant Line Value: WS
  misc_feature: MA Experiment 20000182 PARAMETER Experiment Name: At_2mM_SA_P Parameter: Timepoint (hr) Value: 6
  misc_feature: MA Experiment 20000182 PARAMETER Experiment Name: At_2mM_SA_P Parameter: Tissue Value: Aerial
  misc_feature: MA Experiment 20000182 PARAMETER Experiment Name: At_2mM_SA_P Parameter: Treatment Value: 2mM SA vs. No Treatment
  misc_feature: MA Experiment ID: 20000227 Result: Down-regulated in Transcription
  misc_feature: MA Experiment 20000227 PARAMETER Experiment Name: At_Root-Tips-vs-Tops_P Parameter: Tissue Value: Root Tips vs. Root Tops
  misc_feature: MA Experiment ID: 20000264 Result: Up-regulated in Transcription
  misc_feature: MA Experiment 20000264 PARAMETER Experiment Name: At_Open_Flower_P Parameter: Age (day) Value: 21
  misc_feature: MA Experiment 20000264 PARAMETER Experiment Name: At_Open_Flower_P Parameter: Plant Line Value: WS
  misc_feature: MA Experiment 20000264 PARAMETER Experiment Name: At_Open_Flower_P Parameter: Tissue Value: Open Flower vs. Whole Plant
  misc_feature: MA Experiment ID: 20000437 Result: Up-regulated in Transcription
  misc_feature: MA Experiment 20000437 PARAMETER Experiment Name: At_Drought_P Parameter: Age (day) Value: 8
  misc_feature: MA Experiment 20000437 PARAMETER Experiment Name: At_Drought_P Parameter: Organism Value: A. thaliana
  misc_feature: MA Experiment 20000437 PARAMETER Experiment Name: At_Drought_P Parameter: Plant Line Value: WS
  misc_feature: MA Experiment 20000437 PARAMETER Experiment Name: At_Drought_P Parameter: Timepoint (hr) Value: 24
  misc_feature: MA Experiment 20000437 PARAMETER Experiment Name: At_Drought_P Parameter: Tissue Value: Whole Plant
  misc_feature: MA Experiment 20000437 PARAMETER Experiment Name: At_Drought_P Parameter: Treatment Value: Drought vs. No Drought
  misc_feature: MA Experiment ID: 20000438 Result: Down-regulated in Transcription
  misc_feature: MA Experiment 20000438 PARAMETER Experiment Name: At_Shoots__P Parameter: Age (day) Value: 14
  misc_feature: MA Experiment 20000438 PARAMETER Experiment Name: At_Shoots__P Parameter: Tissue Value: Shoots vs. Whole Plant
  misc_feature: MA Experiment ID: 20000495 Result: Up-regulated in Transcription
  misc_feature: MA Experiment 20000495 PARAMETER Experiment Name: At_Guard_Cells_P Parameter: Harvest Date Value: 8/2/2002
  misc_feature: MA Experiment 20000495 PARAMETER Experiment Name: At_Guard_Cells_P Parameter: Organism Value: A. thaliana
  misc_feature: MA Experiment 20000495 PARAMETER Experiment Name: At_Guard_Cells_P Parameter: Tissue Value: Guard Cells vs. Leaves
  misc_feature: MA Experiment ID: 20000527 Result: Down-regulated in Transcription
  misc_feature: MA Experiment 20000527 PARAMETER Experiment Name: At_10percent_PEG_P Parameter: Age (day) Value: 20
  misc_feature: MA Experiment 20000527 PARAMETER Experiment Name: At_10percent_PEG_P Parameter: Organism Value: A. thaliana
  misc_feature: MA Experiment 20000527 PARAMETER Experiment Name: At_10percent_PEG_P Parameter: Plant Line Value: WS
  misc_feature: MA Experiment 20000527 PARAMETER Experiment Name: At_10percent_PEG_P Parameter: Timepoint (day) Value: 20
  misc_feature: MA Experiment 20000527 PARAMETER Experiment Name: At_10percent_PEG_P Parameter: Tissue Value: Whole Plant
  misc_feature: MA Experiment 20000527 PARAMETER Experiment Name: At_10percent_PEG_P Parameter: Treatment Value: 10percent PEG vs. No Treatment
  misc_feature: MA Experiment ID: 20000794 Result: Up-regulated in Transcription
  misc_feature: MA Experiment 20000794 PARAMETER Experiment Name: At_Petals_P Parameter: Age (day) Value: 23-25 days
  misc_feature: MA Experiment 20000794 PARAMETER Experiment Name: At_Petals_P Parameter: Plant Line Value: WS
  misc_feature: MA Experiment 20000794 PARAMETER Experiment Name: At_Petals_P Parameter: Tissue Value: Petals vs. Whole plant
  misc_feature: MA Experiment ID: 20001757 Result: Down-regulated in Transcription
  misc_feature: MA Experiment 20001757 PARAMETER Experiment Name: At_50mM_NH4NO3_L-to-H_P Parameter: Timepoint (hr) Value: 6
  misc_feature: MA Experiment 20001757 PARAMETER Experiment Name: At_50mM_NH4NO3_L-to-H_P Parameter: Tissue Value: Leaf
  misc_feature: MA Experiment 20001757 PARAMETER Experiment Name: At_50mM_NH4NO3_L-to-H_P Parameter: Treatment Value: 50mM NH4NO3 vs 100mM Mannitol
  misc_feature: MA Experiment ID: 20001905 Result: Up-regulated in Transcription
  misc_feature: MA Experiment 20001905 PARAMETER Experiment Name: At_Drought_Reproduction_P Parameter: Age (day) Value: 40
  misc_feature: MA Experiment 20001905 PARAMETER Experiment Name: At_Drought_Reproduction_P Parameter: Organism Value: A. thaliana
  misc_feature: MA Experiment 20001905 PARAMETER Experiment Name: At_Drought_Reproduction_P Parameter: Plant Line Value: WS
  misc_feature: MA Experiment 20001905 PARAMETER Experiment Name: At_Drought_Reproduction_P Parameter: Timepoint (day) Value: 10
  misc_feature: MA Experiment 20001905 PARAMETER Experiment Name: At_Drought_Reproduction_P Parameter: Tissue Value: Rosettes
  misc_feature: MA Experiment 20001905 PARAMETER Experiment Name: At_Drought_Reproduction_P Parameter: Treatment Value: Drought vs. No Drought
gtcctaggaagagcacaagcctccacaagtggtgttgcctctctgttcctaactcctttctcttatataaaattgtgtatcctccatacatacaacaaagagagaaacttttgatatggggttaaagatgtcagaatcagccaagccttactttgcaatggtttgtcttcaattcggatacgccggcatgaacctcgtgacgaaggttgtgctagaccgcggcatgagccattacgtccttgtggcttaccgtaatgcctttgccacggctgctatcgcaccttttgctctactctccgagaggaaagtgaggccgaagatgacatttccaatattcatgcagatttttgttctagctcttctcgggcctttgatcgatcaaaacttatattacgcctgtctcaaacttacttcaccaacttttgccgggcgcagtcacaaatatcgttccagctttgacctttatcatttccataatttgcaggatggagaaggtggagatgagaaaagtaagattccaagcaaaagtggtggggacattagtgatagtggttggagccatgttgatgattttattcaaaattcctctaatcacctttctccgatctcacctcaccggccatgctttgtcgccggcaggtgaggactacctcaaagccaccgtcttcctcctcatcgcctcattttcttgggcttcctttttcgttcttcaggcggctacgttgaagagatactcatctcacctttcattatcgacgatggtgtgtttcatgggcacgttacagtccacagccttaacgtttgtgatggagccaaacctttctgcatggaacattggctttgacatgaaccttcttgcctctgcttatgcgggcataatgtcgtcgagcatagcgtactacgttcaaggaatgatgacgaagcaaaagagtgttatctttgttactgcttttaatcctcttgttgtcataatcggatccatcattggcttcctcatcctcaaccaaactttaaaccttggcggggttcttggaatggcaattttagtggtgggagtttgcacggttctttggggaaaggaaggagatatcgatgaagaagagaacattgaggagaagtttgtagaaattgtcaagtgttgcaaccgctgcgatatcaaggttctctcgatgatgccaagaatcgatgaggaagtagacgttgaaatgcaatccgcaggaacagctaaagtggcggtgggtttctcgtaacctctcgtgtgtggaaaaagatgttcacgaccttaattagatcttttcaagtcttttttttttaacaaaattttagatagaggagcaactttttctttgttctatatcattgctccaactttttattttctttgtaggttttgttttataatcttcattagaagggtaattattattattaaataaatgttcc

SEQ ID NO: 22219 - protein, 254 aa, Arabidopsis thaliana
  peptide (1)..(254): Ceres Seq. ID no. 12371390
  misc_feature (67)..(196): Pfam Name: Integral membrane protein DUF6 Pfam Description: Integral membrane protein DUF6
  misc_feature (1)..(199): Homolog of NCBI NO: 15240683 NR Description: MtN21 nodulin protein-like; protein id:
  misc_feature (1)..(206): Homolog of NCBI NO: 34908998 NR Description: nodulin-like protein [Oryza sativa (japonica
  misc_feature (1)..(248): Homolog of NCBI NO: 7487973 NR Description: probable integral membrane protein nodulin
  misc_feature (1)..(207): Homolog of NCBI NO: 6552743 NR Description: T26F17.11 [Arabidopsis thaliana]
  misc_feature (1)..(207): Homolog of NCBI NO: 15219123 NR Description: nodulin-like protein
  misc_feature (1)..(198): Homolog of NCBI NO: 2598575 NR Description: MtN21 [Medicago truncatula]
  misc_feature (1)..(207): Homolog of NCBI NO: 17529004 NR Description: putative nodulin protein [Arabidopsis thaliana]
  misc_feature (1)..(248): Homolog of NCBI NO: 30688451 NR Description: nodulin MtN21 family protein [Arabidopsis
  misc_feature (1)..(254): Homolog of NCBI NO: 21592817 NR Description: nodulin-like protein [Arabidopsis thaliana]
  misc_feature (1)..(254): Homolog of NCBI NO: 15228980 NR Description: nodulin-like protein
MEKVEMRKVRFQAKVVGTLVIVVGAMLMILFKIPLITFLRSHLTGHALSPAGEDYLKATVFLLIASFSWASFFVLQAATLKRYSSHLSLSTMVCFMGTLQSTALTFVMEPNLSAWNIGFDMNLLASAYAGIMSSSIAYYVQGMMTKQKSVIFVTAFNPLVVIIGSIIGFLILNQTLNLGGVLGMAILVVGVCTVLWGKEGDIDEEENIEEKFVEIVKCCNRCDIKVLSMMPRIDEEVDVEMQSAGTAKVAVGFS

SEQ ID NO: 22220 - protein, 249 aa, Arabidopsis thaliana
  peptide (1)..(249): Ceres Seq. ID no. 12371391
  misc_feature (62)..(191): Pfam Name: Integral membrane protein DUF6 Pfam Description: Integral membrane protein DUF6
  misc_feature (1)..(202): Homolog of NCBI NO: 6552743 NR Description: T26F17.11 [Arabidopsis thaliana]
  misc_feature (1)..(202): Homolog of NCBI NO: 17529004 NR Description: putative nodulin protein [Arabidopsis thaliana]
  misc_feature (1)..(202): Homolog of NCBI NO: 15219123 NR Description: nodulin-like protein
  misc_feature (1)..(193): Homolog of NCBI NO: 2598575 NR Description: MtN21 [Medicago truncatula]
  misc_feature (1)..(194): Homolog of NCBI NO: 15240683 NR Description: MtN21 nodulin protein-like; protein id:
  misc_feature (1)..(201): Homolog of NCBI NO: 34908998 NR Description: nodulin-like protein [Oryza sativa (japonica
  misc_feature (1)..(243): Homolog of NCBI NO: 7487973 NR Description: probable integral membrane protein nodulin
  misc_feature (1)..(243): Homolog of NCBI NO: 30688451 NR Description: nodulin MtN21 family protein [Arabidopsis
  misc_feature (1)..(249): Homolog of NCBI NO: 21592817 NR Description: nodulin-like protein [Arabidopsis thaliana]
  misc_feature (1)..(249): Homolog of NCBI NO: 15228980 NR Description: nodulin-like protein
MRKVRFQAKVVGTLVIVVGAMLMILFKIPLITFLRSHLTGHALSPAGEDYLKATVFLLIASFSWASFFVLQAATLKRYSSHLSLSTMVCFMGTLQSTALTFVMEPNLSAWNIGFDMNLLASAYAGIMSSSIAYYVQGMMTKQKSVIFVTAFNPLVVIIGSIIGFLILNQTLNLGGVLGMAILVVGVCTVLWGKEGDIDEEENIEEKFVEIVKCCNRCDIKVLSMMPRIDEEVDVEMQSAGTAKVAVGFS

SEQ ID NO: 22221 - protein, 229 aa, Arabidopsis thaliana
  peptide (1)..(229): Ceres Seq. ID no. 12371392
  misc_feature (42)..(171): Pfam Name: Integral membrane protein DUF6 Pfam Description: Integral membrane protein DUF6
  misc_feature (1)..(182): Homolog of NCBI NO: 6552743 NR Description: T26F17.11 [Arabidopsis thaliana]
  misc_feature (1)..(182): Homolog of NCBI NO: 17529004 NR Description: putative nodulin protein [Arabidopsis thaliana]
  misc_feature (1)..(182): Homolog of NCBI NO: 15219123 NR Description: nodulin-like protein
  misc_feature (1)..(173): Homolog of NCBI NO: 2598575 NR Description: MtN21 [Medicago truncatula]
  misc_feature (1)..(174): Homolog of NCBI NO: 15240683 NR Description: MtN21 nodulin protein-like; protein id:
  misc_feature (1)..(181): Homolog of NCBI NO: 34908998 NR Description: nodulin-like protein [Oryza sativa (japonica
  misc_feature (1)..(223): Homolog of NCBI NO: 7487973 NR Description: probable integral membrane protein nodulin
  misc_feature (1)..(223): Homolog of NCBI NO: 30688451 NR Description: nodulin MtN21 family protein [Arabidopsis
  misc_feature (1)..(229): Homolog of NCBI NO: 21592817 NR Description: nodulin-like protein [Arabidopsis thaliana]
  misc_feature (1)..(229): Homolog of NCBI NO: 15228980 NR Description: nodulin-like protein
MLMILFKIPLITFLRSHLTGHALSPAGEDYLKATVFLLIASFSWASFFVLQAATLKRYSSHLSLSTMVCFMGTLQSTALTFVMEPNLSAWNIGFDMNLLASAYAGIMSSSIAYYVQGMMTKQKSVIFVTAFNPLVVIIGSIIGFLILNQTLNLGGVLGMAILVVGVCTVLWGKEGDIDEEENIEEKFVEIVKCCNRCDIKVLSMMPRIDEEVDVEMQSAGTAKVAVGFS

SEQ ID NO: 22222 - DNA, 1134 bp, Arabidopsis thaliana
  misc_feature (1)..(1134): Ceres Seq. ID no. 13488094
  misc_feature: MA Experiment ID: 108595 Result: Up-regulated in Transcription
  misc_feature: MA Experiment 108595 PARAMETER Experiment Name: At_Ler-pi_Ovule_cDNA_P Parameter: Plant Line Value: null
  misc_feature: MA Experiment ID: 20000171 Result: Down-regulated in Transcription
  misc_feature: MA Experiment 20000171 PARAMETER Experiment Name: At_42deg_Heat_P Parameter: Age (day) Value: 14
  misc_feature: MA Experiment 20000171 PARAMETER Experiment Name: At_42deg_Heat_P Parameter: Organism Value: A. thaliana
  misc_feature: MA Experiment 20000171 PARAMETER Experiment Name: At_42deg_Heat_P Parameter: Plant Line Value: WS
  misc_feature: MA Experiment 20000171 PARAMETER Experiment Name: At_42deg_Heat_P Parameter: Temperature (deg C) Value: 42 vs. 22
  misc_feature: MA Experiment 20000171 PARAMETER Experiment Name: At_42deg_Heat_P Parameter: Timepoint (hr) Value: 1
  misc_feature: MA Experiment 20000171 PARAMETER Experiment Name: At_42deg_Heat_P Parameter: Tissue Value: Aerial
  misc_feature: MA Experiment ID: 20000173 Result: Down-regulated in Transcription
  misc_feature: MA Experiment 20000173 PARAMETER Experiment Name: At_42deg_Heat_P Parameter: Age (day) Value: 14
  misc_feature: MA Experiment 20000173 PARAMETER Experiment Name: At_42deg_Heat_P Parameter: Organism Value: A. thaliana
  misc_feature: MA Experiment 20000173 PARAMETER Experiment Name: At_42deg_Heat_P Parameter: Plant Line Value: WS
  misc_feature: MA Experiment 20000173 PARAMETER Experiment Name: At_42deg_Heat_P Parameter: Temperature (deg C) Value: 42 vs. 22
  misc_feature: MA Experiment 20000173 PARAMETER Experiment Name: At_42deg_Heat_P Parameter: Timepoint (hr) Value: 6
  misc_feature: MA Experiment 20000173 PARAMETER Experiment Name: At_42deg_Heat_P Parameter: Tissue Value: Aerial
  misc_feature: MA Experiment ID: 20000180 Result: Up-regulated in Transcription
  misc_feature: MA Experiment 20000180 PARAMETER Experiment Name: At_Germinating_Seeds_P Parameter: Age (hr) Value: 24 vs. 0
  misc_feature: MA Experiment 20000180 PARAMETER Experiment Name: At_Germinating_Seeds_P Parameter: Tissue Value: Germinating Seeds
  misc_feature: MA Experiment ID: 20000182 Result: Up-regulated in Transcription
  misc_feature: MA Experiment 20000182 PARAMETER Experiment Name: At_2mM_SA_P Parameter: Age (day) Value: 14
  misc_feature: MA Experiment 20000182 PARAMETER Experiment Name: At_2mM_SA_P Parameter: Organism Value: A. thaliana
  misc_feature: MA Experiment 20000182 PARAMETER Experiment Name: At_2mM_SA_P Parameter: Plant Line Value: WS
  misc_feature: MA Experiment 20000182 PARAMETER Experiment Name: At_2mM_SA_P Parameter: Timepoint (hr) Value: 6
  misc_feature: MA Experiment 20000182 PARAMETER Experiment Name: At_2mM_SA_P Parameter: Tissue Value: Aerial
  misc_feature: MA Experiment 20000182 PARAMETER Experiment Name: At_2mM_SA_P Parameter: Treatment Value: 2mM SA vs. No Treatment
  misc_feature: MA Experiment ID: 20000439 Result: Up-regulated in Transcription
  misc_feature: MA Experiment 20000439 PARAMETER Experiment Name: At_Roots__P Parameter: Age (day) Value: 14 vs. 21
  misc_feature: MA Experiment 20000439 PARAMETER Experiment Name: At_Roots__P Parameter: Organism Value: A. thaliana
  misc_feature: MA Experiment 20000439 PARAMETER Experiment Name: At_Roots__P Parameter: Tissue Value: Roots vs. Whole Plant
  misc_feature: MA Experiment ID: 20000527 Result: Down-regulated in Transcription
  misc_feature: MA Experiment 20000527 PARAMETER Experiment Name: At_10percent_PEG_P Parameter: Age (day) Value: 20
  misc_feature: MA Experiment 20000527 PARAMETER Experiment Name: At_10percent_PEG_P Parameter: Organism Value: A. thaliana
  misc_feature: MA Experiment 20000527 PARAMETER Experiment Name: At_10percent_PEG_P Parameter: Plant Line Value: WS
  misc_feature: MA Experiment 20000527 PARAMETER Experiment Name: At_10percent_PEG_P Parameter: Timepoint (day) Value: 20
  misc_feature: MA Experiment 20000527 PARAMETER Experiment Name: At_10percent_PEG_P Parameter: Tissue Value: Whole Plant
  misc_feature: MA Experiment 20000527 PARAMETER Experiment Name: At_10percent_PEG_P Parameter: Treatment Value: 10percent PEG vs. No Treatment
  misc_feature: MA Experiment ID: 20000794 Result: Down-regulated in Transcription
  misc_feature: MA Experiment 20000794 PARAMETER Experiment Name: At_Petals_P Parameter: Age (day) Value: 23-25 days
  misc_feature: MA Experiment 20000794 PARAMETER Experiment Name: At_Petals_P Parameter: Plant Line Value: WS
  misc_feature: MA Experiment 20000794 PARAMETER Experiment Name: At_Petals_P Parameter: Tissue Value: Petals vs. Whole plant
  misc_feature: MA Experiment ID: 20001247 Result: Up-regulated in Transcription
  misc_feature: MA Experiment 20001247 PARAMETER Experiment Name: At_Far-red-induction_P Parameter: Age (day) Value: 7
  misc_feature: MA Experiment 20001247 PARAMETER Experiment Name: At_Far-red-induction_P Parameter: Light Value: Far-red vs. White
  misc_feature: MA Experiment 20001247 PARAMETER Experiment Name: At_Far-red-induction_P Parameter: Organism Value: A. thaliana
  misc_feature: MA Experiment 20001247 PARAMETER Experiment Name: At_Far-red-induction_P Parameter: Plant Line Value: Columbia
  misc_feature: MA Experiment 20001247 PARAMETER Experiment Name: At_Far-red-induction_P Parameter: Timepoint (hr) Value: 1
  misc_feature: MA Experiment 20001247 PARAMETER Experiment Name: At_Far-red-induction_P Parameter: Tissue Value: Whole Plant
  misc_feature: MA Experiment ID: 20001557 Result: Down-regulated in Transcription
  misc_feature: MA Experiment 20001557 PARAMETER Experiment Name: At_Drought_Soil_Dry_P Parameter: Age (day) Value: 27
  misc_feature: MA Experiment 20001557 PARAMETER Experiment Name: At_Drought_Soil_Dry_P Parameter: Organism Value: A. thaliana
  misc_feature: MA Experiment 20001557 PARAMETER Experiment Name: At_Drought_Soil_Dry_P Parameter: Plant Line Value: WS
  misc_feature: MA Experiment 20001557 PARAMETER Experiment Name: At_Drought_Soil_Dry_P Parameter: Post Timepoint (hr) Value: 3
  misc_feature: MA Experiment 20001557 PARAMETER Experiment Name: At_Drought_Soil_Dry_P Parameter: Post-Treatment Value: Re-Water vs. No Drought
  misc_feature: MA Experiment 20001557 PARAMETER Experiment Name: At_Drought_Soil_Dry_P Parameter: Timepoint (day) Value: 13
  misc_feature: MA Experiment 20001557 PARAMETER Experiment Name: At_Drought_Soil_Dry_P Parameter: Treatment Value: Drought vs. No Drought
  misc_feature: MA Experiment ID: 20001905 Result: Down-regulated in Transcription
  misc_feature: MA Experiment 20001905 PARAMETER Experiment Name: At_Drought_Reproduction_P Parameter: Age (day) Value: 40
  misc_feature: MA Experiment 20001905 PARAMETER Experiment Name: At_Drought_Reproduction_P Parameter: Organism Value: A. thaliana
  misc_feature: MA Experiment 20001905 PARAMETER Experiment Name: At_Drought_Reproduction_P Parameter: Plant Line Value: WS
  misc_feature: MA Experiment 20001905 PARAMETER Experiment Name: At_Drought_Reproduction_P Parameter: Timepoint (day) Value: 10
  misc_feature: MA Experiment 20001905 PARAMETER Experiment Name: At_Drought_Reproduction_P Parameter: Tissue Value: Rosettes
  misc_feature: MA Experiment 20001905 PARAMETER Experiment Name: At_Drought_Reproduction_P Parameter: Treatment Value: Drought vs. No Drought
  misc_feature: MA Experiment ID: 20001911 Result: Down-regulated in Transcription
  misc_feature: MA Experiment 20001911 PARAMETER Experiment Name: At_Drought_Reproduction_P Parameter: Age (day) Value: 40
  misc_feature: MA Experiment 20001911 PARAMETER Experiment Name: At_Drought_Reproduction_P Parameter: Organism Value: A. thaliana
  misc_feature: MA Experiment 20001911 PARAMETER Experiment Name: At_Drought_Reproduction_P Parameter: Plant Line Value: WS
  misc_feature: MA Experiment 20001911 PARAMETER Experiment Name: At_Drought_Reproduction_P Parameter: Timepoint (day) Value: 10
  misc_feature: MA Experiment 20001911 PARAMETER Experiment Name: At_Drought_Reproduction_P Parameter: Tissue Value: Flowers
  misc_feature: MA Experiment 20001911 PARAMETER Experiment Name: At_Drought_Reproduction_P Parameter: Treatment Value: Drought vs. No Drought
acaccttctctgcaaaaacaaaagatttccacttttcttaaaaatggcgtccatgaaacacgttcatcttttccgtcgttatctctcaatcgttttcactctctttcaacgcttaatttcatgtttcttcgattttccgatactgatcaaaatcgcagattcgttcttatctctgtatttcttagttttctgcgatctccgacccgtaaccgtcgatctagacgacggagaaaccacagtccatttctggatctccggccaccgtagaatctctcggcagaatctcgtcatgctccatggatacggaggaaactccaaatggcaattcgttcatcaagtctcggatctctcgaaatcgtttaatctcttcatccccgatttggtcttcttcggaaaatcgtattcgaagaatagagatcggagcgttgagattcaggcgaggagcgtcgtcggaggattgaagaaactgggatgcgttgaaggaggaggaggaatatcgatttattcgattagttacggtggatttgtggcgtataaaatggcggagatttggccggcgatggttgagaaattggtgattgtgagtagtggagtgggatttacacagcagcagaagacggcagaattgaaaaaacacggcggagattgttcgaagattttagttccgaaaactccgatggatctacggttgctgattaagatatctatgaatactggtttaacgttcgtcgattgggttccagactttttcctttcccaattcatcgctgtaatgtatgagaaaaatcggcaggagcttcttgagctagctaagaatttgttggaacgagaggaggaaccagaattgcctgtaatatcccagaaaacgttaatcgtttggggagacaaggacaaggtgtttcccttggagcatgcttatcggctgcaaaggcatttacagagttcaagattagagataataaaggaaacaggacacgctgttaacattgaagcaccaactactcttaataattttattacttcgtttgtcttaagtgcttgatttctatttttgtatatacttcttcttcatataaatatctatatgcatttgatttaagtgtatatatagttgacatcatttaacatatcatc

SEQ ID NO: 22223 - protein, 346 aa, Arabidopsis thaliana
  peptide (1)..(346): Ceres Seq. ID no. 13488095
  misc_feature (120)..(341): Pfam Name: alpha/beta hydrolase fold Pfam Description: alpha/beta hydrolase fold
  misc_feature (66)..(343): Homolog of NCBI NO: 37533664 NR Description: putative hydrolase [Oryza sativa (japonica
  misc_feature (66)..(346): Homolog of NCBI NO: 15242419 NR Description: hydrolase, alpha/beta fold family [Arabidopsis
  misc_feature (75)..(343): Homolog of NCBI NO: 30689631 NR Description: hydrolase, alpha/beta fold family [Arabidopsis
  misc_feature (68)..(342): Homolog of NCBI NO: 33146617 NR Description: hydrolase-like protein [Oryza sativa (japonica
  misc_feature (255)..(346): Homolog of NCBI NO: 27436747 NR Description: Hypothetical protein [Oryza sativa (japonica
  misc_feature (48)..(255): Homolog of NCBI NO: 27436747 NR Description: Hypothetical protein [Oryza sativa (japonica
  misc_feature (15)..(344): Homolog of NCBI NO: 15218538 NR Description: hydrolase, alpha/beta fold family [Arabidopsis
  misc_feature (18)..(310): Homolog of NCBI NO: 9665130 NR Description: Unknown protein [Arabidopsis thaliana]
  misc_feature (15)..(346): Homolog of NCBI NO: 21592821 NR Description: unknown [Arabidopsis thaliana]
  misc_feature (15)..(346): Homolog of NCBI NO: 18394481 NR Description: hydrolase, alpha/beta fold family [Arabidopsis
HLLCKNKRFPLFLKMASMKHVHLFRRYLSIVFTLFQRLISCFFDFPILIKIADSFLSLYFLVFCDLRPVTVDLDDGETTVHFWISGHRRISRQNLVMLHGYGGNSKWQFVHQVSDLSKSFNLFIPDLVFFGKSYSKNRDRSVEIQARSVVGGLKKLGCVEGGGGISIYSISYGGFVAYKMAEIWPAMVEKLVIVSSGVGFTQQQKTAELKKHGGDCSKILVPKTPMDLRLLIKISMNTGLTFVDWVPDFFLSQFIAVMYEKNRQELLELAKNLLEREEEPELPVISQKTLIVWGDKDKVFPLEHAYRLQRHLQSSRLEIIKETGHAVNIEAPTTLNNFITSFVLSA

SEQ ID NO: 22224 - protein, 332 aa, Arabidopsis thaliana
  peptide (1)..(332): Ceres Seq. ID no. 13488096
  misc_feature (106)..(327): Pfam Name: alpha/beta hydrolase fold Pfam Description: alpha/beta hydrolase fold
  misc_feature (52)..(329): Homolog of NCBI NO: 37533664 NR Description: putative hydrolase [Oryza sativa (japonica
  misc_feature (52)..(332): Homolog of NCBI NO: 15242419 NR Description: hydrolase, alpha/beta fold family [Arabidopsis
  misc_feature (61)..(329): Homolog of NCBI NO: 30689631 NR Description: hydrolase, alpha/beta fold family [Arabidopsis
  misc_feature (54)..(328): Homolog of NCBI NO: 33146617 NR Description: hydrolase-like protein [Oryza sativa (japonica
  misc_feature (241)..(332): Homolog of NCBI NO: 27436747 NR Description: Hypothetical protein [Oryza sativa (japonica
  misc_feature (34)..(241): Homolog of NCBI NO: 27436747 NR Description: Hypothetical protein [Oryza sativa (japonica
  misc_feature (1)..(330): Homolog of NCBI NO: 15218538 NR Description: hydrolase, alpha/beta fold family [Arabidopsis
  misc_feature (4)..(296): Homolog of NCBI NO: 9665130 NR Description: Unknown protein [Arabidopsis thaliana]
  misc_feature (1)..(332): Homolog of NCBI NO: 21592821 NR Description: unknown [Arabidopsis thaliana]
  misc_feature (1)..(332): Homolog of NCBI NO: 18394481 NR Description: hydrolase, alpha/beta fold family [Arabidopsis
MASMKHVHLFRRYLSIVFTLFQRLISCFFDFPILIKIADSFLSLYFLVFCDLRPVTVDLDDGETTVHFWISGHRRISRQNLVMLHGYGGNSKWQFVHQVSDLSKSFNLFIPDLVFFGKSYSKNRDRSVEIQARSVVGGLKKLGCVEGGGGISIYSISYGGFVAYKMAEIWPAMVEKLVIVSSGVGFTQQQKTAELKKHGGDCSKILVPKTPMDLRLLIKISMNTGLTFVDWVPDFFLSQFIAVMYEKNRQELLELAKNLLEREEEPELPVISQKTLIVWGDKDKVFPLEHAYRLQRHLQSSRLEIIKETGHAVNIEAPTTLNNFITSFVLSA

SEQ ID NO: 22225 - protein, 329 aa, Arabidopsis thaliana
  peptide (1)..(329): Ceres Seq. ID no. 13488097
  misc_feature (103)..(324): Pfam Name: alpha/beta hydrolase fold Pfam Description: alpha/beta hydrolase fold
  misc_feature (49)..(326): Homolog of NCBI NO: 37533664 NR Description: putative hydrolase [Oryza sativa (japonica
  misc_feature (49)..(329): Homolog of NCBI NO: 15242419 NR Description: hydrolase, alpha/beta fold family [Arabidopsis
  misc_feature (58)..(326): Homolog of NCBI NO: 30689631 NR Description: hydrolase, alpha/beta fold family [Arabidopsis
  misc_feature (51)..(325): Homolog of NCBI NO: 33146617 NR Description: hydrolase-like protein [Oryza sativa (japonica
  misc_feature (238)..(329): Homolog of NCBI NO: 27436747 NR Description: Hypothetical protein [Oryza sativa (japonica
  misc_feature (31)..(238): Homolog of NCBI NO: 27436747 NR Description: Hypothetical protein [Oryza sativa (japonica
  misc_feature (1)..(327): Homolog of NCBI NO: 15218538 NR Description: hydrolase, alpha/beta fold family [Arabidopsis
  misc_feature (1)..(293): Homolog of NCBI NO: 9665130 NR Description: Unknown protein [Arabidopsis thaliana]
  misc_feature (1)..(329): Homolog of NCBI NO: 21592821 NR Description: unknown [Arabidopsis thaliana]
  misc_feature (1)..(329): Homolog of NCBI NO: 18394481 NR Description: hydrolase, alpha/beta fold family [Arabidopsis
MKHVHLFRRYLSIVFTLFQRLISCFFDFPILIKIADSFLSLYFLVFCDLRPVTVDLDDGETTVHFWISGHRRISRQNLVMLHGYGGNSKWQFVHQVSDLSKSFNLFIPDLVFFGKSYSKNRDRSVEIQARSVVGGLKKLGCVEGGGGISIYSISYGGFVAYKMAEIWPAMVEKLVIVSSGVGFTQQQKTAELKKHGGDCSKILVPKTPMDLRLLIKISMNTGLTFVDWVPDFFLSQFIAVMYEKNRQELLELAKNLLEREEEPELPVISQKTLIVWGDKDKVFPLEHAYRLQRHLQSSRLEIIKETGHAVNIEAPTTLNNFITSFVLSA

SEQ ID NO: 22226 - DNA, 1558 bp, Arabidopsis thaliana
  misc_feature (1)..(1558): Ceres Seq. ID no. 13487458
  misc_feature: MA Experiment ID: 108434 Result: Up-regulated in Transcription
  misc_feature: MA Experiment 108434 PARAMETER Experiment Name: At_Root_Tips_cDNA_P Parameter: Tissue Value: Root Tips
  misc_feature: MA Experiment ID: 108462 Result: Down-regulated in Transcription
  misc_feature: MA Experiment 108462 PARAMETER Experiment Name: At_Germinating_Seeds_cDNA_P Parameter: Age (day) Value: 2 vs. 0
  misc_feature: MA Experiment 108462 PARAMETER Experiment Name: At_Germinating_Seeds_cDNA_P Parameter: Tissue Value: Germinating Seeds
  misc_feature: MA Experiment ID: 108463 Result: Down-regulated in Transcription
  misc_feature: MA Experiment 108463 PARAMETER Experiment Name: At_Germinating_Seeds_cDNA_P Parameter: Age (day) Value: 3 vs. 0
  misc_feature: MA Experiment 108463 PARAMETER Experiment Name: At_Germinating_Seeds_cDNA_P Parameter: Tissue Value: Germinating Seeds
  misc_feature: MA Experiment ID: 108464 Result: Down-regulated in Transcription
  misc_feature: MA Experiment 108464 PARAMETER Experiment Name: At_Germinating_Seeds_cDNA_P Parameter: Age (day) Value: 4 vs. 0
  misc_feature: MA Experiment 108464 PARAMETER Experiment Name: At_Germinating_Seeds_cDNA_P Parameter: Tissue Value: Germinating Seeds
  misc_feature: MA Experiment ID: 108573 Result: Down-regulated in Transcription
  misc_feature: MA Experiment 108573 PARAMETER Experiment Name: At_Drought_cDNA_P Parameter: Timepoint (hr) Value: 6
  misc_feature: MA Experiment 108573 PARAMETER Experiment Name: At_Drought_cDNA_P Parameter: Tissue Value: Aerial
  misc_feature: MA Experiment 108573 PARAMETER Experiment Name: At_Drought_cDNA_P Parameter: Treatment Value: Drought vs. No Drought
  misc_feature: MA Experiment ID: 20000224 Result: Up-regulated in Transcription
  misc_feature: MA Experiment ID: 20001451 Result: Up-regulated in Transcription
  misc_feature: MA Experiment 20001451 PARAMETER Experiment Name: At_Far-red-induction_P Parameter: Age (day) Value: 7
  misc_feature: MA Experiment 20001451 PARAMETER Experiment Name: At_Far-red-induction_P Parameter: Light Value: Far-red vs. White
  misc_feature: MA Experiment 20001451 PARAMETER Experiment Name: At_Far-red-induction_P Parameter: Organism Value: A. thaliana
  misc_feature: MA Experiment 20001451 PARAMETER Experiment Name: At_Far-red-induction_P Parameter: Plant Line Value: Columbia
  misc_feature: MA Experiment 20001451 PARAMETER Experiment Name: At_Far-red-induction_P Parameter: Timepoint (hr) Value: 24
  misc_feature: MA Experiment 20001451 PARAMETER Experiment Name: At_Far-red-induction_P Parameter: Tissue Value: Whole Plant
  misc_feature: MA Experiment ID: 20001557 Result: Up-regulated in Transcription
  misc_feature: MA Experiment 20001557 PARAMETER Experiment Name: At_Drought_Soil_Dry_P Parameter: Age (day) Value: 27
  misc_feature: MA Experiment 20001557 PARAMETER Experiment Name: At_Drought_Soil_Dry_P Parameter: Organism Value: A. thaliana
  misc_feature: MA Experiment 20001557 PARAMETER Experiment Name: At_Drought_Soil_Dry_P Parameter: Plant Line Value: WS
  misc_feature: MA Experiment 20001557 PARAMETER Experiment Name: At_Drought_Soil_Dry_P Parameter: Post Timepoint (hr) Value: 3
  misc_feature: MA Experiment 20001557 PARAMETER Experiment Name: At_Drought_Soil_Dry_P Parameter: Post-Treatment Value: Re-Water vs. No Drought
  misc_feature: MA Experiment 20001557 PARAMETER Experiment Name: At_Drought_Soil_Dry_P Parameter: Timepoint (day) Value: 13
  misc_feature: MA Experiment 20001557 PARAMETER Experiment Name: At_Drought_Soil_Dry_P Parameter: Treatment Value: Drought vs. No Drought
  misc_feature: MA Experiment ID: 20001558 Result: Up-regulated in Transcription
  misc_feature: MA Experiment 20001558 PARAMETER Experiment Name: At_Drought_Soil_Dry_P Parameter: Age (day) Value: 27
  misc_feature: MA Experiment 20001558 PARAMETER Experiment Name: At_Drought_Soil_Dry_P Parameter: Organism Value: A. thaliana
  misc_feature: MA Experiment 20001558 PARAMETER Experiment Name: At_Drought_Soil_Dry_P Parameter: Plant Line Value: WS
  misc_feature: MA Experiment 20001558 PARAMETER Experiment Name: At_Drought_Soil_Dry_P Parameter: Post Timepoint (hr) Value: 6
  misc_feature: MA Experiment 20001558 PARAMETER Experiment Name: At_Drought_Soil_Dry_P Parameter: Post-Treatment Value: Re-Water vs. No Drought
  misc_feature: MA Experiment 20001558 PARAMETER Experiment Name: At_Drought_Soil_Dry_P Parameter: Timepoint (day) Value: 13
  misc_feature: MA Experiment 20001558 PARAMETER Experiment Name: At_Drought_Soil_Dry_P Parameter: Treatment Value: Drought vs. No Drought
ttttagttatttatatatatattctctgtctcgtatttgtccccaaaaatctagggttttaaggtttcttatccttcctcttcctccgccagattcttttcttgcgaagatgagcaacgacaaggacagcatgaacatgtccgatctctccaccgctcttaacgaggaggatcgtgccgggcttgttaatgctcttaagaacaagttgcagaatttggctggacaacactctgatgtccttgaaaacttgactccaccagtcaggaagcgtgtcgagtttctaagagagattcagaaccaatatgatgagatggaagcaaaattctttgaggagagagcagctcttgaagctaagtatcaaaagttatatcagcctttatataccaagcgatatgagattgtgaatggtgtggtcgaagttgaaggtgcagctgaagaagtaaaatccgaacaaggagaagataaatcagctgaagagaaaggagtaccagatttctggcttattgcattgaagaacaatgaaattactgcggaagagataactgagcgagatgaaggggctctcaagtatctcaaagatatcaagtggagtagggttgaagaaccaaaagggttcaagcttgagtttttctttgatcagaatccttacttcaagaacactgtcttgaccaagacatatcacatgattgatgaagatgagcctatccttgagaaggccctcgggacggagattgagtggtatcctggaaagtgtttgacacagaagattctaaaaaagaagccaaagaaaggatccaaaaacacaaagccgatcactaagactgaggactgtgagagtttcttcaactttttcagtccacctcaagttcctgacgatgatgaggatcttgatgatgacatggctgatgaactccaaggacaaatggagcatgattatgatatcggttcaacaatcaaagagaaaatcatctcgcatgctgtgtcatggttcactggtgaagctgttgaggcagatgaccttgatattgaggacgacgatgatgagattgatgaagatgatgatgaagaggacgaggaagatgatgaggatgacgaggaggaggatgatgaggatgatgacgaggaggaagaagcagatcaaggaaagaagagcaaaaagaagtcatcagctgggcacaagaaggctggaagaagtcaacttgcggaaggtcaagcaggtgagaggccaccggaatgtaagcagcagtgaagaagtgaagaatcttggcttagttatgatgaagaagaagagtgaagagtgtctttgagccgaggttgtgtttctttaatttgcagagtcatggtccggtttattatatatcagttttgggtgattggtttgctatttaaaaaaaaaaaaatgggttctttggtttggtttgtgtctcttgatttttccttttgtaatgatcttatgaatttgtttcgagttaatgtcgttctctggtcagatttcgaattcaattctatttatcctccctcgttaatgagagaatttgtgagacaatctagtttactt

SEQ ID NO: 22227 - protein, 415 aa, Arabidopsis thaliana
  peptide (1)..(415): Ceres Seq. ID no. 13487459
  misc_feature (88)..(336): Pfam Name: Nucleosome assembly protein (NAP) Pfam Description: Nucleosome assembly protein (NAP)
  misc_feature (88)..(336): Pfam Name: Nucleosome assembly protein (NAP) Pfam Description: Nucleosome assembly protein (NAP)
  misc_feature (61)..(389): Homolog of NCBI NO: 32414795 NR Description: hypothetical protein [Neurospora crassa]
  misc_feature (37)..(415): Homolog of NCBI NO: 21898560 NR Description: nucleosome/chromatin assembly factor group A [Zea
  misc_feature (37)..(415): Homolog of NCBI NO: 2129840 NR Description: nucleosome assembly protein 1 - soybean
  misc_feature (37)..(415): Homolog of NCBI NO: 29569109 NR Description: nucleosome/chromatin assembly factor group A [Zea
  misc_feature (37)..(415): Homolog of NCBI NO: 7488816 NR Description: nucleosome assembly protein 1 - garden pea
  misc_feature (61)..(389): Homolog of NCBI NO: 32414795 NR Description: hypothetical protein [Neurospora crassa]
  misc_feature (37)..(415): Homolog of NCBI NO: 2129840 NR Description: nucleosome assembly protein 1 - soybean
  misc_feature (37)..(415): Homolog of NCBI NO: 7488816 NR Description: nucleosome assembly protein 1 - garden pea
  misc_feature (37)..(415): Homolog of NCBI NO: 15224782 NR Description: nucleosome assembly protein -related [Arabidopsis
  misc_feature (37)..(415): Homolog of NCBI NO: 18423918 NR Description: nucleosome assembly protein [Arabidopsis
  misc_feature (37)..(415): Homolog of NCBI NO: 8777435 NR Description: nucleosome assembly protein [Arabidopsis thaliana]
  misc_feature (36)..(415): Homolog of NCBI NO: 549975 NR Description: nucleosome assembly protein I-like protein
  misc_feature (37)..(415): Homolog of NCBI NO: 15236115 NR Description: nucleosome assembly protein I-related protein
  misc_feature (37)..(415): Homolog of NCBI NO: 29569109 NR Description: nucleosome/chromatin assembly factor group A [Zea
  misc_feature (37)..(415): Homolog of NCBI NO: 21898560 NR Description: nucleosome/chromatin assembly factor group A [Zea
  misc_feature (37)..(415): Homolog of NCBI NO: 15236115 NR Description: nucleosome assembly protein I-related protein
  misc_feature (36)..(415): Homolog of NCBI NO: 549975 NR Description: nucleosome assembly protein I-like protein
  misc_feature (37)..(415): Homolog of NCBI NO: 8777435 NR Description: nucleosome assembly protein [Arabidopsis thaliana]
  misc_feature (37)..(415): Homolog of NCBI NO: 18423918 NR Description: nucleosome assembly protein [Arabidopsis
  misc_feature (37)..(415): Homolog of NCBI NO: 15224782 NR Description: nucleosome assembly protein -related [Arabidopsis
FSYLYIYSLSRICPQKSRVLRFLILPLPPPDSFLAKMSNDKDSMNMSDLSTALNEEDRAGLVNALKNKLQNLAGQHSDVLENLTPPVRKRVEFLREIQNQYDEMEAKFFEERAALEAKYQKLYQPLYTKRYEIVNGVVEVEGAAEEVKSEQGEDKSAEEKGVPDFWLIALKNNEITAEEITERDEGALKYLKDIKWSRVEEPKGFKLEFFFDQNPYFKNTVLTKTYHMIDEDEPILEKALGTEIEWYPGKCLTQKILKKKPKKGSKNTKPITKTEDCESFFNFFSPPQVPDDDEDLDDDMADELQGQMEHDYDIGSTIKEKIISHAVSWFTGEAVEADDLDIEDDDDEIDEDDDEEDEEDDEDDEEEDDEDDDEEEEADQGKKSKKKSSAGHKKAGRSQLAEGQAGERPPECKQQ

SEQ ID NO: 22228 - protein, 379 aa, Arabidopsis thaliana
  peptide (1)..(379): Ceres Seq. ID no. 13487460
  misc_feature (52)..(300): Pfam Name: Nucleosome assembly protein (NAP) Pfam Description: Nucleosome assembly protein (NAP)
  misc_feature (52)..(300): Pfam Name: Nucleosome assembly protein (NAP) Pfam Description: Nucleosome assembly protein (NAP)
  misc_feature (25)..(353): Homolog of NCBI NO: 32414795 NR Description: hypothetical protein [Neurospora crassa]
  misc_feature (1)..(379): Homolog of NCBI NO: 21898560 NR Description: nucleosome/chromatin assembly factor group A [Zea
  misc_feature (1)..(379): Homolog of NCBI NO: 2129840 NR Description: nucleosome assembly protein 1 - soybean
  misc_feature (1)..(379): Homolog of NCBI NO: 29569109 NR Description: nucleosome/chromatin assembly factor group A [Zea
  misc_feature (1)..(379): Homolog of NCBI NO: 7488816 NR Description: nucleosome assembly protein 1 - garden pea
  misc_feature (25)..(353): Homolog of NCBI NO: 32414795 NR Description: hypothetical protein [Neurospora crassa]
  misc_feature (1)..(379): Homolog of NCBI NO: 2129840 NR Description: nucleosome assembly protein 1 - soybean
  misc_feature (1)..(379): Homolog of NCBI NO: 7488816 NR Description: nucleosome assembly protein 1 - garden pea
  misc_feature (1)..(379): Homolog of NCBI NO: 15224782 NR Description: nucleosome assembly protein -related [Arabidopsis
  misc_feature (1)..(379): Homolog of NCBI NO: 18423918 NR Description: nucleosome assembly protein [Arabidopsis
  misc_feature (1)..(379): Homolog of NCBI NO: 8777435 NR Description: nucleosome assembly protein [Arabidopsis thaliana]
  misc_feature (1)..(379): Homolog of NCBI NO: 549975 NR Description: nucleosome assembly protein I-like protein
  misc_feature (1)..(379): Homolog of NCBI NO: 15236115 NR Description: nucleosome assembly protein I-related protein
  misc_feature (1)..(379): Homolog of NCBI NO: 29569109 NR Description: nucleosome/chromatin assembly factor group A [Zea
  misc_feature (1)..(379): Homolog of NCBI NO: 21898560 NR Description: nucleosome/chromatin assembly factor group A [Zea
  misc_feature (1)..(379): Homolog of NCBI NO: 15236115 NR Description: nucleosome assembly protein I-related protein
  misc_feature (1)..(379): Homolog of NCBI NO: 549975 NR Description: nucleosome assembly protein I-like protein
  misc_feature (1)..(379): Homolog of NCBI NO: 8777435 NR Description: nucleosome assembly protein [Arabidopsis thaliana]
  misc_feature (1)..(379): Homolog of NCBI NO: 18423918 NR Description: nucleosome assembly protein [Arabidopsis
  misc_feature (1)..(379): Homolog of NCBI NO: 15224782 NR Description: nucleosome assembly protein -related [Arabidopsis
MSNDKDSMNMSDLSTALNEEDRAGLVNALKNKLQNLAGQHSDVLENLTPPVRKRVEFLREIQNQYDEMEAKFFEERAALEAKYQKLYQPLYTKRYEIVNGVVEVEGAAEEVKSEQGEDKSAEEKGVPDFWLIALKNNEITAEEITERDEGALKYLKDIKWSRVEEPKGFKLEFFFDQNPYFKNTVLTKTYHMIDEDEPILEKALGTEIEWYPGKCLTQKILKKKPKKGSKNTKPITKTEDCESFFNFFSPPQVPDDDEDLDDDMADELQGQMEHDYDIGSTIKEKIISHAVSWFTGEAVEADDLDIEDDDDEIDEDDDEEDEEDDEDDEEEDDEDDDEEEEADQGKKSKKKSSAGHKKAGRSQLAEGQAGERPPECKQQ

SEQ ID NO: 22229 - protein, 372 aa, Arabidopsis thaliana
  peptide (1)..(372): Ceres Seq. ID no. 13487461
  misc_feature (45)..(293): Pfam Name: Nucleosome assembly protein (NAP) Pfam Description: Nucleosome assembly protein (NAP)
  misc_feature (45)..(293): Pfam Name: Nucleosome assembly protein (NAP) Pfam Description: Nucleosome assembly protein (NAP)
  misc_feature (18)..(346): Homolog of NCBI NO: 32414795 NR Description: hypothetical protein [Neurospora crassa]
  misc_feature (1)..(372): Homolog of NCBI NO: 21898560 NR Description: nucleosome/chromatin assembly factor group A [Zea
  misc_feature (1)..(372): Homolog of NCBI NO: 2129840 NR Description: nucleosome assembly protein 1 - soybean
  misc_feature (1)..(372): Homolog of NCBI NO: 29569109 NR Description: nucleosome/chromatin assembly factor group A [Zea
  misc_feature (1)..(372): Homolog of NCBI NO: 7488816 NR Description: nucleosome assembly protein 1 - garden pea
  misc_feature (18)..(346): Homolog of NCBI NO: 32414795 NR Description: hypothetical protein [Neurospora crassa]
  misc_feature (1)..(372): Homolog of NCBI NO: 2129840 NR Description: nucleosome assembly protein 1 - soybean
  misc_feature (1)..(372): Homolog of NCBI NO: 7488816 NR Description: nucleosome assembly protein 1 - garden pea
  misc_feature (1)..(372): Homolog of NCBI NO: 15224782 NR Description: nucleosome assembly protein -related [Arabidopsis
  misc_feature (1)..(372): Homolog of NCBI NO: 18423918 NR Description: nucleosome assembly protein [Arabidopsis
  misc_feature (1)..(372): Homolog of NCBI NO: 8777435 NR Description: nucleosome assembly protein [Arabidopsis thaliana]
  misc_feature (1)..(372): Homolog of NCBI NO: 549975 NR Description: nucleosome assembly protein I-like protein
  misc_feature (1)..(372): Homolog of NCBI NO: 15236115 NR Description: nucleosome assembly protein I-related protein
  misc_feature (1)..(372): Homolog of NCBI NO: 29569109 NR Description: nucleosome/chromatin assembly factor group A [Zea
  misc_feature (1)..(372): Homolog of NCBI NO: 21898560 NR Description: nucleosome/chromatin assembly factor group A [Zea
  misc_feature (1)..(372): Homolog of NCBI NO: 15236115 NR Description: nucleosome assembly protein I-related protein
  misc_feature (1)..(372): Homolog of NCBI NO: 549975 NR Description: nucleosome assembly protein I-like protein
  misc_feature (1)..(372): Homolog of NCBI NO: 8777435 NR Description: nucleosome assembly protein [Arabidopsis thaliana]
  misc_feature (1)..(372): Homolog of NCBI NO: 18423918 NR Description: nucleosome assembly protein [Arabidopsis
  misc_feature (1)..(372): Homolog of NCBI NO: 15224782 NR Description: nucleosome assembly protein -related [Arabidopsis
MNMSDLSTALNEEDRAGLVNALKNKLQNLAGQHSDVLENLTPPVRKRVEFLREIQNQYDEMEAKFFEERAALEAKYQKLYQPLYTKRYEIVNGVVEVEGAAEEVKSEQGEDKSAEEKGVPDFWLIALKNNEITAEEITERDEGALKYLKDIKWSRVEEPKGFKLEFFFDQNPYFKNTVLTKTYHMIDEDEPILEKALGTEIEWYPGKCLTQKILKKKPKKGSKNTKPITKTEDCESFFNFFSPPQVPDDDEDLDDDMADELQGQMEHDYDIGSTIKEKIISHAVSWFTGEAVEADDLDIEDDDDEIDEDDDEEDEEDDEDDEEEDDEDDDEEEEADQGKKSKKKSSAGHKKAGRSQLAEGQAGERPPECKQQ

SEQ ID NO: 22230 - DNA, 1065 bp, Arabidopsis thaliana
  misc_feature (1)..(1065): Ceres Seq. ID no. 13500131
  misc_feature: MA Experiment ID: 108461 Result: Up-regulated in Transcription
  misc_feature: MA Experiment 108461 PARAMETER Experiment Name: At_Germinating_Seeds_cDNA_P Parameter: Age (day) Value: 1 vs. 0
  misc_feature: MA Experiment 108461 PARAMETER Experiment Name: At_Germinating_Seeds_cDNA_P Parameter: Tissue Value: Germinating Seeds
  misc_feature: MA Experiment ID: 108462 Result: Up-regulated in Transcription
  misc_feature: MA Experiment 108462 PARAMETER Experiment Name: At_Germinating_Seeds_cDNA_P Parameter: Age (day) Value: 2 vs. 0
  misc_feature: MA Experiment 108462 PARAMETER Experiment Name: At_Germinating_Seeds_cDNA_P Parameter: Tissue Value: Germinating Seeds
  misc_feature: MA Experiment ID: 108463 Result: Up-regulated in Transcription
  misc_feature: MA Experiment 108463 PARAMETER Experiment Name: At_Germinating_Seeds_cDNA_P Parameter: Age (day) Value: 3 vs. 0
  misc_feature: MA Experiment 108463 PARAMETER Experiment Name: At_Germinating_Seeds_cDNA_P Parameter: Tissue Value: Germinating Seeds
  misc_feature: MA Experiment ID: 108464 Result: Up-regulated in Transcription
  misc_feature: MA Experiment 108464 PARAMETER Experiment Name: At_Germinating_Seeds_cDNA_P Parameter: Age (day) Value: 4 vs. 0
  misc_feature: MA Experiment 108464 PARAMETER Experiment Name: At_Germinating_Seeds_cDNA_P Parameter: Tissue Value: Germinating Seeds
  misc_feature: MA Experiment ID: 108488 Result: Down-regulated in Transcription
  misc_feature: MA Experiment ID: 108489 Result: Up-regulated in Transcription
  misc_feature: MA Experiment ID: 108501 Result: Down-regulated in Transcription
  misc_feature: MA Experiment 108501 PARAMETER Experiment Name: At_ap2_floral_buds_cDNA_P Parameter: Plant Line Value: ap2 (Ler.)
  misc_feature: MA Experiment 108501 PARAMETER Experiment Name: At_ap2_floral_buds_cDNA_P Parameter: Tissue Value: Closed Flower
  misc_feature: MA Experiment ID: 108595 Result: Up-regulated in Transcription
  misc_feature: MA Experiment 108595 PARAMETER Experiment Name: At_Ler-pi_Ovule_cDNA_P Parameter: Plant Line Value: null
  misc_feature: MA Experiment ID: 108605 Result: Up-regulated in Transcription
  misc_feature: MA Experiment 108605 PARAMETER Experiment Name: At_100uM_ABA_cDNA_P Parameter: Timepoint (hr) Value: 6
  misc_feature: MA Experiment 108605 PARAMETER Experiment Name: At_100uM_ABA_cDNA_P Parameter: Tissue Value: Aerial
  misc_feature: MA Experiment 108605 PARAMETER Experiment Name: At_100uM_ABA_cDNA_P Parameter: Treatment Value: 100uM ABA vs. No Treatment
  misc_feature: MA Experiment ID: 108607 Result: Up-regulated in Transcription
  misc_feature: MA Experiment 108607 PARAMETER Experiment Name: At_100uM_ABA_cDNA_P Parameter: Timepoint (hr) Value: 4
  misc_feature: MA Experiment 108607 PARAMETER Experiment Name: At_100uM_ABA_cDNA_P Parameter: Tissue Value: Aerial
  misc_feature: MA Experiment 108607 PARAMETER Experiment Name: At_100uM_ABA_cDNA_P Parameter: Treatment Value: 100uM ABA vs. No Treatment
  misc_feature: MA Experiment ID: 108608 Result: Up-regulated in Transcription
  misc_feature: MA Experiment 108608 PARAMETER Experiment Name: At_100uM_ABA_cDNA_P Parameter: Timepoint (hr) Value: 1
  misc_feature: MA Experiment 108608 PARAMETER Experiment Name: At_100uM_ABA_cDNA_P Parameter: Tissue Value: Aerial
  misc_feature: MA Experiment 108608 PARAMETER Experiment Name: At_100uM_ABA_cDNA_P Parameter: Treatment Value: 100uM ABA vs. No Treatment
  misc_feature: MA Experiment ID: 108609 Result: Up-regulated in Transcription
  misc_feature: MA Experiment 108609 PARAMETER Experiment Name: At_100uM_ABA_cDNA_P Parameter: Timepoint (hr) Value: 24
  misc_feature: MA Experiment 108609 PARAMETER Experiment Name: At_100uM_ABA_cDNA_P Parameter: Tissue Value: Aerial
  misc_feature: MA Experiment 108609 PARAMETER Experiment Name: At_100uM_ABA_cDNA_P Parameter: Treatment Value: 100uM ABA vs. No Treatment
  misc_feature: MA Experiment ID: 20000069 Result: Up-regulated in Transcription
  misc_feature: MA Experiment 20000069 PARAMETER Experiment Name: At_100uM_ABA_Mutants_cDNA_P Parameter: Plant Line Value: CS23
  misc_feature: MA Experiment 20000069 PARAMETER Experiment Name: At_100uM_ABA_Mutants_cDNA_P Parameter: Timepoint (hr) Value: 6
  misc_feature: MA Experiment 20000069 PARAMETER Experiment Name: At_100uM_ABA_Mutants_cDNA_P Parameter: Tissue Value: Aerial
  misc_feature: MA Experiment 20000069 PARAMETER Experiment Name: At_100uM_ABA_Mutants_cDNA_P Parameter: Treatment Value: 100uM ABA vs. No Treatment
  misc_feature: MA Experiment ID: 20000070 Result: Up-regulated in Transcription
  misc_feature: MA Experiment 20000070 PARAMETER Experiment Name: At_100uM_ABA_Mutants_cDNA_P Parameter: Plant Line Value: CS24
  misc_feature: MA Experiment 20000070 PARAMETER Experiment Name: At_100uM_ABA_Mutants_cDNA_P Parameter: Timepoint (hr) Value: 6
  misc_feature: MA Experiment 20000070 PARAMETER Experiment Name: At_100uM_ABA_Mutants_cDNA_P Parameter: Tissue Value: Aerial
  misc_feature: MA Experiment 20000070 PARAMETER Experiment Name: At_100uM_ABA_Mutants_cDNA_P Parameter: Treatment Value: 100uM ABA vs. No Treatment
  misc_feature: MA Experiment ID: 20000071 Result: Up-regulated in Transcription
  misc_feature: MA Experiment 20000071 PARAMETER Experiment Name: At_100uM_ABA_Mutants_cDNA_P Parameter: Plant Line Value: CS8104
  misc_feature: MA Experiment 20000071 PARAMETER Experiment Name: At_100uM_ABA_Mutants_cDNA_P Parameter: Timepoint (hr) Value: 6
  misc_feature: MA Experiment 20000071 PARAMETER Experiment Name: At_100uM_ABA_Mutants_cDNA_P Parameter: Tissue Value: Aerial
  misc_feature: MA Experiment 20000071 PARAMETER Experiment Name: At_100uM_ABA_Mutants_cDNA_P Parameter: Treatment Value: 100uM ABA vs. No Treatment
  misc_feature: MA Experiment ID: 20000072 Result: Up-regulated in Transcription
  misc_feature: MA Experiment 20000072 PARAMETER Experiment Name: At_100uM_ABA_Mutants_cDNA_P Parameter: Plant Line Value: CS8105
  misc_feature: MA Experiment 20000072 PARAMETER Experiment Name: At_100uM_ABA_Mutants_cDNA_P Parameter: Timepoint (hr) Value: 6
  misc_feature: MA Experiment 20000072 PARAMETER Experiment Name: At_100uM_ABA_Mutants_cDNA_P Parameter: Tissue Value: Aerial
  misc_feature: MA Experiment 20000072 PARAMETER Experiment Name: At_100uM_ABA_Mutants_cDNA_P Parameter: Treatment Value: 100uM ABA vs. No Treatment
  misc_feature: MA Experiment ID: 20000086 Result: Up-regulated in Transcription
  misc_feature: MA Experiment 20000086 PARAMETER Experiment Name: At_100uM_ABA_Mutants_cDNA_P Parameter: Plant Line Value: CS22
  misc_feature: MA Experiment 20000086 PARAMETER Experiment Name: At_100uM_ABA_Mutants_cDNA_P Parameter: Timepoint (hr) Value: 6
  misc_feature: MA Experiment 20000086 PARAMETER Experiment Name: At_100uM_ABA_Mutants_cDNA_P Parameter: Tissue Value: Aerial
  misc_feature: MA Experiment 20000086 PARAMETER Experiment Name: At_100uM_ABA_Mutants_cDNA_P Parameter: Treatment Value: 100uM ABA vs. No Treatment
  misc_feature: MA Experiment ID: 20000087 Result: Up-regulated in Transcription
  misc_feature: MA Experiment 20000087 PARAMETER Experiment Name: At_100uM_ABA_Mutants_cDNA_P Parameter: Plant Line Value: WS
  misc_feature: MA Experiment 20000087 PARAMETER Experiment Name: At_100uM_ABA_Mutants_cDNA_P Parameter: Timepoint (hr) Value: 6
  misc_feature: MA Experiment 20000087 PARAMETER Experiment Name: At_100uM_ABA_Mutants_cDNA_P Parameter: Tissue Value: Aerial
  misc_feature: MA Experiment 20000087 PARAMETER Experiment Name: At_100uM_ABA_Mutants_cDNA_P Parameter: Treatment Value: 100uM ABA vs. No Treatment
  misc_feature: MA Experiment ID: 20000088 Result: Up-regulated in Transcription
  misc_feature: MA Experiment 20000088 PARAMETER Experiment Name: At_100uM_ABA_Mutants_cDNA_P Parameter: Plant Line Value: Landsberg
  misc_feature: MA Experiment 20000088 PARAMETER Experiment Name: At_100uM_ABA_Mutants_cDNA_P Parameter: Timepoint (hr) Value: 6
  misc_feature: MA Experiment 20000088 PARAMETER Experiment Name: At_100uM_ABA_Mutants_cDNA_P Parameter: Tissue Value: Aerial
  misc_feature: MA Experiment 20000088 PARAMETER Experiment Name: At_100uM_ABA_Mutants_cDNA_P Parameter: Treatment Value: 100uM ABA vs. No Treatment
  misc_feature: MA Experiment ID: 20000166 Result: Up-regulated in Transcription
  misc_feature: MA Experiment 20000166 PARAMETER Experiment Name: At_100uM_ABA_P Parameter: Age (day) Value: 14
  misc_feature: MA Experiment 20000166 PARAMETER Experiment Name: At_100uM_ABA_P Parameter: Organism Value: A. thaliana
  misc_feature: MA Experiment 20000166 PARAMETER Experiment Name: At_100uM_ABA_P Parameter: Plant Line Value: WS
  misc_feature: MA Experiment 20000166 PARAMETER Experiment Name: At_100uM_ABA_P Parameter: Timepoint (hr) Value: 1
  misc_feature: MA Experiment 20000166 PARAMETER Experiment Name: At_100uM_ABA_P Parameter: Tissue Value: Aerial
  misc_feature: MA Experiment 20000166 PARAMETER Experiment Name: At_100uM_ABA_P Parameter: Treatment Value: 100uM ABA vs. No Treatment
  misc_feature: MA Experiment ID: 20000211 Result: Up-regulated in Transcription
  misc_feature: MA Experiment 20000211 PARAMETER Experiment Name: At_0.001percent_MeJA__P Parameter: Age (day) Value: 14
  misc_feature: MA Experiment 20000211 PARAMETER Experiment Name: At_0.001percent_MeJA__P Parameter: Organism Value: A. thaliana
  misc_feature: MA Experiment 20000211 PARAMETER Experiment Name: At_0.001percent_MeJA__P Parameter: Plant Line Value: WS
  misc_feature: MA Experiment 20000211 PARAMETER Experiment Name: At_0.001percent_MeJA__P Parameter: Timepoint (hr) Value: 1
  misc_feature: MA Experiment 20000211 PARAMETER Experiment Name: At_0.001percent_MeJA__P Parameter: Tissue Value: Aerial
  misc_feature: MA Experiment 20000211 PARAMETER Experiment Name: At_0.001percent_MeJA__P Parameter: Treatment Value: 0.001percent MeJA vs. No Treatment
  misc_feature: MA Experiment ID: 20000213 Result: Down-regulated in Transcription
  misc_feature: MA Experiment 20000213 PARAMETER Experiment Name: At_4deg_Cold_P Parameter: Timepoint (hr) Value: 2
  misc_feature: MA Experiment ID: 20000224 Result: Down-regulated in Transcription
  misc_feature: MA Experiment ID: 20000234 Result: Down-regulated in Transcription
  misc_feature: MA Experiment 20000234 PARAMETER Experiment Name: At_Siliques_P Parameter: Age (day) Value: 21
  misc_feature: MA Experiment 20000234 PARAMETER Experiment Name: At_Siliques_P Parameter: Organism Value: A. thaliana
  misc_feature: MA Experiment 20000234 PARAMETER Experiment Name: At_Siliques_P Parameter: Plant Line Value: WS
  misc_feature: MA Experiment 20000234 PARAMETER Experiment Name: At_Siliques_P Parameter: Tissue Value: Less Than 5mm Siliques vs. Whole Plant
  misc_feature: MA Experiment ID: 20000235 Result: Down-regulated in Transcription
  misc_feature: MA Experiment 20000235 PARAMETER Experiment Name: At_Siliques_P Parameter: Age (day) Value: 21
  misc_feature: MA Experiment 20000235 PARAMETER Experiment Name: At_Siliques_P Parameter: Organism Value: A. thaliana
  misc_feature: MA Experiment 20000235 PARAMETER Experiment Name: At_Siliques_P Parameter: Plant Line Value: WS
  misc_feature: MA Experiment 20000235 PARAMETER Experiment Name: At_Siliques_P Parameter: Tissue Value: 5-10mm Siliques vs. Whole Plant
  misc_feature: MA Experiment ID: 20000264 Result: Down-regulated in Transcription
  misc_feature: MA Experiment 20000264 PARAMETER Experiment Name: At_Open_Flower_P Parameter: Age (day) Value: 21
  misc_feature: MA Experiment 20000264 PARAMETER Experiment Name: At_Open_Flower_P Parameter: Plant Line Value: WS
  misc_feature: MA Experiment 20000264 PARAMETER Experiment Name: At_Open_Flower_P Parameter: Tissue Value: Open Flower vs. Whole Plant
  misc_feature: MA Experiment ID: 20000265 Result: Down-regulated in Transcription
  misc_feature: MA Experiment 20000265 PARAMETER Experiment Name: At_Open_Flower_P Parameter: Age (day) Value: 21
  misc_feature: MA Experiment 20000265 PARAMETER Experiment Name: At_Open_Flower_P Parameter: Plant Line Value: WS
  misc_feature: MA Experiment 20000265 PARAMETER Experiment Name: At_Open_Flower_P Parameter: Tissue Value: Closed Flower vs. Whole Plant
  misc_feature: MA Experiment ID: 20000286 Result: Down-regulated in Transcription
  misc_feature: MA Experiment 20000286 PARAMETER Experiment Name: At_Open_Flower_P Parameter: Age (day) Value: 21
  misc_feature: MA Experiment 20000286 PARAMETER Experiment Name: At_Open_Flower_P Parameter: Plant Line Value: WS
  misc_feature: MA Experiment 20000286 PARAMETER Experiment Name: At_Open_Flower_P Parameter: Tissue Value: Half Open vs. Whole Plant
  misc_feature: MA Experiment ID: 20000453 Result: Up-regulated in Transcription
  misc_feature: MA Experiment 20000453 PARAMETER Experiment Name: At_100uM_ABA_P Parameter: Age (day) Value: 15
  misc_feature: MA Experiment 20000453 PARAMETER Experiment Name: At_100uM_ABA_P Parameter: Organism Value: A. thaliana
  misc_feature: MA Experiment 20000453 PARAMETER Experiment Name: At_100uM_ABA_P Parameter: Plant Line Value: WS
  misc_feature: MA Experiment 20000453 PARAMETER Experiment Name: At_100uM_ABA_P Parameter: Timepoint (hr) Value: 24
  misc_feature: MA Experiment 20000453 PARAMETER Experiment Name: At_100uM_ABA_P Parameter: Tissue Value: Aerial
  misc_feature: MA Experiment 20000453 PARAMETER Experiment Name: At_100uM_ABA_P Parameter: Treatment Value: 100uM ABA vs. No Treatment
  misc_feature: MA Experiment ID: 20000573 Result: Up-regulated in Transcription
  misc_feature: MA Experiment 20000573 PARAMETER Experiment Name: At_100uM_ABA_Mutants__P Parameter: Organism Value: A. thaliana
  misc_feature: MA Experiment 20000573 PARAMETER Experiment Name: At_100uM_ABA_Mutants__P Parameter: Plant Line Value: CS22 vs. Ler wt
  misc_feature: MA Experiment 20000573 PARAMETER Experiment Name: At_100uM_ABA_Mutants__P Parameter: Timepoint (hr) Value: N/A
  misc_feature: MA Experiment 20000573 PARAMETER Experiment Name: At_100uM_ABA_Mutants__P Parameter: Tissue Value: Whole Plant
  misc_feature: MA Experiment 20000573 PARAMETER Experiment Name: At_100uM_ABA_Mutants__P Parameter: Treatment Value: None
  misc_feature: MA Experiment ID: 20000574 Result: Up-regulated in Transcription
  misc_feature: MA Experiment 20000574 PARAMETER Experiment Name: At_100uM_ABA_Mutants__P Parameter: Organism Value: A. thaliana
  misc_feature: MA Experiment 20000574 PARAMETER Experiment Name: At_100uM_ABA_Mutants__P Parameter: Plant Line Value: CS23 vs. Ler wt
  misc_feature: MA Experiment 20000574 PARAMETER Experiment Name: At_100uM_ABA_Mutants__P Parameter: Timepoint (hr) Value: N/A
  misc_feature: MA Experiment 20000574 PARAMETER Experiment Name: At_100uM_ABA_Mutants__P Parameter: Tissue Value: Whole Plant
  misc_feature: MA Experiment 20000574 PARAMETER Experiment Name: At_100uM_ABA_Mutants__P Parameter: Treatment Value: None
  misc_feature: MA Experiment ID: 20001247 Result: Up-regulated in Transcription
  misc_feature: MA Experiment 20001247 PARAMETER Experiment Name: At_Far-red-induction_P Parameter: Age (day) Value: 7
  misc_feature: MA Experiment 20001247 PARAMETER Experiment Name: At_Far-red-induction_P Parameter: Light Value: Far-red vs. White
  misc_feature: MA Experiment 20001247 PARAMETER Experiment Name: At_Far-red-induction_P Parameter: Organism Value: A. thaliana
  misc_feature: MA Experiment 20001247 PARAMETER Experiment Name: At_Far-red-induction_P Parameter: Plant Line Value: Columbia
  misc_feature: MA Experiment 20001247 PARAMETER Experiment Name: At_Far-red-induction_P Parameter: Timepoint (hr) Value: 1
  misc_feature: MA Experiment 20001247 PARAMETER Experiment Name: At_Far-red-induction_P Parameter: Tissue Value: Whole Plant
  misc_feature: MA Experiment ID: 20001248 Result: Up-regulated in Transcription
  misc_feature: MA Experiment 20001248 PARAMETER Experiment Name: At_Far-red-induction_P Parameter: Age (day) Value: 7
  misc_feature: MA Experiment 20001248 PARAMETER Experiment Name: At_Far-red-induction_P Parameter: Light Value: Far-red vs. White
  misc_feature: MA Experiment 20001248 PARAMETER Experiment Name: At_Far-red-induction_P Parameter: Organism Value: A. thaliana
  misc_feature: MA Experiment 20001248 PARAMETER Experiment Name: At_Far-red-induction_P Parameter: Plant Line Value: Columbia
  misc_feature: MA Experiment 20001248 PARAMETER Experiment Name: At_Far-red-induction_P Parameter: Timepoint (hr) Value: 4
  misc_feature: MA Experiment 20001248 PARAMETER Experiment Name: At_Far-red-induction_P Parameter: Tissue Value: Whole Plant
  misc_feature: MA Experiment ID: 20001450 Result: Up-regulated in Transcription
  misc_feature: MA Experiment 20001450 PARAMETER Experiment Name: At_Far-red-induction_P Parameter: Age (day) Value: 7
  misc_feature: MA Experiment 20001450 PARAMETER Experiment Name: At_Far-red-induction_P Parameter: Light Value: Far-red vs. White
  misc_feature: MA Experiment 20001450 PARAMETER Experiment Name: At_Far-red-induction_P Parameter: Organism Value: A. thaliana
  misc_feature: MA Experiment 20001450 PARAMETER Experiment Name: At_Far-red-induction_P Parameter: Plant Line Value: Columbia
  misc_feature: MA Experiment 20001450 PARAMETER Experiment Name: At_Far-red-induction_P Parameter: Timepoint (hr) Value: 8
  misc_feature: MA Experiment 20001450 PARAMETER Experiment Name: At_Far-red-induction_P Parameter: Tissue Value: Whole Plant
  misc_feature: MA Experiment ID: 20001451 Result: Up-regulated in Transcription
  misc_feature: MA Experiment 20001451 PARAMETER Experiment Name: At_Far-red-induction_P Parameter: Age (day) Value: 7
  misc_feature: MA Experiment 20001451 PARAMETER Experiment Name: At_Far-red-induction_P Parameter: Light Value: Far-red vs. White
  misc_feature: MA Experiment 20001451 PARAMETER Experiment Name: At_Far-red-induction_P Parameter: Organism Value: A. thaliana
  misc_feature: MA Experiment 20001451 PARAMETER Experiment Name: At_Far-red-induction_P Parameter: Plant Line Value: Columbia
  misc_feature: MA Experiment 20001451 PARAMETER Experiment Name: At_Far-red-induction_P Parameter: Timepoint (hr) Value: 24
  misc_feature: MA Experiment 20001451 PARAMETER Experiment Name: At_Far-red-induction_P Parameter: Tissue Value: Whole Plant
  misc_feature: MA Experiment ID: 20001557 Result: Down-regulated in Transcription
  misc_feature: MA Experiment 20001557 PARAMETER Experiment Name: At_Drought_Soil_Dry_P Parameter: Age (day) Value: 27
  misc_feature: MA Experiment 20001557 PARAMETER Experiment Name: At_Drought_Soil_Dry_P Parameter: Organism Value: A. thaliana
  misc_feature: MA Experiment 20001557 PARAMETER Experiment Name: At_Drought_Soil_Dry_P Parameter: Plant Line Value: WS
  misc_feature: MA Experiment 20001557 PARAMETER Experiment Name: At_Drought_Soil_Dry_P Parameter: Post Timepoint (hr) Value: 3
  misc_feature: MA Experiment 20001557 PARAMETER Experiment Name: At_Drought_Soil_Dry_P Parameter: Post-Treatment Value: Re-Water vs. No Drought
  misc_feature: MA Experiment 20001557 PARAMETER Experiment Name: At_Drought_Soil_Dry_P Parameter: Timepoint (day) Value: 13
  misc_feature: MA Experiment 20001557 PARAMETER Experiment Name: At_Drought_Soil_Dry_P Parameter: Treatment Value: Drought vs. No Drought
  misc_feature: MA Experiment ID: 20001905 Result: Up-regulated in Transcription
  misc_feature: MA Experiment 20001905 PARAMETER Experiment Name: At_Drought_Reproduction_P Parameter: Age (day) Value: 40
  misc_feature: MA Experiment 20001905 PARAMETER Experiment Name: At_Drought_Reproduction_P Parameter: Organism Value: A. thaliana
  misc_feature: MA Experiment 20001905 PARAMETER Experiment Name: At_Drought_Reproduction_P Parameter: Plant Line Value: WS
  misc_feature: MA Experiment 20001905 PARAMETER Experiment Name: At_Drought_Reproduction_P Parameter: Timepoint (day) Value: 10
  misc_feature: MA Experiment 20001905 PARAMETER Experiment Name: At_Drought_Reproduction_P Parameter: Tissue Value: Rosettes
  misc_feature: MA Experiment 20001905 PARAMETER Experiment Name: At_Drought_Reproduction_P Parameter: Treatment Value: Drought vs. No Drought
aaacaaattatatattttcttacttacttgttctcttgtaatggatttctctccgatcaactgcctcattttcgatttggatgacacattataccctctaaaaactggaatagcgccagctgtcaagaagaatattgacgattttctagtggagaaatttggattctcagaaagtaaagcttcaagcttaagagttgaactcttcaagacttatggaagtactctcgctggtcttagggcgttaggtcatgatgttcatcctgatgaatatcacagtttcgtgcacggaaggttaccgtatgggtcgatcgaaccaaacaacaagctacgtaaccttctcaacaaaatcaaacagagaaaaattatatttacgaattcggacaagaatcatgcggtgaaggtcctcaagaaacttggtttagaagattgtttcgaagagatgatttgttttgagacaatgaacccaaatttattcgggtcaacaacccgacccgatgaatacccggttgttctcaagccttcgttgaccgcaatggatatttgcattcgtgtagccaacgttgatcctcgccgaacagtatttttggatgataatatccacaatattaccgcgggtaaatctgtcgggcttcgcacaatcctggtgggaagagcagaaaagacgaaagatgcggattatgcggtggagacggttactgagatagctacggcggtgccagagatttgggctacggcgacggcgacaggcggatttgacgttggtggtgagaggatcagacggagcaagagtgagctggagggtatggcttcaatagcagccgtcggtgcgtgacgtgatcgagtgggcggatcgtggccgttggataattttaacgtctagtggttgggattgtacaggtggcgttaaaatgttgataatgcatatgtgaatataaataatagtggtggtggacaatattcatcccatgtggacaccaaatgtgaatacgcaatcagataatattatgtatgatgattatgatttcaatatgtgtacatttttattcaactgatttttttaaagtt

SEQ ID NO: 22231 - protein, 276 aa, Arabidopsis thaliana
  peptide (1)..(276): Ceres Seq. ID no. 13500132
  misc_feature (19)..(218): Pfam Name: haloacid dehalogenase-like hydrolase Pfam Description: haloacid dehalogenase-like hydrolase
  misc_feature (19)..(218): Pfam Name: haloacid dehalogenase-like hydrolase Pfam Description: haloacid dehalogenase-like hydrolase
  misc_feature (17)..(276): Homolog of NCBI NO: 27528429 NR Description: putative phosphatase [Phaseolus vulgaris]
  misc_feature (14)..(276): Homolog of NCBI NO: 25408214 NR Description: probable hydrolase [imported] - Arabidopsis
  misc_feature (14)..(276): Homolog of NCBI NO: 25408214 NR Description: probable hydrolase [imported] - Arabidopsis
  misc_feature (14)..(276): Homolog of NCBI NO: 18402886 NR Description: haloacid dehalogenase-like hydrolase family
  misc_feature (17)..(276): Homolog of NCBI NO: 27528429 NR Description: putative phosphatase [Phaseolus vulgaris]
  misc_feature (14)..(276): Homolog of NCBI NO: 18402886 NR Description: haloacid dehalogenase-like hydrolase family
NKLYIFLLTCSLVMDFSPINCLIFDLDDTLYPLKTGIAPAVKKNIDDFLVEKFGFSESKASSLRVELFKTYGSTLAGLRALGHDVHPDEYHSFVHGRLPYGSIEPNNKLRNLLNKIKQRKIIFTNSDKNHAVKVLKKLGLEDCFEEMICFETMNPNLFGSTTRPDEYPVVLKPSLTAMDICIRVANVDPRRTVFLDDNIHNITAGKSVGLRTILVGRAEKTKDADYAVETVTEIATAVPEIWATATATGGFDVGGERIRRSKSELEGMASIAAVGA

SEQ ID NO: 22232 - protein, 263 aa, Arabidopsis thaliana
  peptide (1)..(263): Ceres Seq. ID no. 13500133
  misc_feature (6)..(205): Pfam Name: haloacid dehalogenase-like hydrolase Pfam Description: haloacid dehalogenase-like hydrolase
  misc_feature (6)..(205): Pfam Name: haloacid dehalogenase-like hydrolase Pfam Description: haloacid dehalogenase-like hydrolase
  misc_feature (4)..(263): Homolog of NCBI NO: 27528429 NR Description: putative phosphatase [Phaseolus vulgaris]
  misc_feature (1)..(263): Homolog of NCBI NO: 25408214 NR Description: probable hydrolase [imported] - Arabidopsis
  misc_feature (1)..(263): Homolog of NCBI NO: 25408214 NR Description: probable hydrolase [imported] - Arabidopsis
  misc_feature (1)..(263): Homolog of NCBI NO: 18402886 NR Description: haloacid dehalogenase-like hydrolase family
  misc_feature (4)..(263): Homolog of NCBI NO: 27528429 NR Description: putative phosphatase [Phaseolus vulgaris]
  misc_feature (1)..(263): Homolog of NCBI NO: 18402886 NR Description: haloacid dehalogenase-like hydrolase family
MDFSPINCLIFDLDDTLYPLKTGIAPAVKKNIDDFLVEKFGFSESKASSLRVELFKTYGSTLAGLRALGHDVHPDEYHSFVHGRLPYGSIEPNNKLRNLLNKIKQRKIIFTNSDKNHAVKVLKKLGLEDCFEEMICFETMNPNLFGSTTRPDEYPVVLKPSLTAMDICIRVANVDPRRTVFLDDNIHNITAGKSVGLRTILVGRAEKTKDADYAVETVTEIATAVPEIWATATATGGFDVGGERIRRSKSELEGMASIAAVGA

SEQ ID NO: 22233 - DNA, 1864 bp, Arabidopsis thaliana
  misc_feature (1)..(1864): Ceres Seq. ID no. 12562449
  misc_feature: MA Experiment ID: 20000180 Result: Up-regulated in Transcription
  misc_feature: MA Experiment 20000180 PARAMETER Experiment Name: At_Germinating_Seeds_P Parameter: Age (hr) Value: 24 vs. 0
  misc_feature: MA Experiment 20000180 PARAMETER Experiment Name: At_Germinating_Seeds_P Parameter: Tissue Value: Germinating Seeds
  misc_feature: MA Experiment ID: 20000184 Result: Up-regulated in Transcription
  misc_feature: MA Experiment 20000184 PARAMETER Experiment Name: At_Shoots__P Parameter: Age (day) Value: 7
  misc_feature: MA Experiment 20000184 PARAMETER Experiment Name: At_Shoots__P Parameter: Tissue Value: Shoots vs. Whole Plant
  misc_feature: MA Experiment ID: 20000185 Result: Up-regulated in Transcription
  misc_feature: MA Experiment 20000185 PARAMETER Experiment Name: At_Roots__P Parameter: Age (day) Value: 7 vs. 21
  misc_feature: MA Experiment 20000185 PARAMETER Experiment Name: At_Roots__P Parameter: Organism Value: A. thaliana
  misc_feature: MA Experiment 20000185 PARAMETER Experiment Name: At_Roots__P Parameter: Tissue Value: Roots vs. Whole Plant
  misc_feature: MA Experiment ID: 20000264 Result: Up-regulated in Transcription
  misc_feature: MA Experiment 20000264 PARAMETER Experiment Name: At_Open_Flower_P Parameter: Age (day) Value: 21
  misc_feature: MA Experiment 20000264 PARAMETER Experiment Name: At_Open_Flower_P Parameter: Plant Line Value: WS
  misc_feature: MA Experiment 20000264 PARAMETER Experiment Name: At_Open_Flower_P Parameter: Tissue Value: Open Flower vs. Whole Plant
  misc_feature: MA Experiment ID: 20000286 Result: Up-regulated in Transcription
  misc_feature: MA Experiment 20000286 PARAMETER Experiment Name: At_Open_Flower_P Parameter: Age (day) Value: 21
  misc_feature: MA Experiment 20000286 PARAMETER Experiment Name: At_Open_Flower_P Parameter: Plant Line Value: WS
  misc_feature: MA Experiment 20000286 PARAMETER Experiment Name: At_Open_Flower_P Parameter: Tissue Value: Half Open vs. Whole Plant
  misc_feature: MA Experiment ID: 20000439 Result: Up-regulated in Transcription
  misc_feature: MA Experiment 20000439 PARAMETER Experiment Name: At_Roots__P Parameter: Age (day) Value: 14 vs. 21
  misc_feature: MA Experiment 20000439 PARAMETER Experiment Name: At_Roots__P Parameter: Organism Value: A. thaliana
  misc_feature: MA Experiment 20000439 PARAMETER Experiment Name: At_Roots__P Parameter: Tissue Value: Roots vs. Whole Plant
  misc_feature: MA Experiment ID: 20000495 Result: Down-regulated in Transcription
  misc_feature: MA Experiment 20000495 PARAMETER Experiment Name: At_Guard_Cells_P Parameter: Harvest Date Value: 8/2/2002
  misc_feature: MA Experiment 20000495 PARAMETER Experiment Name: At_Guard_Cells_P Parameter: Organism Value: A. thaliana
  misc_feature: MA Experiment 20000495 PARAMETER Experiment Name: At_Guard_Cells_P Parameter: Tissue Value: Guard Cells vs. Leaves
  misc_feature: MA Experiment ID: 20000527 Result: Down-regulated in Transcription
  misc_feature: MA Experiment 20000527 PARAMETER Experiment Name: At_10percent_PEG_P Parameter: Age (day) Value: 20
  misc_feature: MA Experiment 20000527 PARAMETER Experiment Name: At_10percent_PEG_P Parameter: Organism Value: A. thaliana
  misc_feature: MA Experiment 20000527 PARAMETER Experiment Name: At_10percent_PEG_P Parameter: Plant Line Value: WS
  misc_feature: MA Experiment 20000527 PARAMETER Experiment Name: At_10percent_PEG_P Parameter: Timepoint (day) Value: 20
  misc_feature: MA Experiment 20000527 PARAMETER Experiment Name: At_10percent_PEG_P Parameter: Tissue Value: Whole Plant
  misc_feature: MA Experiment 20000527 PARAMETER Experiment Name: At_10percent_PEG_P Parameter: Treatment Value: 10percent PEG vs. No Treatment
  misc_feature: MA Experiment ID: 20001248 Result: Down-regulated in Transcription
  misc_feature: MA Experiment 20001248 PARAMETER Experiment Name: At_Far-red-induction_P Parameter: Age (day) Value: 7
  misc_feature: MA Experiment 20001248 PARAMETER Experiment Name: At_Far-red-induction_P Parameter: Light Value: Far-red vs. White
  misc_feature: MA Experiment 20001248 PARAMETER Experiment Name: At_Far-red-induction_P Parameter: Organism Value: A. thaliana
  misc_feature: MA Experiment 20001248 PARAMETER Experiment Name: At_Far-red-induction_P Parameter: Plant Line Value: Columbia
  misc_feature: MA Experiment 20001248 PARAMETER Experiment Name: At_Far-red-induction_P Parameter: Timepoint (hr) Value: 4
  misc_feature: MA Experiment 20001248 PARAMETER Experiment Name: At_Far-red-induction_P Parameter: Tissue Value: Whole Plant
  misc_feature: MA Experiment ID: 20001450 Result: Down-regulated in Transcription
  misc_feature: MA Experiment 20001450 PARAMETER Experiment Name: At_Far-red-induction_P Parameter: Age (day) Value: 7
  misc_feature: MA Experiment 20001450 PARAMETER Experiment Name: At_Far-red-induction_P Parameter: Light Value: Far-red vs. White
  misc_feature: MA Experiment 20001450 PARAMETER Experiment Name: At_Far-red-induction_P Parameter: Organism Value: A. thaliana
  misc_feature: MA Experiment 20001450 PARAMETER Experiment Name: At_Far-red-induction_P Parameter: Plant Line Value: Columbia
  misc_feature: MA Experiment 20001450 PARAMETER Experiment Name: At_Far-red-induction_P Parameter: Timepoint (hr) Value: 8
  misc_feature: MA Experiment 20001450 PARAMETER Experiment Name: At_Far-red-induction_P Parameter: Tissue Value: Whole Plant
  misc_feature: MA Experiment ID: 20001451 Result: Down-regulated in Transcription
  misc_feature: MA Experiment 20001451 PARAMETER Experiment Name: At_Far-red-induction_P Parameter: Age (day) Value: 7
  misc_feature: MA Experiment 20001451 PARAMETER Experiment Name: At_Far-red-induction_P Parameter: Light Value: Far-red vs. White
  misc_feature: MA Experiment 20001451 PARAMETER Experiment Name: At_Far-red-induction_P Parameter: Organism Value: A. thaliana
  misc_feature: MA Experiment 20001451 PARAMETER Experiment Name: At_Far-red-induction_P Parameter: Plant Line Value: Columbia
  misc_feature: MA Experiment 20001451 PARAMETER Experiment Name: At_Far-red-induction_P Parameter: Timepoint (hr) Value: 24
  misc_feature: MA Experiment 20001451 PARAMETER Experiment Name: At_Far-red-induction_P Parameter: Tissue Value: Whole Plant
  misc_feature: MA Experiment ID: 20001905 Result: Up-regulated in Transcription
  misc_feature: MA Experiment 20001905 PARAMETER Experiment Name: At_Drought_Reproduction_P Parameter: Age (day) Value: 40
  misc_feature: MA Experiment 20001905 PARAMETER Experiment Name: At_Drought_Reproduction_P Parameter: Organism Value: A. thaliana
  misc_feature: MA Experiment 20001905 PARAMETER Experiment Name: At_Drought_Reproduction_P Parameter: Plant Line Value: WS
  misc_feature: MA Experiment 20001905 PARAMETER Experiment Name: At_Drought_Reproduction_P Parameter: Timepoint (day) Value: 10
  misc_feature: MA Experiment 20001905 PARAMETER Experiment Name: At_Drought_Reproduction_P Parameter: Tissue Value: Rosettes
  misc_feature: MA Experiment 20001905 PARAMETER Experiment Name: At_Drought_Reproduction_P Parameter: Treatment Value: Drought vs. No Drought
  misc_feature: MA Experiment ID: 20001911 Result: Down-regulated in Transcription
  misc_feature: MA Experiment 20001911 PARAMETER Experiment Name: At_Drought_Reproduction_P Parameter: Age (day) Value: 40
  misc_feature: MA Experiment 20001911 PARAMETER Experiment Name: At_Drought_Reproduction_P Parameter: Organism Value: A. thaliana
  misc_feature: MA Experiment 20001911 PARAMETER Experiment Name: At_Drought_Reproduction_P Parameter: Plant Line Value: WS
  misc_feature: MA Experiment 20001911 PARAMETER Experiment Name: At_Drought_Reproduction_P Parameter: Timepoint (day) Value: 10
  misc_feature: MA Experiment 20001911 PARAMETER Experiment Name: At_Drought_Reproduction_P Parameter: Tissue Value: Flowers
  misc_feature: MA Experiment 20001911 PARAMETER Experiment Name: At_Drought_Reproduction_P Parameter: Treatment Value: Drought vs. No Drought
aggtttcgtgtaacatttcacacacacatttgtcgaaatcttaacaccaaacccaaatcagaaaaatcaaaactttttattttattttatcaaaatggcgcttatgaatggaagcatgaatctatcatcggtcaaatcatcgatgatcaaccaccgtcaaccaaacttctcctccgccgtctccagacccacttctttccggatctccgccgtgcaaaccgacccaaaaacaccagctgcttcatcggcgtcggcggcgacgacgactccggcaacgttgacgaagcccgttggagttaatgtgggtaaaggaaaatgggcaccagagagttggaggacgaagaaagctttacagcaaccggactatccagatttagctgcgcttgaagctgtgctagagacgatcgaagcttttcctccgatcgtgttcgccggagaagctagattgcttgaggaacgattaggacaagcagcgatgggtgaagcgtttctgttacaaggaggagattgtgcagagagtttcaaagagtttaatgcgaataacattcgtgatactttcaggattcttcttcagatgggtgctgtgttgatgttcggaggtcaagtccctgttgttaaggttgggagaatggcgggtcaatttgcgaaaccaagatcggattcgtttgaggagaaagatggagtgaaattgcctagttacagaggagataacattaatggagatgcgtttgattcgaaatctaggattcctgatccacagaggatgattagagcttattgtcaatctgcagctactttgaatcttttgagagcttttgctactggtggttatgctgctatgcagagagttactcaatggaatcttgatttcactgaacgtagtgagcaaggagacaggtaccgtgaactagctaaccgtgttgatgaagcgcttggtttcatgcacgctgctggattaacgctcgatcatcccataatgcaaacaaccgacttctggacttctcatgaatgtttgctcttgccttatgaacaatcactaacaaggcttgactcaacctctggtctctactacgattgttctgcccatatgatttgggtcggtgagcgaaccagacagctagatggtgcccatgtcgagttcttaagaggtgttgctaatcctcttggaatcaaggtgagtgataaaatggatccaaaggagctagtgaagttgattgagatcttgaatgctgacaataagcctggaaggattacaataatcacaagaatgggagctgagaatatgagagtgaagcttcctcatttgatcagagaagtgcgacgtgctggacagattgtgacttgggtcagtgatccaatgcacgggaacaccattaaggctccttgtggtctcaagactcgtccctttgacgccatcttggctgaagtgagagctttcttcgacgtgcacgagcaagaaggtagccaccccggaggaattcacctagaaatgactggtcagaacgtgaccgagtgcatcggtggttcacgcacagtcacattcgacgacttgggttcacgttaccacacgcactgtgatcctcgccttaatgcttcacagtctcttgagctctccttcatcatcgccgaacgtcttagaaagagacgcatcaagtctcaaaaggcttttgccctctaatcaaataaacattggcttataataatatctatctatataaatgtgtgtgtgtgtgaacttaatacaatctcatttatctttgattcaaatcttgagtcaaaagaacgcttaaggtttctgttttaatgttgttagtgagtattatttccattttggatttaatataatcatggatggttgggtttc

SEQ ID NO: 22234 - protein, 527 aa, Arabidopsis thaliana
  peptide (1)..(527): Ceres Seq. ID no. 12562450
  misc_feature (74)..(511): Pfam Name: Class-II DAHP synthetase family Pfam Description: Class-II DAHP synthetase family
  misc_feature (74)..(511): Pfam Name: Class-II DAHP synthetase family Pfam Description: Class-II DAHP synthetase family
  misc_feature (1)..(523): Homolog of NCBI NO: 15236093 NR Description: 2-dehydro-3-deoxyphosphoheptonate aldolase
  misc_feature (31)..(525): Homolog of NCBI NO: 2546988 NR Description: 2-dehydro-3-deoxyphosphoheptonate aldolase
  misc_feature (1)..(521): Homolog of NCBI NO: 34906844 NR Description: putative phospho-2-dehydro-3-deoxyheptonate
  misc_feature (25)..(522): Homolog of NCBI NO: 584778 NR Description: Phospho-2-dehydro-3-deoxyheptonate aldolase 2, precursor (Phospho-2-keto-3-deoxyheptonate aldolase 2) (DAHP
  misc_feature (3)..(522): Homolog of NCBI NO: 584777 NR Description: Phospho-2-dehydro-3-deoxyheptonate aldolase 1, precursor (Phospho-2-keto-3-deoxyheptonate aldolase 1) (DAHP
  misc_feature (31)..(525): Homolog of NCBI NO: 2546988 NR Description: 2-dehydro-3-deoxyphosphoheptonate aldolase
  misc_feature (25)..(522): Homolog of NCBI NO: 584778 NR Description: Phospho-2-dehydro-3-deoxyheptonate aldolase 2, precursor (Phospho-2-keto-3-deoxyheptonate aldolase 2) (DAHP
  misc_feature (1)..(527): Homolog of NCBI NO: 15219878 NR Description: 3-deoxy-D-arabino-heptulosonate 7-phosphate,
  misc_feature (1)..(526): Homolog of NCBI NO: 2398679 NR Description: 3-deoxy-D-arabino-heptulosonate 7-phosphate
  misc_feature (1)..(523): Homolog of NCBI NO: 7488957 NR Description: probable 2-dehydro-3-deoxy-phosphoheptonate
  misc_feature (24)..(522): Homolog of NCBI NO: 114193 NR Description: Phospho-2-dehydro-3-deoxyheptonate aldolase 1, precursor (Phospho-2-keto-3-deoxyheptonate aldolase 1) (DAHP
  misc_feature (3)..(525): Homolog of NCBI NO: 24745903 NR Description: 3-deoxy-D-arabino-heptulosonate 7-phosphate
  misc_feature (3)..(522): Homolog of NCBI NO: 584777 NR Description: Phospho-2-dehydro-3-deoxyheptonate aldolase 1, precursor (Phospho-2-keto-3-deoxyheptonate aldolase 1) (DAHP
  misc_feature (1)..(521): Homolog of NCBI NO: 34906844 NR Description: putative phospho-2-dehydro-3-deoxyheptonate
  misc_feature (1)..(523): Homolog of NCBI NO: 15236093 NR Description: 2-dehydro-3-deoxyphosphoheptonate aldolase
  misc_feature (3)..(525): Homolog of NCBI NO: 24745903 NR Description: 3-deoxy-D-arabino-heptulosonate 7-phosphate
  misc_feature (24)..(522): Homolog of NCBI NO: 114193 NR Description: Phospho-2-dehydro-3-deoxyheptonate aldolase 1, precursor (Phospho-2-keto-3-deoxyheptonate aldolase 1) (DAHP
  misc_feature (1)..(523): Homolog of NCBI NO: 7488957 NR Description: probable 2-dehydro-3-deoxy-phosphoheptonate
  misc_feature (1)..(526): Homolog of NCBI NO: 2398679 NR Description: 3-deoxy-D-arabino-heptulosonate 7-phosphate
  misc_feature (1)..(527): Homolog of NCBI NO: 15219878 NR Description: 3-deoxy-D-arabino-heptulosonate 7-phosphate,
MALMNGSMNLSSVKSSMINHRQPNFSSAVSRPTSFRISAVQTDPKTPAASSASAATTTPATLTKPVGVNVGKGKWAPESWRTKKALQQPDYPDLAALEAVLETIEAFPPIVFAGEARLLEERLGQAAMGEAFLLQGGDCAESFKEFNANNIRDTFRILLQMGAVLMFGGQVPVVKVGRMAGQFAKPRSDSFEEKDGVKLPSYRGDNINGDAFDSKSRIPDPQRMIRAYCQSAATLNLLRAFATGGYAAMQRVTQWNLDFTERSEQGDRYRELANRVDEALGFMHAAGLTLDHPIMQTTDFWTSHECLLLPYEQSLTRLDSTSGLYYDCSAHMIWVGERTRQLDGAHVEFLRGVANPLGIKVSDKMDPKELVKLIEILNADNKPGRITIITRMGAENMRVKLPHLIREVRRAGQIVTWVSDPMHGNTIKAPCGLKTRPFDAILAEVRAFFDVHEQEGSHPGGIHLEMTGQNVTECIGGSRTVTFDDLGSRYHTHCDPRLNASQSLELSFIIAERLRKRRIKSQKAFAL

SEQ ID NO: 22235 - protein, 524 aa, Arabidopsis thaliana
  peptide (1)..(524): Ceres Seq. ID no. 12562451
  misc_feature (71)..(508): Pfam Name: Class-II DAHP synthetase family Pfam Description: Class-II DAHP synthetase family
  misc_feature (71)..(508): Pfam Name: Class-II DAHP synthetase family Pfam Description: Class-II DAHP synthetase family
  misc_feature (1)..(520): Homolog of NCBI NO: 15236093 NR Description: 2-dehydro-3-deoxyphosphoheptonate aldolase
  misc_feature (28)..(522): Homolog of NCBI NO: 2546988 NR Description: 2-dehydro-3-deoxyphosphoheptonate aldolase
  misc_feature (1)..(518): Homolog of NCBI NO: 34906844 NR Description: putative phospho-2-dehydro-3-deoxyheptonate
  misc_feature (22)..(519): Homolog of NCBI NO: 584778 NR Description: Phospho-2-dehydro-3-deoxyheptonate aldolase 2, precursor (Phospho-2-keto-3-deoxyheptonate aldolase 2) (DAHP
  misc_feature (1)..(519): Homolog of NCBI NO: 584777 NR Description: Phospho-2-dehydro-3-deoxyheptonate aldolase 1, precursor (Phospho-2-keto-3-deoxyheptonate aldolase 1) (DAHP
  misc_feature (1)..(520): Homolog of NCBI NO: 15236093 NR Description: 2-dehydro-3-deoxyphosphoheptonate aldolase
  misc_feature (1)..(518): Homolog of NCBI NO: 34906844 NR Description: putative phospho-2-dehydro-3-deoxyheptonate
  misc_feature (1)..(519): Homolog of NCBI NO: 584777 NR Description: Phospho-2-dehydro-3-deoxyheptonate aldolase 1, precursor (Phospho-2-keto-3-deoxyheptonate aldolase 1) (DAHP
  misc_feature (1)..(524): Homolog of NCBI NO: 15219878 NR Description: 3-deoxy-D-arabino-heptulosonate 7-phosphate,
  misc_feature (1)..(523): Homolog of NCBI NO: 2398679 NR Description: 3-deoxy-D-arabino-heptulosonate 7-phosphate
  misc_feature (1)..(520): Homolog of NCBI NO: 7488957 NR Description: probable 2-dehydro-3-deoxy-phosphoheptonate
  misc_feature (21)..(519): Homolog of NCBI NO: 114193 NR Description: Phospho-2-dehydro-3-deoxyheptonate aldolase 1, precursor (Phospho-2-keto-3-deoxyheptonate aldolase 1) (DAHP
  misc_feature (1)..(522): Homolog of NCBI NO: 24745903 NR Description: 3-deoxy-D-arabino-heptulosonate 7-phosphate
  misc_feature (22)..(519): Homolog of NCBI NO: 584778 NR Description: Phospho-2-dehydro-3-deoxyheptonate aldolase 2, precursor (Phospho-2-keto-3-deoxyheptonate aldolase 2) (DAHP
  misc_feature (28)..(522): Homolog of NCBI NO: 2546988 NR Description: 2-dehydro-3-deoxyphosphoheptonate aldolase
  misc_feature (1)..(522): Homolog of NCBI NO: 24745903 NR Description: 3-deoxy-D-arabino-heptulosonate 7-phosphate
  misc_feature (21)..(519): Homolog of NCBI NO: 114193 NR Description: Phospho-2-dehydro-3-deoxyheptonate aldolase 1, precursor (Phospho-2-keto-3-deoxyheptonate aldolase 1) (DAHP
  misc_feature (1)..(520): Homolog of NCBI NO: 7488957 NR Description: probable 2-dehydro-3-deoxy-phosphoheptonate
  misc_feature (1)..(523): Homolog of NCBI NO: 2398679 NR Description: 3-deoxy-D-arabino-heptulosonate 7-phosphate
  misc_feature (1)..(524): Homolog of NCBI NO: 15219878 NR Description: 3-deoxy-D-arabino-heptulosonate 7-phosphate,
MNGSMNLSSVKSSMINHRQPNFSSAVSRPTSFRISAVQTDPKTPAASSASAATTTPATLTKPVGVNVGKGKWAPESWRTKKALQQPDYPDLAALEAVLETIEAFPPIVFAGEARLLEERLGQAAMGEAFLLQGGDCAESFKEFNANNIRDTFRILLQMGAVLMFGGQVPVVKVGRMAGQFAKPRSDSFEEKDGVKLPSYRGDNINGDAFDSKSRIPDPQRMIRAYCQSAATLNLLRAFATGGYAAMQRVTQWNLDFTERSEQGDRYRELANRVDEALGFMHAAGLTLDHPIMQTTDFWTSHECLLLPYEQSLTRLDSTSGLYYDCSAHMIWVGERTRQLDGAHVEFLRGVANPLGIKVSDKMDPKELVKLIEILNADNKPGRITIITRMGAENMRVKLPHLIREVRRAGQIVTWVSDPMHGNTIKAPCGLKTRPFDAILAEVRAFFDVHEQEGSHPGGIHLEMTGQNVTECIGGSRTVTFDDLGSRYHTHCDPRLNASQSLELSFIIAERLRKRRIKSQKAFAL

SEQ ID NO: 22236 - protein, 520 aa, Arabidopsis thaliana
  peptide (1)..(520): Ceres Seq. ID no. 12562452
  misc_feature (67)..(504): Pfam Name: Class-II DAHP synthetase family Pfam Description: Class-II DAHP synthetase family
  misc_feature (67)..(504): Pfam Name: Class-II DAHP synthetase family Pfam Description: Class-II DAHP synthetase family
  misc_feature (1)..(516): Homolog of NCBI NO: 15236093 NR Description: 2-dehydro-3-deoxyphosphoheptonate aldolase
  misc_feature (24)..(518): Homolog of NCBI NO: 2546988 NR Description: 2-dehydro-3-deoxyphosphoheptonate aldolase
  misc_feature (1)..(514): Homolog of NCBI NO: 34906844 NR Description: putative phospho-2-dehydro-3-deoxyheptonate
  misc_feature (18)..(515): Homolog of NCBI NO: 584778 NR Description: Phospho-2-dehydro-3-deoxyheptonate aldolase 2, precursor (Phospho-2-keto-3-deoxyheptonate aldolase 2) (DAHP
  misc_feature (1)..(515): Homolog of NCBI NO: 584777 NR Description: Phospho-2-dehydro-3-deoxyheptonate aldolase 1, precursor (Phospho-2-keto-3-deoxyheptonate aldolase 1) (DAHP
  misc_feature (1)..(516): Homolog of NCBI NO: 15236093 NR Description: 2-dehydro-3-deoxyphosphoheptonate aldolase
  misc_feature (1)..(514): Homolog of NCBI NO: 34906844 NR Description: putative phospho-2-dehydro-3-deoxyheptonate
  misc_feature (1)..(515): Homolog of NCBI NO: 584777 NR Description: Phospho-2-dehydro-3-deoxyheptonate aldolase 1, precursor (Phospho-2-keto-3-deoxyheptonate aldolase 1) (DAHP
  misc_feature (1)..(520): Homolog of NCBI NO: 15219878 NR Description: 3-deoxy-D-arabino-heptulosonate 7-phosphate,
  misc_feature (1)..(519): Homolog of NCBI NO: 2398679 NR Description: 3-deoxy-D-arabino-heptulosonate 7-phosphate
  misc_feature (1)..(516): Homolog of NCBI NO: 7488957 NR Description: probable 2-dehydro-3-deoxy-phosphoheptonate
  misc_feature (17)..(515): Homolog of NCBI NO: 114193 NR Description: Phospho-2-dehydro-3-deoxyheptonate aldolase 1, precursor (Phospho-2-keto-3-deoxyheptonate aldolase 1) (DAHP
  misc_feature (1)..(518): Homolog of NCBI NO: 24745903 NR Description: 3-deoxy-D-arabino-heptulosonate 7-phosphate
  misc_feature (18)..(515): Homolog of NCBI NO: 584778 NR Description: Phospho-2-dehydro-3-deoxyheptonate aldolase 2, precursor (Phospho-2-keto-3-deoxyheptonate aldolase 2) (DAHP
  misc_feature (24)..(518): Homolog of NCBI NO: 2546988 NR Description: 2-dehydro-3-deoxyphosphoheptonate aldolase
  misc_feature (1)..(518): Homolog of NCBI NO: 24745903 NR Description: 3-deoxy-D-arabino-heptulosonate 7-phosphate
  misc_feature (17)..(515): Homolog of NCBI NO: 114193 NR Description: Phospho-2-dehydro-3-deoxyheptonate aldolase 1, precursor (Phospho-2-keto-3-deoxyheptonate aldolase 1) (DAHP
  misc_feature (1)..(516): Homolog of NCBI NO: 7488957 NR Description: probable 2-dehydro-3-deoxy-phosphoheptonate
  misc_feature (1)..(519): Homolog of NCBI NO: 2398679 NR Description: 3-deoxy-D-arabino-heptulosonate 7-phosphate
  misc_feature (1)..(520): Homolog of NCBI NO: 15219878 NR Description: 3-deoxy-D-arabino-heptulosonate 7-phosphate,
MNLSSVKSSMINHRQPNFSSAVSRPTSFRISAVQTDPKTPAASSASAATTTPATLTKPVGVNVGKGKWAPESWRTKKALQQPDYPDLAALEAVLETIEAFPPIVFAGEARLLEERLGQAAMGEAFLLQGGDCAESFKEFNANNIRDTFRILLQMGAVLMFGGQVPVVKVGRMAGQFAKPRSDSFEEKDGVKLPSYRGDNINGDAFDSKSRIPDPQRMIRAYCQSAATLNLLRAFATGGYAAMQRVTQWNLDFTERSEQGDRYRELANRVDEALGFMHAAGLTLDHPIMQTTDFWTSHECLLLPYEQSLTRLDSTSGLYYDCSAHMIWVGERTRQLDGAHVEFLRGVANPLGIKVSDKMDPKELVKLIEILNADNKPGRITIITRMGAENMRVKLPHLIREVRRAGQIVTWVSDPMHGNTIKAPCGLKTRPFDAILAEVRAFFDVHEQEGSHPGGIHLEMTGQNVTECIGGSRTVTFDDLGSRYHTHCDPRLNASQSLELSFIIAERLRKRRIKSQKAFAL

SEQ ID NO: 22237 - DNA, 684 bp, Arabidopsis thaliana
  misc_feature (1)..(684): Ceres Seq. ID no. 12393289
  misc_feature: MA Experiment ID: 108434 Result: Up-regulated in Transcription
  misc_feature: MA Experiment 108434 PARAMETER Experiment Name: At_Root_Tips_cDNA_P Parameter: Tissue Value: Root Tips
  misc_feature: MA Experiment ID: 108462 Result: Up-regulated in Transcription
  misc_feature: MA Experiment 108462 PARAMETER Experiment Name: At_Germinating_Seeds_cDNA_P Parameter: Age (day) Value: 2 vs. 0
  misc_feature: MA Experiment 108462 PARAMETER Experiment Name: At_Germinating_Seeds_cDNA_P Parameter: Tissue Value: Germinating Seeds
  misc_feature: MA Experiment ID: 108488 Result: Down-regulated in Transcription
  misc_feature: MA Experiment ID: 108573 Result: Down-regulated in Transcription
  misc_feature: MA Experiment 108573 PARAMETER Experiment Name: At_Drought_cDNA_P Parameter: Timepoint (hr) Value: 6
  misc_feature: MA Experiment 108573 PARAMETER Experiment Name: At_Drought_cDNA_P Parameter: Tissue Value: Aerial
  misc_feature: MA Experiment 108573 PARAMETER Experiment Name: At_Drought_cDNA_P Parameter: Treatment Value: Drought vs. No Drought
  misc_feature: MA Experiment ID: 108577 Result: Down-regulated in Transcription
  misc_feature: MA Experiment 108577 PARAMETER Experiment Name: At_42deg_Heat_cDNA_P Parameter: Temperature (deg C) Value: 42 vs. 22
  misc_feature: MA Experiment 108577 PARAMETER Experiment Name: At_42deg_Heat_cDNA_P Parameter: Timepoint (hr) Value: 6
  misc_feature: MA Experiment 108577 PARAMETER Experiment Name: At_42deg_Heat_cDNA_P Parameter: Tissue Value: Aerial
  misc_feature: MA Experiment ID: 20000111 Result: Down-regulated in Transcription
  misc_feature: MA Experiment 20000111 PARAMETER Experiment Name: At_42deg_Heat_cDNA_P Parameter: Temperature (deg C) Value: 42 vs. 22
  misc_feature: MA Experiment 20000111 PARAMETER Experiment Name: At_42deg_Heat_cDNA_P Parameter: Timepoint (hr) Value: 6
  misc_feature: MA Experiment 20000111 PARAMETER Experiment Name: At_42deg_Heat_cDNA_P Parameter: Tissue Value: Aerial
  misc_feature: MA Experiment ID: 20000112 Result: Down-regulated in Transcription
  misc_feature: MA Experiment 20000112 PARAMETER Experiment Name: At_42deg_Heat_cDNA_P Parameter: Temperature (deg C) Value: 42 vs. 22
  misc_feature: MA Experiment 20000112 PARAMETER Experiment Name: At_42deg_Heat_cDNA_P Parameter: Timepoint (hr) Value: 2
  misc_feature: MA Experiment 20000112 PARAMETER Experiment Name: At_42deg_Heat_cDNA_P Parameter: Tissue Value: Aerial
  misc_feature: MA Experiment ID: 20000113 Result: Down-regulated in Transcription
  misc_feature: MA Experiment 20000113 PARAMETER Experiment Name: At_42deg_Heat_cDNA_P Parameter: Temperature (deg C) Value: 42 vs. 22
  misc_feature: MA Experiment 20000113 PARAMETER Experiment Name: At_42deg_Heat_cDNA_P Parameter: Timepoint (hr) Value: 8
  misc_feature: MA Experiment 20000113 PARAMETER Experiment Name: At_42deg_Heat_cDNA_P Parameter: Tissue Value: Aerial
  misc_feature: MA Experiment ID: 20000144 Result: Down-regulated in Transcription
  misc_feature: MA Experiment 20000144 PARAMETER Experiment Name: At_42deg_Heat_cDNA_P Parameter: Temperature (deg C) Value: 42 vs. 22
  misc_feature: MA Experiment 20000144 PARAMETER Experiment Name: At_42deg_Heat_cDNA_P Parameter: Timepoint (hr) Value: 1
  misc_feature: MA Experiment 20000144 PARAMETER Experiment Name: At_42deg_Heat_cDNA_P Parameter: Tissue Value: Aerial
agatatcaaaatcactcagatctgtgcttcttcttcttcacccagaaaagtaaaacaaaagtcaaaacaatggcgccgagagcagagaagaagcccgcggagaagaaaccagccgccgagaaaccagtagaggagaaatcaaaagccgagaaagctccggcggagaagaaaccaaaagccggcaagaaactcccgaaggaagccggggccggcggcgataagaagaagaagatgaagaagaagagtgtggaaacttacaagatctacatcttcaaggttctgaaacaagttcatccagatattggtatttcaagcaaggctatgggtattatgaacagtttcatcaacgacatcttcgagaaattggcatcggaatcttcaaagctcgctaggtataacaagaagccgacgattacttctcgggagattcagactgctgttagactcgttcttcctggtgagctcgctaaacacgctgtttctgaaggaaccaaggctgttaccaaattcacaagctcttgaattagtaaattagggtttgtatactctgaatttgattctgatgttgtcataacttgtgttaggatttctctttcgttttattaagctttaattatcattctccgttgtaaagtaatcttatgaatctgtcttcgaatcaaaagttctggttgttaatggctc

SEQ ID NO: 22238 - protein, 173 aa, Arabidopsis thaliana
  peptide (1)..(173): Ceres Seq. ID no. 12393290
  misc_feature (33)..(172): Pfam Name: Core histone H2A/H2B/H3/H4 Pfam Description: Core histone H2A/H2B/H3/H4
  misc_feature (24)..(173): Homolog of NCBI NO: 7387727 NR Description: Histone H2B (CaH2B)
  misc_feature (24)..(173): Homolog of NCBI NO: 7387729 NR Description: Histone H2B
  misc_feature (24)..(173): Homolog of NCBI NO: 7387726 NR Description: Histone H2B
  misc_feature (24)..(173): Homolog of NCBI NO: 15226943 NR Description: putative histone H2B
  misc_feature (24)..(173): Homolog of NCBI NO: 15223016 NR Description: histone H2B
  misc_feature (24)..(173): Homolog of NCBI NO: 21617908 NR Description: histone H2B [Arabidopsis thaliana]
  misc_feature (24)..(173): Homolog of NCBI NO: 15231313 NR Description: histone H2B -like protein
  misc_feature (24)..(173): Homolog of NCBI NO: 21554180 NR Description: histone H2B-like protein [Arabidopsis thaliana]
  misc_feature (24)..(173): Homolog of NCBI NO: 15238563 NR Description: histone H2B - like protein
  misc_feature (24)..(173): Homolog of NCBI NO: 15231304 NR Description: histone H2B; protein id: At3g45980.1, supported
RYQNHSDLCFFFFTQKSKTKVKTMAPRAEKKPAEKKPAAEKPVEEKSKAEKAPAEKKPKAGKKLPKEAGAGGDKKKKMKKKSVETYKIYIFKVLKQVHPDIGISSKAMGIMNSFINDIFEKLASESSKLARYNKKPTITSREIQTAVRLVLPGELAKHAVSEGTKAVTKFTSS

SEQ ID NO: 22239 - protein, 150 aa, Arabidopsis thaliana
  peptide (1)..(150): Ceres Seq. ID no. 12393291
  misc_feature (10)..(149): Pfam Name: Core histone H2A/H2B/H3/H4 Pfam Description: Core histone H2A/H2B/H3/H4
  misc_feature (1)..(150): Homolog of NCBI NO: 7387727 NR Description: Histone H2B (CaH2B)
  misc_feature (1)..(150): Homolog of NCBI NO: 7387729 NR Description: Histone H2B
  misc_feature (1)..(150): Homolog of NCBI NO: 7387726 NR Description: Histone H2B
  misc_feature (1)..(150): Homolog of NCBI NO: 15226943 NR Description: putative histone H2B
  misc_feature (1)..(150): Homolog of NCBI NO: 15223016 NR Description: histone H2B
  misc_feature (1)..(150): Homolog of NCBI NO: 21617908 NR Description: histone H2B [Arabidopsis thaliana]
  misc_feature (1)..(150): Homolog of NCBI NO: 15231313 NR Description: histone H2B -like protein
  misc_feature (1)..(150): Homolog of NCBI NO: 21554180 NR Description: histone H2B-like protein [Arabidopsis thaliana]
  misc_feature (1)..(150): Homolog of NCBI NO: 15238563 NR Description: histone H2B - like protein
  misc_feature (1)..(150): Homolog of NCBI NO: 15231304 NR Description: histone H2B; protein id: At3g45980.1, supported
MAPRAEKKPAEKKPAAEKPVEEKSKAEKAPAEKKPKAGKKLPKEAGAGGDKKKKMKKKSVETYKIYIFKVLKQVHPDIGISSKAMGIMNSFINDIFEKLASESSKLARYNKKPTITSREIQTAVRLVLPGELAKHAVSEGTKAVTKFTSS

SEQ ID NO: 22240 - protein, 96 aa, Arabidopsis thaliana; identical to SEQ ID NO: 21276
  peptide (1)..(96): Ceres Seq. ID no. 12393292
  misc_feature (1)..(95): Pfam Name: Core histone H2A/H2B/H3/H4 Pfam Description: Core histone H2A/H2B/H3/H4
  misc_feature (1)..(96): Homolog of NCBI NO: 7387727 NR Description: Histone H2B (CaH2B)
  misc_feature (1)..(96): Homolog of NCBI NO: 7387729 NR Description: Histone H2B
  misc_feature (1)..(96): Homolog of NCBI NO: 7387726 NR Description: Histone H2B
  misc_feature (1)..(96): Homolog of NCBI NO: 15226943 NR Description: putative histone H2B
  misc_feature (1)..(96): Homolog of NCBI NO: 15223016 NR Description: histone H2B
  misc_feature (1)..(96): Homolog of NCBI NO: 21617908 NR Description: histone H2B [Arabidopsis thaliana]
  misc_feature (1)..(96): Homolog of NCBI NO: 15231313 NR Description: histone H2B -like protein
  misc_feature (1)..(96): Homolog of NCBI NO: 21554180 NR Description: histone H2B-like protein [Arabidopsis thaliana]
  misc_feature (1)..(96): Homolog of NCBI NO: 15238563 NR Description: histone H2B - like protein
  misc_feature (1)..(96): Homolog of NCBI NO: 15231304 NR Description: histone H2B; protein id: At3g45980.1, supported

SEQ ID NO: 22241 - DNA, 1046 bp, Arabidopsis thaliana
  misc_feature (1)..(1046): Ceres Seq. ID no. 12332375
  misc_feature: MA Experiment ID: 108433 Result: Up-regulated in Transcription
  misc_feature: MA Experiment 108433 PARAMETER Experiment Name: At_rhl_Mutant2_cDNA_P Parameter: Age (day) Value: 7
  misc_feature: MA Experiment 108433 PARAMETER Experiment Name: At_rhl_Mutant2_cDNA_P Parameter: Organism Value: A. thaliana
  misc_feature: MA Experiment 108433 PARAMETER Experiment Name: At_rhl_Mutant2_cDNA_P Parameter: Plant Line Value: rhl Mutant vs. wt landsburg
  misc_feature: MA Experiment 108433 PARAMETER Experiment Name: At_rhl_Mutant2_cDNA_P Parameter: Tissue Value: Roots
  misc_feature: MA Experiment ID: 108461 Result: Up-regulated in Transcription
  misc_feature: MA Experiment 108461 PARAMETER Experiment Name: At_Germinating_Seeds_cDNA_P Parameter: Age (day) Value: 1 vs. 0
  misc_feature: MA Experiment 108461 PARAMETER Experiment Name: At_Germinating_Seeds_cDNA_P Parameter: Tissue Value: Germinating Seeds
  misc_feature: MA Experiment ID: 108462 Result: Up-regulated in Transcription
  misc_feature: MA Experiment 108462 PARAMETER Experiment Name: At_Germinating_Seeds_cDNA_P Parameter: Age (day) Value: 2 vs. 0
  misc_feature: MA Experiment 108462 PARAMETER Experiment Name: At_Germinating_Seeds_cDNA_P Parameter: Tissue Value: Germinating Seeds
  misc_feature: MA Experiment ID: 108463 Result: Up-regulated in Transcription
  misc_feature: MA Experiment 108463 PARAMETER Experiment Name: At_Germinating_Seeds_cDNA_P Parameter: Age (day) Value: 3 vs. 0
  misc_feature: MA Experiment 108463 PARAMETER Experiment Name: At_Germinating_Seeds_cDNA_P Parameter: Tissue Value: Germinating Seeds
  misc_feature: MA Experiment ID: 108464 Result: Up-regulated in Transcription
  misc_feature: MA Experiment 108464 PARAMETER Experiment Name: At_Germinating_Seeds_cDNA_P Parameter: Age (day) Value: 4 vs. 0
  misc_feature: MA Experiment 108464 PARAMETER Experiment Name: At_Germinating_Seeds_cDNA_P Parameter: Tissue Value: Germinating Seeds
  misc_feature: MA Experiment ID: 108474 Result: Up-regulated in Transcription
  misc_feature: MA Experiment 108474 PARAMETER Experiment Name: At_Drought_Flowers_cDNA_P Parameter: Timepoint (hr) Value: null
  misc_feature: MA Experiment 108474 PARAMETER Experiment Name: At_Drought_Flowers_cDNA_P Parameter: Treatment Value: Drought vs. No Drought
  misc_feature: MA Experiment ID: 108501 Result: Up-regulated in Transcription
  misc_feature: MA Experiment 108501 PARAMETER Experiment Name: At_ap2_floral_buds_cDNA_P Parameter: Plant Line Value: ap2 (Ler.)
  misc_feature: MA Experiment 108501 PARAMETER Experiment Name: At_ap2_floral_buds_cDNA_P Parameter: Tissue Value: Closed Flower
  misc_feature: MA Experiment ID: 108573 Result: Up-regulated in Transcription
  misc_feature: MA Experiment 108573 PARAMETER Experiment Name: At_Drought_cDNA_P Parameter: Timepoint (hr) Value: 6
  misc_feature: MA Experiment 108573 PARAMETER Experiment Name: At_Drought_cDNA_P Parameter: Tissue Value: Aerial
  misc_feature: MA Experiment 108573 PARAMETER Experiment Name: At_Drought_cDNA_P Parameter: Treatment Value: Drought vs. No Drought
  misc_feature: MA Experiment ID: 108595 Result: Down-regulated in Transcription
  misc_feature: MA Experiment 108595 PARAMETER Experiment Name: At_Ler-pi_Ovule_cDNA_P Parameter: Plant Line Value: null
  misc_feature: MA Experiment ID: 20000068 Result: Up-regulated in Transcription
  misc_feature: MA Experiment ID: 20000070 Result: Down-regulated in Transcription
  misc_feature: MA Experiment 20000070 PARAMETER Experiment Name: At_100uM_ABA_Mutants_cDNA_P Parameter: Plant Line Value: CS24
  misc_feature: MA Experiment 20000070 PARAMETER Experiment Name: At_100uM_ABA_Mutants_cDNA_P Parameter: Timepoint (hr) Value: 6
  misc_feature: MA Experiment 20000070 PARAMETER Experiment Name: At_100uM_ABA_Mutants_cDNA_P Parameter: Tissue Value: Aerial
  misc_feature: MA Experiment 20000070 PARAMETER Experiment Name: At_100uM_ABA_Mutants_cDNA_P Parameter: Treatment Value: 100uM ABA vs. No Treatment
  misc_feature: MA Experiment ID: 20000088 Result: Down-regulated in Transcription
  misc_feature: MA Experiment 20000088 PARAMETER Experiment Name: At_100uM_ABA_Mutants_cDNA_P Parameter: Plant Line Value: Landsberg
  misc_feature: MA Experiment 20000088 PARAMETER Experiment Name: At_100uM_ABA_Mutants_cDNA_P Parameter: Timepoint (hr) Value: 6
  misc_feature: MA Experiment 20000088 PARAMETER Experiment Name: At_100uM_ABA_Mutants_cDNA_P Parameter: Tissue Value: Aerial
  misc_feature: MA Experiment 20000088 PARAMETER Experiment Name: At_100uM_ABA_Mutants_cDNA_P Parameter: Treatment Value: 100uM ABA vs. No Treatment
  misc_feature: MA Experiment ID: 20000113 Result: Up-regulated in Transcription
  misc_feature: MA Experiment 20000113 PARAMETER Experiment Name: At_42deg_Heat_cDNA_P Parameter: Temperature (deg C) Value: 42 vs. 22
  misc_feature: MA Experiment 20000113 PARAMETER Experiment Name: At_42deg_Heat_cDNA_P Parameter: Timepoint (hr) Value: 8
  misc_feature: MA Experiment 20000113 PARAMETER Experiment Name: At_42deg_Heat_cDNA_P Parameter: Tissue Value: Aerial
  misc_feature: MA Experiment ID: 20000117 Result: Down-regulated in Transcription
  misc_feature: MA Experiment 20000117 PARAMETER Experiment Name: At_100uM_ABA_Mutants_cDNA_P Parameter: Plant Line Value: Columbia
  misc_feature: MA Experiment 20000117 PARAMETER Experiment Name: At_100uM_ABA_Mutants_cDNA_P Parameter: Timepoint (hr) Value: 6
  misc_feature: MA Experiment 20000117 PARAMETER Experiment Name: At_100uM_ABA_Mutants_cDNA_P Parameter: Tissue Value: Aerial
  misc_feature: MA Experiment 20000117 PARAMETER Experiment Name: At_100uM_ABA_Mutants_cDNA_P Parameter: Treatment Value: 100uM ABA vs. No Treatment
  misc_feature: MA Experiment ID: 20000184 Result: Up-regulated in Transcription
  misc_feature: MA Experiment 20000184 PARAMETER Experiment Name: At_Shoots__P Parameter: Age (day) Value: 7
  misc_feature: MA Experiment 20000184 PARAMETER Experiment Name: At_Shoots__P Parameter: Tissue Value: Shoots vs. Whole Plant
  misc_feature: MA Experiment ID: 20000185 Result: Up-regulated in Transcription
  misc_feature: MA Experiment 20000185 PARAMETER Experiment Name: At_Roots__P Parameter: Age (day) Value: 7 vs. 21
  misc_feature: MA Experiment 20000185 PARAMETER Experiment Name: At_Roots__P Parameter: Organism Value: A. thaliana
  misc_feature: MA Experiment 20000185 PARAMETER Experiment Name: At_Roots__P Parameter: Tissue Value: Roots vs. Whole Plant
  misc_feature: MA Experiment ID: 20000224 Result: Down-regulated in Transcription
  misc_feature: MA Experiment ID: 20000234 Result: Up-regulated in Transcription
  misc_feature: MA Experiment 20000234 PARAMETER Experiment Name: At_Siliques_P Parameter: Age (day) Value: 21
  misc_feature: MA Experiment 20000234 PARAMETER Experiment Name: At_Siliques_P Parameter: Organism Value: A. thaliana
  misc_feature: MA Experiment 20000234 PARAMETER Experiment Name: At_Siliques_P Parameter: Plant Line Value: WS
  misc_feature: MA Experiment 20000234 PARAMETER Experiment Name: At_Siliques_P Parameter: Tissue Value: Less Than 5mm Siliques vs. Whole Plant
  misc_feature: MA Experiment ID: 20000235 Result: Up-regulated in Transcription
  misc_feature: MA Experiment 20000235 PARAMETER Experiment Name: At_Siliques_P Parameter: Age (day) Value: 21
  misc_feature: MA Experiment 20000235 PARAMETER Experiment Name: At_Siliques_P Parameter: Organism Value: A. thaliana
  misc_feature: MA Experiment 20000235 PARAMETER Experiment Name: At_Siliques_P Parameter: Plant Line Value: WS
  misc_feature: MA Experiment 20000235 PARAMETER Experiment Name: At_Siliques_P Parameter: Tissue Value: 5-10mm Siliques vs. Whole Plant
  misc_feature: MA Experiment ID: 20000264 Result: Up-regulated in Transcription
  misc_feature: MA Experiment 20000264 PARAMETER Experiment Name: At_Open_Flower_P Parameter: Age (day) Value: 21
  misc_feature: MA Experiment 20000264 PARAMETER Experiment Name: At_Open_Flower_P Parameter: Plant Line Value: WS
  misc_feature: MA Experiment 20000264 PARAMETER Experiment Name: At_Open_Flower_P Parameter: Tissue Value: Open Flower vs. Whole Plant
  misc_feature: MA Experiment ID: 20000265 Result: Up-regulated in Transcription
  misc_feature: MA Experiment 20000265 PARAMETER Experiment Name: At_Open_Flower_P Parameter: Age (day) Value: 21
  misc_feature: MA Experiment 20000265 PARAMETER Experiment Name: At_Open_Flower_P Parameter: Plant Line Value: WS
  misc_feature: MA Experiment 20000265 PARAMETER Experiment Name: At_Open_Flower_P Parameter: Tissue Value: Closed Flower vs. Whole Plant
  misc_feature: MA Experiment ID: 20000286 Result: Up-regulated in Transcription
  misc_feature: MA Experiment 20000286 PARAMETER Experiment Name: At_Open_Flower_P Parameter: Age (day) Value: 21
  misc_feature: MA Experiment 20000286 PARAMETER Experiment Name: At_Open_Flower_P Parameter: Plant Line Value: WS
  misc_feature: MA Experiment 20000286 PARAMETER Experiment Name: At_Open_Flower_P Parameter: Tissue Value: Half Open vs. Whole Plant
  misc_feature: MA Experiment ID: 20000438 Result: Up-regulated in Transcription
  misc_feature: MA Experiment 20000438 PARAMETER Experiment Name: At_Shoots__P Parameter: Age (day) Value: 14
  misc_feature: MA Experiment 20000438 PARAMETER Experiment Name: At_Shoots__P Parameter: Tissue Value: Shoots vs. Whole Plant
  misc_feature: MA Experiment ID: 20000439 Result: Up-regulated in Transcription
  misc_feature: MA Experiment 20000439 PARAMETER Experiment Name: At_Roots__P Parameter: Age (day) Value: 14 vs. 21
  misc_feature: MA Experiment 20000439 PARAMETER Experiment Name: At_Roots__P Parameter: Organism Value: A. thaliana
  misc_feature: MA Experiment 20000439 PARAMETER Experiment Name: At_Roots__P Parameter: Tissue Value: Roots vs. Whole Plant
  misc_feature: MA Experiment ID: 20000441 Result: Up-regulated in Transcription
  misc_feature: MA Experiment 20000441 PARAMETER Experiment Name: At_1uM_BR-BRZ__P Parameter: Tissue Value: Shoot Apices
  misc_feature: MA Experiment 20000441 PARAMETER Experiment Name: At_1uM_BR-BRZ__P Parameter: Treatment Value: 1uM BR vs. No Treatment
  misc_feature: MA Experiment ID: 20000443 Result: Up-regulated in Transcription
  misc_feature: MA Experiment 20000443 PARAMETER Experiment Name: At_1uM_BR-BRZ__P Parameter: Tissue Value: Shoot Apices
  misc_feature: MA Experiment 20000443 PARAMETER Experiment Name: At_1uM_BR-BRZ__P Parameter: Treatment Value: 1uM BRZ vs. No Treatment
  misc_feature: MA Experiment ID: 20000460 Result: Down-regulated in Transcription
  misc_feature: MA Experiment 20000460 PARAMETER Experiment Name: At_10percent_PEG_P Parameter: Age (day) Value: 12
  misc_feature: MA Experiment 20000460 PARAMETER Experiment Name: At_10percent_PEG_P Parameter: Organism Value: A. thaliana
  misc_feature: MA Experiment 20000460 PARAMETER Experiment Name: At_10percent_PEG_P Parameter: Plant Line Value: WS
  misc_feature: MA Experiment 20000460 PARAMETER Experiment Name: At_10percent_PEG_P Parameter: Timepoint (day) Value: 12
  misc_feature: MA Experiment 20000460 PARAMETER Experiment Name: At_10percent_PEG_P Parameter: Tissue Value: Whole Plant
  misc_feature: MA Experiment 20000460 PARAMETER Experiment Name: At_10percent_PEG_P Parameter: Treatment Value: 10percent PEG vs. No Treatment
  misc_feature: MA Experiment ID: 20000527 Result: Down-regulated in Transcription
  misc_feature: MA Experiment 20000527 PARAMETER Experiment Name: At_10percent_PEG_P Parameter: Age (day) Value: 20
  misc_feature: MA Experiment 20000527 PARAMETER Experiment Name: At_10percent_PEG_P Parameter: Organism Value: A. thaliana
  misc_feature: MA Experiment 20000527 PARAMETER Experiment Name: At_10percent_PEG_P Parameter: Plant Line Value: WS
  misc_feature: MA Experiment 20000527 PARAMETER Experiment Name: At_10percent_PEG_P Parameter: Timepoint (day) Value: 20
  misc_feature: MA Experiment 20000527 PARAMETER Experiment Name: At_10percent_PEG_P Parameter: Tissue Value: Whole Plant
  misc_feature: MA Experiment 20000527 PARAMETER Experiment Name: At_10percent_PEG_P Parameter: Treatment Value: 10percent PEG vs. No Treatment
  misc_feature: MA Experiment ID: 20000573 Result: Down-regulated in Transcription
  misc_feature: MA Experiment 20000573 PARAMETER Experiment Name: At_100uM_ABA_Mutants__P Parameter: Organism Value: A. thaliana
  misc_feature: MA Experiment 20000573 PARAMETER Experiment Name: At_100uM_ABA_Mutants__P Parameter: Plant Line Value: CS22 vs. Ler wt
  misc_feature: MA Experiment 20000573 PARAMETER Experiment Name: At_100uM_ABA_Mutants__P Parameter: Timepoint (hr) Value: N/A
  misc_feature: MA Experiment 20000573 PARAMETER Experiment Name: At_100uM_ABA_Mutants__P Parameter: Tissue Value: Whole Plant
  misc_feature: MA Experiment 20000573 PARAMETER Experiment Name: At_100uM_ABA_Mutants__P Parameter: Treatment Value: None
  misc_feature: MA Experiment ID: 20000574 Result: Down-regulated in Transcription
  misc_feature: MA Experiment 20000574 PARAMETER Experiment Name: At_100uM_ABA_Mutants__P Parameter: Organism Value: A. thaliana
  misc_feature: MA Experiment 20000574 PARAMETER Experiment Name: At_100uM_ABA_Mutants__P Parameter: Plant Line Value: CS23 vs. Ler wt
  misc_feature: MA Experiment 20000574 PARAMETER Experiment Name: At_100uM_ABA_Mutants__P Parameter: Timepoint (hr) Value: N/A
  misc_feature: MA Experiment 20000574 PARAMETER Experiment Name: At_100uM_ABA_Mutants__P Parameter: Tissue Value: Whole Plant
  misc_feature: MA Experiment 20000574 PARAMETER Experiment Name: At_100uM_ABA_Mutants__P Parameter: Treatment Value: None
  misc_feature: MA Experiment ID: 20000576 Result: Down-regulated in Transcription
  misc_feature: MA Experiment 20000576 PARAMETER Experiment Name: At_100uM_ABA_Mutants__P Parameter: Organism Value: A. thaliana
  misc_feature: MA Experiment 20000576 PARAMETER Experiment Name: At_100uM_ABA_Mutants__P Parameter: Plant Line Value: CS23
  misc_feature: MA Experiment 20000576 PARAMETER Experiment Name: At_100uM_ABA_Mutants__P Parameter: Timepoint (hr) Value: 6
  misc_feature: MA Experiment 20000576 PARAMETER Experiment Name: At_100uM_ABA_Mutants__P Parameter: Tissue Value: Whole Plant
  misc_feature: MA Experiment 20000576 PARAMETER Experiment Name: At_100uM_ABA_Mutants__P Parameter: Treatment Value: 1uM ABA vs. No Treatment
  misc_feature: MA Experiment ID: 20000794 Result: Up-regulated in Transcription
  misc_feature: MA Experiment 20000794 PARAMETER Experiment Name: At_Petals_P Parameter: Age (day) Value: 23-25 days
  misc_feature: MA Experiment 20000794 PARAMETER Experiment Name: At_Petals_P Parameter: Plant Line Value: WS
  misc_feature: MA Experiment 20000794 PARAMETER Experiment Name: At_Petals_P Parameter: Tissue Value: Petals vs. Whole plant
  misc_feature: MA Experiment ID: 20001247 Result: Up-regulated in Transcription
  misc_feature: MA Experiment 20001247 PARAMETER Experiment Name: At_Far-red-induction_P Parameter: Age (day) Value: 7
  misc_feature: MA Experiment 20001247 PARAMETER Experiment Name: At_Far-red-induction_P Parameter: Light Value: Far-red vs. White
  misc_feature: MA Experiment 20001247 PARAMETER Experiment Name: At_Far-red-induction_P Parameter: Organism Value: A. thaliana
  misc_feature: MA Experiment 20001247 PARAMETER Experiment Name: At_Far-red-induction_P Parameter: Plant Line Value: Columbia
  misc_feature: MA Experiment 20001247 PARAMETER Experiment Name: At_Far-red-induction_P Parameter: Timepoint (hr) Value: 1
  misc_feature: MA Experiment 20001247 PARAMETER Experiment Name: At_Far-red-induction_P Parameter: Tissue Value: Whole Plant
  misc_feature: MA Experiment ID: 20001557 Result: Down-regulated in Transcription
  misc_feature: MA Experiment 20001557 PARAMETER Experiment Name: At_Drought_Soil_Dry_P Parameter: Age (day) Value: 27
  misc_feature: MA Experiment 20001557 PARAMETER Experiment Name: At_Drought_Soil_Dry_P Parameter: Organism Value: A. thaliana
  misc_feature: MA Experiment 20001557 PARAMETER Experiment Name: At_Drought_Soil_Dry_P Parameter: Plant Line Value: WS
  misc_feature: MA Experiment 20001557 PARAMETER Experiment Name: At_Drought_Soil_Dry_P Parameter: Post Timepoint (hr) Value: 3
  misc_feature: MA Experiment 20001557 PARAMETER Experiment Name: At_Drought_Soil_Dry_P Parameter: Post-Treatment Value: Re-Water vs. No Drought
  misc_feature: MA Experiment 20001557 PARAMETER Experiment Name: At_Drought_Soil_Dry_P Parameter: Timepoint (day) Value: 13
  misc_feature: MA Experiment 20001557 PARAMETER Experiment Name: At_Drought_Soil_Dry_P Parameter: Treatment Value: Drought vs. No Drought
  misc_feature: MA Experiment ID: 20001560 Result: Down-regulated in Transcription
  misc_feature: MA Experiment 20001560 PARAMETER Experiment Name: At_Drought_Soil_Dry_P Parameter: Age (day) Value: 28
  misc_feature: MA Experiment 20001560 PARAMETER Experiment Name: At_Drought_Soil_Dry_P Parameter: Organism Value: A. thaliana
  misc_feature: MA Experiment 20001560 PARAMETER Experiment Name: At_Drought_Soil_Dry_P Parameter: Plant Line Value: WS
  misc_feature: MA Experiment 20001560 PARAMETER Experiment Name: At_Drought_Soil_Dry_P Parameter: Post Timepoint (hr) Value: None
  misc_feature: MA Experiment 20001560 PARAMETER Experiment Name: At_Drought_Soil_Dry_P Parameter: Post-Treatment Value: None
  misc_feature: MA Experiment 20001560 PARAMETER Experiment Name: At_Drought_Soil_Dry_P Parameter: Timepoint (day) Value: 14
  misc_feature: MA Experiment 20001560 PARAMETER Experiment Name: At_Drought_Soil_Dry_P Parameter: Treatment Value: Drought vs. No Drought
  misc_feature: MA Experiment ID: 20001906 Result: Down-regulated in Transcription
  misc_feature: MA Experiment 20001906 PARAMETER Experiment Name: At_Drought_Reproduction_P Parameter: Age (day) Value: 35
  misc_feature: MA Experiment 20001906 PARAMETER Experiment Name: At_Drought_Reproduction_P Parameter: Organism Value: A. thaliana
  misc_feature: MA Experiment 20001906 PARAMETER Experiment Name: At_Drought_Reproduction_P Parameter: Plant Line Value: WS
  misc_feature: MA Experiment 20001906 PARAMETER Experiment Name: At_Drought_Reproduction_P Parameter: Timepoint (day) Value: 5
  misc_feature: MA Experiment 20001906 PARAMETER Experiment Name: At_Drought_Reproduction_P Parameter: Tissue Value: Siliques
  misc_feature: MA Experiment 20001906 PARAMETER Experiment Name: At_Drought_Reproduction_P Parameter: Treatment Value: Drought vs. No Drought
  misc_feature: MA Experiment ID: 20001907 Result: Down-regulated in Transcription
  misc_feature: MA Experiment 20001907 PARAMETER Experiment Name: At_Drought_Reproduction_P Parameter: Age (day) Value: 37
  misc_feature: MA Experiment 20001907 PARAMETER Experiment Name: At_Drought_Reproduction_P Parameter: Organism Value: A. thaliana
  misc_feature: MA Experiment 20001907 PARAMETER Experiment Name: At_Drought_Reproduction_P Parameter: Plant Line Value: WS
  misc_feature: MA Experiment 20001907 PARAMETER Experiment Name: At_Drought_Reproduction_P Parameter: Timepoint (day) Value: 7
  misc_feature: MA Experiment 20001907 PARAMETER Experiment Name: At_Drought_Reproduction_P Parameter: Tissue Value: Siliques
  misc_feature: MA Experiment 20001907 PARAMETER Experiment Name: At_Drought_Reproduction_P Parameter: Treatment Value: Drought vs. No Drought
  misc_feature: MA Experiment ID: 20001908 Result: Down-regulated in Transcription
  misc_feature: MA Experiment 20001908 PARAMETER Experiment Name: At_Drought_Reproduction_P Parameter: Age (day) Value: 40
  misc_feature: MA Experiment 20001908 PARAMETER Experiment Name: At_Drought_Reproduction_P Parameter: Organism Value: A. thaliana
  misc_feature: MA Experiment 20001908 PARAMETER Experiment Name: At_Drought_Reproduction_P Parameter: Plant Line Value: WS
  misc_feature: MA Experiment 20001908 PARAMETER Experiment Name: At_Drought_Reproduction_P Parameter: Timepoint (day) Value: 10
  misc_feature: MA Experiment 20001908 PARAMETER Experiment Name: At_Drought_Reproduction_P Parameter: Tissue Value: Siliques
  misc_feature: MA Experiment 20001908 PARAMETER Experiment Name: At_Drought_Reproduction_P Parameter: Treatment Value: Drought vs. No Drought
  misc_feature: MA Experiment ID: 20001911 Result: Down-regulated in Transcription
  misc_feature: MA Experiment 20001911 PARAMETER Experiment Name: At_Drought_Reproduction_P Parameter: Age (day) Value: 40
  misc_feature: MA Experiment 20001911 PARAMETER Experiment Name: At_Drought_Reproduction_P Parameter: Organism Value: A. thaliana
  misc_feature: MA Experiment 20001911 PARAMETER Experiment Name: At_Drought_Reproduction_P Parameter: Plant Line Value: WS
  misc_feature: MA Experiment 20001911 PARAMETER Experiment Name: At_Drought_Reproduction_P Parameter: Timepoint (day) Value: 10
  misc_feature: MA Experiment 20001911 PARAMETER Experiment Name: At_Drought_Reproduction_P Parameter: Tissue Value: Flowers
  misc_feature: MA Experiment 20001911 PARAMETER Experiment Name: At_Drought_Reproduction_P Parameter: Treatment Value: Drought vs. No Drought
acatcttagttcatgttcgagtttctctggtctcttactctttcacctagaaatttgtttggtctcccaacaacataaacgcatgtatacattttcatgtgtctttgtaaggatattgattcattttttgggcaaatagataatcaattcaatgctatgttttgtctgaaatgtgcagcttcaattacaaagaatggctgcttcaagtgctgtcaccgcaaactacgtcctcaagccacctccattcgcactggatgctttggagccgcatatgagcaaacaaactctggagtttcactggggaaaacatcacagagcttacgtggacaacctcaagaaacaggttcttggaaccgagcttgaaggcaagcccttagagcacattatccacagcacttacaacaatggtgatctcctccctgctttcaacaacgctgctcaggcgtggaaccacgagttcttctgggagtcaatgaaaccaggtggtggaggaaaaccatcaggagagcttcttgctttgcttgaaagagatttcacttcttatgagaagttctatgaagagttcaatgctgctgcagccactcagtttggagctggctgggcctggcttgcttattcaaatgaaaaactcaaagtagtgaaaactcccaatgctgtgaatccccttgtgctcggctctttcccattgcttaccattgatgtctgggagcatgcttactaccttgacttccagaaccgaagaccagattacataaagacattcatgaccaatcttgtgtcttgggaagctgtaagtgccagacttgaggccgccaaggctgcttctgcttaagcaaatttctgaacaatttgacttcagtgacagtgagttctgcatcaccgaagtctcttataaaatattggtcgctgtaataaggacacagctctcttgttgtgtatgtgtcacagagttcttcattttgcttgtgtaatgaacaattaaacatgctcttttctgagtgtgtgtgcgttttgtgtgtgtcaagtttttcatcgtctcctttatt

SEQ ID NO: 22242 - protein, 212 aa, Arabidopsis thaliana; identical to SEQ ID NO: 21185
  peptide (1)..(212): Ceres Seq. ID no. 12332376
  misc_feature (1)..(158): Homolog of NCBI NO: 16974682 NR Description: Fe-superoxide dismutase precursor [Medicago
  misc_feature (1)..(209): Homolog of NCBI NO: 33439120 NR Description: iron superoxide dismutase [Lycopersicon
  misc_feature (1)..(209): Homolog of NCBI NO: 33413303 NR Description: superoxide dismutase [Fe] [Lycopersicon
  misc_feature (140)..(212): Homolog of NCBI NO: 6840824 NR Description: iron-superoxide dismutase precursor [Vigna
  misc_feature (7)..(157): Homolog of NCBI NO: 6840824 NR Description: iron-superoxide dismutase precursor [Vigna
  misc_feature (1)..(212): Homolog of NCBI NO: 3114705 NR Description: superoxide dismutase [Raphanus sativus]
  misc_feature (1)..(212): Homolog of NCBI NO: 15234913 NR Description: iron superoxide dismutase (FSD1)
  misc_feature (1)..(212): Homolog of NCBI NO: 99759 NR Description: superoxide dismutase (EC 1.15.1.1) (Fe) -
  misc_feature (1)..(212): Homolog of NCBI NO: 7433338 NR Description: superoxide dismutase (EC 1.15.1.1) (Fe) -
  misc_feature (1)..(212): Homolog of NCBI NO: 166700 NR Description: Fe-superoxide dismutase

SEQ ID NO: 22243 - protein, 186 aa, Arabidopsis thaliana; identical to SEQ ID NO: 21186
  peptide (1)..(186): Ceres Seq. ID no. 12332377
  misc_feature (1)..(186): Homolog of NCBI NO: 99759 NR Description: superoxide dismutase (EC 1.15.1.1) (Fe) -
  misc_feature (1)..(186): Homolog of NCBI NO: 7433338 NR Description: superoxide dismutase (EC 1.15.1.1) (Fe) -
  misc_feature (1)..(186): Homolog of NCBI NO: 166700 NR Description: Fe-superoxide dismutase
  misc_feature (1)..(132): Homolog of NCBI NO: 16974682 NR Description: Fe-superoxide dismutase precursor [Medicago
  misc_feature (1)..(183): Homolog of NCBI NO: 33439120 NR Description: iron superoxide dismutase [Lycopersicon
  misc_feature (1)..(183): Homolog of NCBI NO: 33413303 NR Description: superoxide dismutase [Fe] [Lycopersicon
  misc_feature (114)..(186): Homolog of NCBI NO: 6840824 NR Description: iron-superoxide dismutase precursor [Vigna
  misc_feature (1)..(131): Homolog of NCBI NO: 6840824 NR Description: iron-superoxide dismutase precursor [Vigna
  misc_feature (1)..(186): Homolog of NCBI NO: 3114705 NR Description: superoxide dismutase [Raphanus sativus]
  misc_feature (1)..(186): Homolog of NCBI NO: 15234913 NR Description: iron superoxide dismutase (FSD1)

SEQ ID NO: 22244 - protein, 119 aa, Arabidopsis thaliana
  peptide (1)..(119): Ceres Seq. ID no. 12332378
  misc_feature (1)..(65): Homolog of NCBI NO: 16974682 NR Description: Fe-superoxide dismutase precursor [Medicago
  misc_feature (1)..(116): Homolog of NCBI NO: 33439120 NR Description: iron superoxide dismutase [Lycopersicon
  misc_feature (1)..(116): Homolog of NCBI NO: 33413303 NR Description: superoxide dismutase [Fe] [Lycopersicon
  misc_feature (47)..(119): Homolog of NCBI NO: 6840824 NR Description: iron-superoxide dismutase precursor [Vigna
  misc_feature (1)..(64): Homolog of NCBI NO: 6840824 NR Description: iron-superoxide dismutase precursor [Vigna
  misc_feature (1)..(119): Homolog of NCBI NO: 3114705 NR Description: superoxide dismutase [Raphanus sativus]
  misc_feature (1)..(119): Homolog of NCBI NO: 15234913 NR Description: iron superoxide dismutase (FSD1)
  misc_feature (1)..(119): Homolog of NCBI NO: 99759 NR Description: superoxide dismutase (EC 1.15.1.1) (Fe) -
  misc_feature (1)..(119): Homolog of NCBI NO: 7433338 NR Description: superoxide dismutase (EC 1.15.1.1) (Fe) -
  misc_feature (1)..(119): Homolog of NCBI NO: 166700 NR Description: Fe-superoxide dismutase
MKPGGGGKPSGELLALLERDFTSYEKFYEEFNAAAATQFGAGWAWLAYSNEKLKVVKTPNAVNPLVLGSFPLLTIDVWEHAYYLDFQNRRPDYIKTFMTNLVSWEAVSARLEAAKAASA

SEQ ID NO: 22245 - DNA, 1139 bp, Arabidopsis thaliana
  misc_feature (1)..(1139): Ceres Seq. ID no. 12323678
  misc_feature: MA Experiment ID: 20000171 Result: Up-regulated in Transcription
  misc_feature: MA Experiment 20000171 PARAMETER Experiment Name: At_42deg_Heat_P Parameter: Age (day) Value: 14
  misc_feature: MA Experiment 20000171 PARAMETER Experiment Name: At_42deg_Heat_P Parameter: Organism Value: A. thaliana
  misc_feature: MA Experiment 20000171 PARAMETER Experiment Name: At_42deg_Heat_P Parameter: Plant Line Value: WS
  misc_feature: MA Experiment 20000171 PARAMETER Experiment Name: At_42deg_Heat_P Parameter: Temperature (deg C) Value: 42 vs. 22
  misc_feature: MA Experiment 20000171 PARAMETER Experiment Name: At_42deg_Heat_P Parameter: Timepoint (hr) Value: 1
  misc_feature: MA Experiment 20000171 PARAMETER Experiment Name: At_42deg_Heat_P Parameter: Tissue Value: Aerial
  misc_feature: MA Experiment ID: 20000173 Result: Up-regulated in Transcription
  misc_feature: MA Experiment 20000173 PARAMETER Experiment Name: At_42deg_Heat_P Parameter: Age (day) Value: 14
  misc_feature: MA Experiment 20000173 PARAMETER Experiment Name: At_42deg_Heat_P Parameter: Organism Value: A. thaliana
  misc_feature: MA Experiment 20000173 PARAMETER Experiment Name: At_42deg_Heat_P Parameter: Plant Line Value: WS
  misc_feature: MA Experiment 20000173 PARAMETER Experiment Name: At_42deg_Heat_P Parameter: Temperature (deg C) Value: 42 vs. 22
  misc_feature: MA Experiment 20000173 PARAMETER Experiment Name: At_42deg_Heat_P Parameter: Timepoint (hr) Value: 6
  misc_feature: MA Experiment 20000173 PARAMETER Experiment Name: At_42deg_Heat_P Parameter: Tissue Value: Aerial
  misc_feature: MA Experiment ID: 20000179 Result: Up-regulated in Transcription
  misc_feature: MA Experiment 20000179 PARAMETER Experiment Name: At_Germinating_Seeds_P Parameter: Age (hr) Value: 6 vs. 0
  misc_feature: MA Experiment 20000179 PARAMETER Experiment Name: At_Germinating_Seeds_P Parameter: Tissue Value: Germinating Seeds
  misc_feature: MA Experiment ID: 20000227 Result: Down-regulated in Transcription
  misc_feature: MA Experiment 20000227 PARAMETER Experiment Name: At_Root-Tips-vs-Tops_P Parameter: Tissue Value: Root Tips vs. Root Tops
  misc_feature: MA Experiment ID: 20000265 Result: Down-regulated in Transcription
  misc_feature: MA Experiment 20000265 PARAMETER Experiment Name: At_Open_Flower_P Parameter: Age (day) Value: 21
  misc_feature: MA Experiment 20000265 PARAMETER Experiment Name: At_Open_Flower_P Parameter: Plant Line Value: WS
  misc_feature: MA Experiment 20000265 PARAMETER Experiment Name: At_Open_Flower_P Parameter: Tissue Value: Closed Flower vs. Whole Plant
  misc_feature: MA Experiment ID: 20000436 Result: Up-regulated in Transcription
  misc_feature: MA Experiment 20000436 PARAMETER Experiment Name: At_Drought_P Parameter: Age (day) Value: 7
  misc_feature: MA Experiment 20000436 PARAMETER Experiment Name: At_Drought_P Parameter: Organism Value: A. thaliana
  misc_feature: MA Experiment 20000436 PARAMETER Experiment Name: At_Drought_P Parameter: Plant Line Value: WS
  misc_feature: MA Experiment 20000436 PARAMETER Experiment Name: At_Drought_P Parameter: Timepoint (hr) Value: 12
  misc_feature: MA Experiment 20000436 PARAMETER Experiment Name: At_Drought_P Parameter: Tissue Value: Whole Plant
  misc_feature: MA Experiment 20000436 PARAMETER Experiment Name: At_Drought_P Parameter: Treatment Value: Drought vs. No Drought
  misc_feature: MA Experiment ID: 20000437 Result: Up-regulated in Transcription
  misc_feature: MA Experiment 20000437 PARAMETER Experiment Name: At_Drought_P Parameter: Age (day) Value: 8
  misc_feature: MA Experiment 20000437 PARAMETER Experiment Name: At_Drought_P Parameter: Organism Value: A. thaliana
  misc_feature: MA Experiment 20000437 PARAMETER Experiment Name: At_Drought_P Parameter: Plant Line Value: WS
  misc_feature: MA Experiment 20000437 PARAMETER Experiment Name: At_Drought_P Parameter: Timepoint (hr) Value: 24
  misc_feature: MA Experiment 20000437 PARAMETER Experiment Name: At_Drought_P Parameter: Tissue Value: Whole Plant
  misc_feature: MA Experiment 20000437 PARAMETER Experiment Name: At_Drought_P Parameter: Treatment Value: Drought vs. No Drought
  misc_feature: MA Experiment ID: 20000794 Result: Up-regulated in Transcription
  misc_feature: MA Experiment 20000794 PARAMETER Experiment Name: At_Petals_P Parameter: Age (day) Value: 23-25 days
  misc_feature: MA Experiment 20000794 PARAMETER Experiment Name: At_Petals_P Parameter: Plant Line Value: WS
  misc_feature: MA Experiment 20000794 PARAMETER Experiment Name: At_Petals_P Parameter: Tissue Value: Petals vs. Whole plant
  misc_feature: MA Experiment ID: 20001451 Result: Up-regulated in Transcription
  misc_feature: MA Experiment 20001451 PARAMETER Experiment Name: At_Far-red-induction_P Parameter: Age (day) Value: 7
  misc_feature: MA Experiment 20001451 PARAMETER Experiment Name: At_Far-red-induction_P Parameter: Light Value: Far-red vs. White
  misc_feature: MA Experiment 20001451 PARAMETER Experiment Name: At_Far-red-induction_P Parameter: Organism Value: A. thaliana
  misc_feature: MA Experiment 20001451 PARAMETER Experiment Name: At_Far-red-induction_P Parameter: Plant Line Value: Columbia
  misc_feature: MA Experiment 20001451 PARAMETER Experiment Name: At_Far-red-induction_P Parameter: Timepoint (hr) Value: 24
  misc_feature: MA Experiment 20001451 PARAMETER Experiment Name: At_Far-red-induction_P Parameter: Tissue Value: Whole Plant
  misc_feature: MA Experiment ID: 20001554 Result: Up-regulated in Transcription
  misc_feature: MA Experiment 20001554 PARAMETER Experiment Name: At_Drought_Soil_Dry_P Parameter: Age (day) Value: 21
  misc_feature: MA Experiment 20001554 PARAMETER Experiment Name: At_Drought_Soil_Dry_P Parameter: Organism Value: A. thaliana
  misc_feature: MA Experiment 20001554 PARAMETER Experiment Name: At_Drought_Soil_Dry_P Parameter: Plant Line Value: WS
  misc_feature: MA Experiment 20001554 PARAMETER Experiment Name: At_Drought_Soil_Dry_P Parameter: Post Timepoint (hr) Value: None
  misc_feature: MA Experiment 20001554 PARAMETER Experiment Name: At_Drought_Soil_Dry_P Parameter: Post-Treatment Value: None
  misc_feature: MA Experiment 20001554 PARAMETER Experiment Name: At_Drought_Soil_Dry_P Parameter: Timepoint (day) Value: 7
  misc_feature: MA Experiment 20001554 PARAMETER Experiment Name: At_Drought_Soil_Dry_P Parameter: Treatment Value: Drought vs. No Drought
  misc_feature: MA Experiment ID: 20001908 Result: Up-regulated in Transcription
  misc_feature: MA Experiment 20001908 PARAMETER Experiment Name: At_Drought_Reproduction_P Parameter: Age (day) Value: 40
  misc_feature: MA Experiment 20001908 PARAMETER Experiment Name: At_Drought_Reproduction_P Parameter: Organism Value: A. thaliana
  misc_feature: MA Experiment 20001908 PARAMETER Experiment Name: At_Drought_Reproduction_P Parameter: Plant Line Value: WS
  misc_feature: MA Experiment 20001908 PARAMETER Experiment Name: At_Drought_Reproduction_P Parameter: Timepoint (day) Value: 10
  misc_feature: MA Experiment 20001908 PARAMETER Experiment Name: At_Drought_Reproduction_P Parameter: Tissue Value: Siliques
  misc_feature: MA Experiment 20001908 PARAMETER Experiment Name: At_Drought_Reproduction_P Parameter: Treatment Value: Drought vs. No Drought
  misc_feature: MA Experiment ID: 20001911 Result: Up-regulated in Transcription
  misc_feature: MA Experiment 20001911 PARAMETER Experiment Name: At_Drought_Reproduction_P Parameter: Age (day) Value: 40
  misc_feature: MA Experiment 20001911 PARAMETER Experiment Name: At_Drought_Reproduction_P Parameter: Organism Value: A. thaliana
  misc_feature: MA Experiment 20001911 PARAMETER Experiment Name: At_Drought_Reproduction_P Parameter: Plant Line Value: WS
  misc_feature: MA Experiment 20001911 PARAMETER Experiment Name: At_Drought_Reproduction_P Parameter: Timepoint (day) Value: 10
  misc_feature: MA Experiment 20001911 PARAMETER Experiment Name: At_Drought_Reproduction_P Parameter: Tissue Value: Flowers
  misc_feature: MA Experiment 20001911 PARAMETER Experiment Name: At_Drought_Reproduction_P Parameter: Treatment Value: Drought vs. No Drought
gaaccaacctcccttaggcactttctacagagcagctaatcaaaaaaaaaaaaaaaaaaccttgttcttctcttcttcttcttcctctctcacaaatttgactttcatagaagaaaaaaatggtgactacatcgtcacgaaccaagtcaaacggaccggtgcttcgttcacaatcaccgtcaggtcgattttgcggtggttactcaagagccgttccgtcatcttcttcatcagctttcgcttcatcaacgagttctagcttttcatctccgtcgtcagcttttttcagcaatcaccgtcatcacgagagcaatcacagtcaccaccgatctgcgtcaccgactcgtgtgaatctctacacagcgcaaccgatgtctcagtcgtttcgttactctctcgatagcagatctatatctccgactaacaaatcgatctccgtttcgaagaatcagccaccgagccataatcacaagatctcaaggagatgtatgtgttctccgacgacgcatccaggatctttcagatgcagtctacataagaacgtagcgaatccacatggtcaaggtacagcttcgtatacaacgaatggattgaatatgcgtcgatctgcgatgactaattcgctggtgagaattggtggtgttgaaggagagtgggtgagaagagctttgactactttgattcgaccttcttcgcatcatctgaaaagacgagctgcttatcagccacgtcctagtcgactctcaatcatggcgaaagctgatgagaattgattttgatctggattttggttaattcaggtttgttttgtttgttgttcttctctctttaaacgaaaaccaccacaggatttagtagatccggcgaagaagtcttgttatgaagctgaggtctgcgaagaagaatcatcctcgagaaatcgagattttgtaaaaggaagaaacacacacctatcataatttttttgttgttgggtgaaagaagatgctagaatgcattgtacatacgttctcttttttactgtttttgttgctctctcttgcgtctttgtcgaaccccaaaaaaaaaaaaatgttcggagtctcaccaaaaattagagacctaaaatcgaaaatcaaagaactgaatctaatttctgc

SEQ ID NO: 22246 - protein, 217 aa, Arabidopsis thaliana
  peptide (1)..(217): Ceres Seq. ID no. 12323679
  misc_feature (135)..(214): Homolog of NCBI NO: 30017516 NR Description: hypothetical protein [Oryza sativa (japonica
  misc_feature (42)..(207): Homolog of NCBI NO: 15241329 NR Description: putative protein; protein id: At5g20370.1
  misc_feature (2)..(216): Homolog of NCBI NO: 24461857 NR Description: CTV.15 [Poncirus trifoliata]
  misc_feature (1)..(216): Homolog of NCBI NO: 21618161 NR Description: serine-rich protein [Arabidopsis thaliana]
  misc_feature (1)..(216): Homolog of NCBI NO: 15238753 NR Description: serine-rich protein; protein id: At5g25280.1
  misc_feature (1)..(217): Homolog of NCBI NO: 15238947 NR Description: putative protein
  misc_feature (135)..(214): Homolog of NCBI NO: 30017516 NR Description: hypothetical protein [Oryza sativa (japonica
  misc_feature (42)..(207): Homolog of NCBI NO: 15241329 NR Description: putative protein; protein id: At5g20370.1
  misc_feature (2)..(216): Homolog of NCBI NO: 24461857 NR Description: CTV.15 [Poncirus trifoliata]
  misc_feature (1)..(216): Homolog of NCBI NO: 21618161 NR Description: serine-rich protein [Arabidopsis thaliana]
  misc_feature (1)..(216): Homolog of NCBI NO: 15238753 NR Description: serine-rich protein; protein id: At5g25280.1
  misc_feature (1)..(217): Homolog of NCBI NO: 15238947 NR Description: putative protein
MVTTSSRTKSNGPVLRSQSPSGRFCGGYSRAVPSSSSSAFASSTSSSFSSPSSAFFSNHRHHESNHSHHRSASPTRVNLYTAQPMSQSFRYSLDSRSISPTNKSISVSKNQPPSHNHKISRRCMCSPTTHPGSFRCSLHKNVANPHGQGTASYTTNGLNMRRSAMTNSLVRIGGVEGEWVRRALTTLIRPSSHHLKRRAAYQPRPSRLSIMAKADEN

SEQ ID NO: 22247 - protein, 133 aa, Arabidopsis thaliana
  peptide (1)..(133): Ceres Seq. ID no. 12323680
  misc_feature (51)..(130): Homolog of NCBI NO: 30017516 NR Description: hypothetical protein [Oryza sativa (japonica
  misc_feature (1)..(123): Homolog of NCBI NO: 15241329 NR Description: putative protein; protein id: At5g20370.1
  misc_feature (1)..(132): Homolog of NCBI NO: 24461857 NR Description: CTV.15 [Poncirus trifoliata]
  misc_feature (1)..(132): Homolog of NCBI NO: 21618161 NR Description: serine-rich protein [Arabidopsis thaliana]
  misc_feature (1)..(132): Homolog of NCBI NO: 15238753 NR Description: serine-rich protein; protein id: At5g25280.1
  misc_feature (1)..(133): Homolog of NCBI NO: 15238947 NR Description: putative protein
  misc_feature (51)..(130): Homolog of NCBI NO: 30017516 NR Description: hypothetical protein [Oryza sativa (japonica
  misc_feature (1)..(123): Homolog of NCBI NO: 15241329 NR Description: putative protein; protein id: At5g20370.1
  misc_feature (1)..(132): Homolog of NCBI NO: 24461857 NR Description: CTV.15 [Poncirus trifoliata]
  misc_feature (1)..(132): Homolog of NCBI NO: 21618161 NR Description: serine-rich protein [Arabidopsis thaliana]
  misc_feature (1)..(132): Homolog of NCBI NO: 15238753 NR Description: serine-rich protein; protein id: At5g25280.1
  misc_feature (1)..(133): Homolog of NCBI NO: 15238947 NR Description: putative protein
MSQSFRYSLDSRSISPTNKSISVSKNQPPSHNHKISRRCMCSPTTHPGSFRCSLHKNVANPHGQGTASYTTNGLNMRRSAMTNSLVRIGGVEGEWVRRALTTLIRPSSHHLKRRAAYQPRPSRLSIMAKADEN

SEQ ID NO: 22248 - DNA, 1159 bp, Arabidopsis thaliana
  misc_feature (1)..(1159): Ceres Seq. ID no. 12385167
  misc_feature: MA Experiment ID: 108434 Result: Down-regulated in Transcription
  misc_feature: MA Experiment 108434 PARAMETER Experiment Name: At_Root_Tips_cDNA_P Parameter: Tissue Value: Root Tips
  misc_feature: MA Experiment ID: 108463 Result: Up-regulated in Transcription
  misc_feature: MA Experiment 108463 PARAMETER Experiment Name: At_Germinating_Seeds_cDNA_P Parameter: Age (day) Value: 3 vs. 0
  misc_feature: MA Experiment 108463 PARAMETER Experiment Name: At_Germinating_Seeds_cDNA_P Parameter: Tissue Value: Germinating Seeds
  misc_feature: MA Experiment ID: 108464 Result: Up-regulated in Transcription
  misc_feature: MA Experiment 108464 PARAMETER Experiment Name: At_Germinating_Seeds_cDNA_P Parameter: Age (day) Value: 4 vs. 0
  misc_feature: MA Experiment 108464 PARAMETER Experiment Name: At_Germinating_Seeds_cDNA_P Parameter: Tissue Value: Germinating Seeds
  misc_feature: MA Experiment ID: 108473 Result: Up-regulated in Transcription
  misc_feature: MA Experiment 108473 PARAMETER Experiment Name: At_Drought_Flowers_cDNA_P Parameter: Timepoint (hr) Value: 7 d
  misc_feature: MA Experiment 108473 PARAMETER Experiment Name: At_Drought_Flowers_cDNA_P Parameter: Tissue Value: Flower
  misc_feature: MA Experiment 108473 PARAMETER Experiment Name: At_Drought_Flowers_cDNA_P Parameter: Treatment Value: Drought vs. No Drought
  misc_feature: MA Experiment ID: 108474 Result: Down-regulated in Transcription
  misc_feature: MA Experiment 108474 PARAMETER Experiment Name: At_Drought_Flowers_cDNA_P Parameter: Timepoint (hr) Value: null
  misc_feature: MA Experiment 108474 PARAMETER Experiment Name: At_Drought_Flowers_cDNA_P Parameter: Treatment Value: Drought vs. No Drought
  misc_feature: MA Experiment ID: 108594 Result: Down-regulated in Transcription
  misc_feature: MA Experiment 108594 PARAMETER Experiment Name: At_Ler-rhl_Root_cDNA_P Parameter: Plant Line Value: null
  misc_feature: MA Experiment ID: 20000264 Result: Up-regulated in Transcription
  misc_feature: MA Experiment 20000264 PARAMETER Experiment Name: At_Open_Flower_P Parameter: Age (day) Value: 21
  misc_feature: MA Experiment 20000264 PARAMETER Experiment Name: At_Open_Flower_P Parameter: Plant Line Value: WS
  misc_feature: MA Experiment 20000264 PARAMETER Experiment Name: At_Open_Flower_P Parameter: Tissue Value: Open Flower vs. Whole Plant
  misc_feature: MA Experiment ID: 20000265 Result: Up-regulated in Transcription
  misc_feature: MA Experiment 20000265 PARAMETER Experiment Name: At_Open_Flower_P Parameter: Age (day) Value: 21
  misc_feature: MA Experiment 20000265 PARAMETER Experiment Name: At_Open_Flower_P Parameter: Plant Line Value: WS
  misc_feature: MA Experiment 20000265 PARAMETER Experiment Name: At_Open_Flower_P Parameter: Tissue Value: Closed Flower vs. Whole Plant
  misc_feature: MA Experiment ID: 20000269 Result: Up-regulated in Transcription
  misc_feature: MA Experiment 20000269 PARAMETER Experiment Name: At_1mM_KNO3_L-vs-H_Roots_P Parameter: Age (day) Value: 7,10,12
  misc_feature: MA Experiment 20000269 PARAMETER Experiment Name: At_1mM_KNO3_L-vs-H_Roots_P Parameter: Organism Value: A. thaliana
  misc_feature: MA Experiment 20000269 PARAMETER Experiment Name: At_1mM_KNO3_L-vs-H_Roots_P Parameter: Plant Line Value: WS
  misc_feature: MA Experiment 20000269 PARAMETER Experiment Name: At_1mM_KNO3_L-vs-H_Roots_P Parameter: Timepoint (day) Value: 7,10,12
  misc_feature: MA Experiment 20000269 PARAMETER Experiment Name: At_1mM_KNO3_L-vs-H_Roots_P Parameter: Tissue Value: Roots
  misc_feature: MA Experiment 20000269 PARAMETER Experiment Name: At_1mM_KNO3_L-vs-H_Roots_P Parameter: Treatment Value: 1mM KNO3 vs. 50mM KNO3
  misc_feature: MA Experiment ID: 20000286 Result: Up-regulated in Transcription
  misc_feature: MA Experiment 20000286 PARAMETER Experiment Name: At_Open_Flower_P Parameter: Age (day) Value: 21
  misc_feature: MA Experiment 20000286 PARAMETER Experiment Name: At_Open_Flower_P Parameter: Plant Line Value: WS
  misc_feature: MA Experiment 20000286 PARAMETER Experiment Name: At_Open_Flower_P Parameter: Tissue Value: Half Open vs. Whole Plant
  misc_feature: MA Experiment ID: 20000436 Result: Up-regulated in Transcription
  misc_feature: MA Experiment 20000436 PARAMETER Experiment Name: At_Drought_P Parameter: Age (day) Value: 7
  misc_feature: MA Experiment 20000436 PARAMETER Experiment Name: At_Drought_P Parameter: Organism Value: A. thaliana
  misc_feature: MA Experiment 20000436 PARAMETER Experiment Name: At_Drought_P Parameter: Plant Line Value: WS
  misc_feature: MA Experiment 20000436 PARAMETER Experiment Name: At_Drought_P Parameter: Timepoint (hr) Value: 12
  misc_feature: MA Experiment 20000436 PARAMETER Experiment Name: At_Drought_P Parameter: Tissue Value: Whole Plant
  misc_feature: MA Experiment 20000436 PARAMETER Experiment Name: At_Drought_P Parameter: Treatment Value: Drought vs. No Drought
  misc_feature: MA Experiment ID: 20000437 Result: Up-regulated in Transcription
  misc_feature: MA Experiment 20000437 PARAMETER Experiment Name: At_Drought_P Parameter: Age (day) Value: 8
  misc_feature: MA Experiment 20000437 PARAMETER Experiment Name: At_Drought_P Parameter: Organism Value: A. thaliana
  misc_feature: MA Experiment 20000437 PARAMETER Experiment Name: At_Drought_P Parameter: Plant Line Value: WS
  misc_feature: MA Experiment 20000437 PARAMETER Experiment Name: At_Drought_P Parameter: Timepoint (hr) Value: 24
  misc_feature: MA Experiment 20000437 PARAMETER Experiment Name: At_Drought_P Parameter: Tissue Value: Whole Plant
  misc_feature: MA Experiment 20000437 PARAMETER Experiment Name: At_Drought_P Parameter: Treatment Value: Drought vs. No Drought
  misc_feature: MA Experiment ID: 20000794 Result: Up-regulated in Transcription
  misc_feature: MA Experiment 20000794 PARAMETER Experiment Name: At_Petals_P Parameter: Age (day) Value: 23-25 days
  misc_feature: MA Experiment 20000794 PARAMETER Experiment Name: At_Petals_P Parameter: Plant Line Value: WS
  misc_feature: MA Experiment 20000794 PARAMETER Experiment Name: At_Petals_P Parameter: Tissue Value: Petals vs. Whole plant
  misc_feature: MA Experiment ID: 20001773 Result: Up-regulated in Transcription
  misc_feature: MA Experiment 20001773 PARAMETER Experiment Name: At_Far-red-enriched-adult_P Parameter: Age (day) Value: 30
  misc_feature: MA Experiment 20001773 PARAMETER Experiment Name: At_Far-red-enriched-adult_P Parameter: Light Value: Far-red enriched vs. White
  misc_feature: MA Experiment 20001773 PARAMETER Experiment Name: At_Far-red-enriched-adult_P Parameter: Organism Value: A. thaliana
  misc_feature: MA Experiment 20001773 PARAMETER Experiment Name: At_Far-red-enriched-adult_P Parameter: Plant Line Value: Columbia
  misc_feature: MA Experiment 20001773 PARAMETER Experiment Name: At_Far-red-enriched-adult_P Parameter: Timepoint (hr) Value: 48
  misc_feature: MA Experiment 20001773 PARAMETER Experiment Name: At_Far-red-enriched-adult_P Parameter: Tissue Value: Aerial
  misc_feature: MA Experiment ID: 20001910 Result: Up-regulated in Transcription
  misc_feature: MA Experiment 20001910 PARAMETER Experiment Name: At_Drought_Reproduction_P Parameter: Age (day) Value: 37
  misc_feature: MA Experiment 20001910 PARAMETER Experiment Name: At_Drought_Reproduction_P Parameter: Organism Value: A. thaliana
  misc_feature: MA Experiment 20001910 PARAMETER Experiment Name: At_Drought_Reproduction_P Parameter: Plant Line Value: WS
  misc_feature: MA Experiment 20001910 PARAMETER Experiment Name: At_Drought_Reproduction_P Parameter: Timepoint (day) Value: 7
  misc_feature: MA Experiment 20001910 PARAMETER Experiment Name: At_Drought_Reproduction_P Parameter: Tissue Value: Flowers
  misc_feature: MA Experiment 20001910 PARAMETER Experiment Name: At_Drought_Reproduction_P Parameter: Treatment Value: Drought vs. No Drought
  misc_feature: MA Experiment ID: 20001911 Result: Up-regulated in Transcription
  misc_feature: MA Experiment 20001911 PARAMETER Experiment Name: At_Drought_Reproduction_P Parameter: Age (day) Value: 40
  misc_feature: MA Experiment 20001911 PARAMETER Experiment Name: At_Drought_Reproduction_P Parameter: Organism Value: A. thaliana
  misc_feature: MA Experiment 20001911 PARAMETER Experiment Name: At_Drought_Reproduction_P Parameter: Plant Line Value: WS
  misc_feature: MA Experiment 20001911 PARAMETER Experiment Name: At_Drought_Reproduction_P Parameter: Timepoint (day) Value: 10
  misc_feature: MA Experiment 20001911 PARAMETER Experiment Name: At_Drought_Reproduction_P Parameter: Tissue Value: Flowers
  misc_feature: MA Experiment 20001911 PARAMETER Experiment Name: At_Drought_Reproduction_P Parameter: Treatment Value: Drought vs. No Drought
attagttttctccgacactcccattcaaaagtagaaagatactgaagagctcgctcattcacaaaataaccaaaatggttctcactcacaacgtattggcagttacatttggagtcctgggtaacatcatatcgttcatcgttttcttggcaccagtgccaacttttgtaagaatctgcaagaaaaaatcgatagaaggttttgaatcacttccctacgtgtcagccctctttagcgcgatgctatggatttactatgctctgcaaaaagatggagcaggcttccttctcattaccataaacgctgtgggatgcttcatcgaaaccatctacatcatcctcttcatcacctatgctaacaagaaagctagaatatcaactttgaaggttcttgggctcttgaatttcttgggttttgctgctattattctcgtctgcgagctcctaaccaaaggatcgaaccgtgagaaagtccttggagggatttgcgtcggattttctgtttgtgttttcgcagctcctttgagcatcatgagagtggtgatacgaacaaagagtgtggagtttatgcctttctctctatcattgtttcttacaatcagcgccattacgtggctcttctacggtcttgctattaaagacttctacgttgcgcttccaaatatattgggtgcgtttctcggagcagtccaaatgattctatacgtcatattcaagtactacaaaactccactagtggttgatgagacagagaagcccaaaacggtgtcggatcattccatcaacatggtcaagctttcatctactccggcttctggtgatcttacggttcagccgcagactaatcctgacgtgagtcatcctattaaaactcatggtggtgacttagaggaccagatggacaagaaaatgccaaacagtcaagatttagttttcaattatgaattagtgattgactttaatgttgaactgttgagtctggtttcctaatttgtcttttattttctcatcatcttctttcgaaatatctcgaaattgtactatccttcaaaaatttatgtgcgtcgtttagaattttgtaaaatagtttttgatgcctctgttctcagtaatacttaaaagtttattagtccggctaattaaaaaggaaatgaaaattc

SEQ ID NO: 22249 - protein, 304 aa, Arabidopsis thaliana
  peptide (1)..(304): Ceres Seq. ID no. 12385168
  misc_feature (10)..(98): Pfam Name: MtN3/saliva family Pfam Description: MtN3/saliva family
  misc_feature (1)..(284): Homolog of NCBI NO: 15240040 NR Description: senescence-associated protein (SAG29)
  misc_feature (1)..(284): Homolog of NCBI NO: 21593422 NR Description: senescence-associated protein (SAG29)
  misc_feature (1)..(214): Homolog of NCBI NO: 1619602 NR Description: MtN3 [Medicago truncatula]
  misc_feature (1)..(278): Homolog of NCBI NO: 15241265 NR Description: MtN3-like protein
  misc_feature (1)..(243): Homolog of NCBI NO: 14715258 NR Description: N3 like protein [Medicago truncatula]
  misc_feature (4)..(257): Homolog of NCBI NO: 15229019 NR Description: MTN3-like protein
  misc_feature (4)..(257): Homolog of NCBI NO: 15237803 NR Description: MtN3-like protein
  misc_feature (1)..(286): Homolog of NCBI NO: 21593109 NR Description: MtN3-like protein [Arabidopsis thaliana]
  misc_feature (1)..(286): Homolog of NCBI NO: 15241278 NR Description: MtN3-like protein
  misc_feature (1)..(281): Homolog of NCBI NO: 15234863 NR Description: MtN3 - like protein; protein id: At4g25010.1
MVLTHNVLAVTFGVLGNIISFIVFLAPVPTFVRICKKKSIEGFESLPYVSALFSAMLWIYYALQKDGAGFLLITINAVGCFIETIYIILFITYANKKARISTLKVLGLLNFLGFAAIILVCELLTKGSNREKVLGGICVGFSVCVFAAPLSIMRVVIRTKSVEFMPFSLSLFLTISAITWLFYGLAIKDFYVALPNILGAFLGAVQMILYVIFKYYKTPLVVDETEKPKTVSDHSINMVKLSSTPASGDLTVQPQTNPDVSHPIKTHGGDLEDQMDKKMPNSQDLVFNYELVIDFNVELLSLVS

SEQ ID NO: 22250 - protein, 249 aa, Arabidopsis thaliana
  peptide (1)..(249): Ceres Seq. ID no. 12385169
  misc_feature (1)..(229): Homolog of NCBI NO: 15240040 NR Description: senescence-associated protein (SAG29)
  misc_feature (1)..(229): Homolog of NCBI NO: 21593422 NR Description: senescence-associated protein (SAG29)
  misc_feature (1)..(159): Homolog of NCBI NO: 1619602 NR Description: MtN3 [Medicago truncatula]
  misc_feature (1)..(223): Homolog of NCBI NO: 15241265 NR Description: MtN3-like protein
  misc_feature (1)..(188): Homolog of NCBI NO: 14715258 NR Description: N3 like protein [Medicago truncatula]
  misc_feature (1)..(202): Homolog of NCBI NO: 15229019 NR Description: MTN3-like protein
  misc_feature (1)..(202): Homolog of NCBI NO: 15237803 NR Description: MtN3-like protein
  misc_feature (1)..(231): Homolog of NCBI NO: 21593109 NR Description: MtN3-like protein [Arabidopsis thaliana]
  misc_feature (1)..(231): Homolog of NCBI NO: 15241278 NR Description: MtN3-like protein
  misc_feature (1)..(226): Homolog of NCBI NO: 15234863 NR Description: MtN3 - like protein; protein id: At4g25010.1
MLWIYYALQKDGAGFLLITINAVGCFIETIYIILFITYANKKARISTLKVLGLLNFLGFAAIILVCELLTKGSNREKVLGGICVGFSVCVFAAPLSIMRVVIRTKSVEFMPFSLSLFLTISAITWLFYGLAIKDFYVALPNILGAFLGAVQMILYVIFKYYKTPLVVDETEKPKTVSDHSINMVKLSSTPASGDLTVQPQTNPDVSHPIKTHGGDLEDQMDKKMPNSQDLVFNYELVIDFNVELLSLVS

SEQ ID NO: 22251 - protein, 152 aa, Arabidopsis thaliana
  peptide (1)..(152): Ceres Seq. ID no. 12385170
  misc_feature (1)..(132): Homolog of NCBI NO: 15240040 NR Description: senescence-associated protein (SAG29)
  misc_feature (1)..(132): Homolog of NCBI NO: 21593422 NR Description: senescence-associated protein (SAG29)
  misc_feature (1)..(62): Homolog of NCBI NO: 1619602 NR Description: MtN3 [Medicago truncatula]
  misc_feature (1)..(126): Homolog of NCBI NO: 15241265 NR Description: MtN3-like protein
  misc_feature (1)..(91): Homolog of NCBI NO: 14715258 NR Description: N3 like protein [Medicago truncatula]
  misc_feature (1)..(105): Homolog of NCBI NO: 15229019 NR Description: MTN3-like protein
  misc_feature (1)..(105): Homolog of NCBI NO: 15237803 NR Description: MtN3-like protein
  misc_feature (1)..(134): Homolog of NCBI NO: 21593109 NR Description: MtN3-like protein [Arabidopsis thaliana]
  misc_feature (1)..(134): Homolog of NCBI NO: 15241278 NR Description: MtN3-like protein
  misc_feature (1)..(129): Homolog of NCBI NO: 15234863 NR Description: MtN3 - like protein; protein id: At4g25010.1
MRVVIRTKSVEFMPFSLSLFLTISAITWLFYGLAIKDFYVALPNILGAFLGAVQMILYVIFKYYKTPLVVDETEKPKTVSDHSINMVKLSSTPASGDLTVQPQTNPDVSHPIKTHGGDLEDQMDKKMPNSQDLVFNYELVIDFNVELLSLVS

SEQ ID NO: 22252 - DNA, 639 bp, Arabidopsis thaliana
  misc_feature (1)..(639): Ceres Seq. ID no. 13580410
  misc_feature: MA Experiment ID: 108434 Result: Up-regulated in Transcription
  misc_feature: MA Experiment 108434 PARAMETER Experiment Name: At_Root_Tips_cDNA_P Parameter: Tissue Value: Root Tips
  misc_feature: MA Experiment ID: 108461 Result: Up-regulated in Transcription
  misc_feature: MA Experiment 108461 PARAMETER Experiment Name: At_Germinating_Seeds_cDNA_P Parameter: Age (day) Value: 1 vs. 0
  misc_feature: MA Experiment 108461 PARAMETER Experiment Name: At_Germinating_Seeds_cDNA_P Parameter: Tissue Value: Germinating Seeds
  misc_feature: MA Experiment ID: 108462 Result: Up-regulated in Transcription
  misc_feature: MA Experiment 108462 PARAMETER Experiment Name: At_Germinating_Seeds_cDNA_P Parameter: Age (day) Value: 2 vs. 0
  misc_feature: MA Experiment 108462 PARAMETER Experiment Name: At_Germinating_Seeds_cDNA_P Parameter: Tissue Value: Germinating Seeds
  misc_feature: MA Experiment ID: 108473 Result: Down-regulated in Transcription
  misc_feature: MA Experiment 108473 PARAMETER Experiment Name: At_Drought_Flowers_cDNA_P Parameter: Timepoint (hr) Value: 7 d
  misc_feature: MA Experiment 108473 PARAMETER Experiment Name: At_Drought_Flowers_cDNA_P Parameter: Tissue Value: Flower
  misc_feature: MA Experiment 108473 PARAMETER Experiment Name: At_Drought_Flowers_cDNA_P Parameter: Treatment Value: Drought vs. No Drought
  misc_feature: MA Experiment ID: 20000069 Result: Down-regulated in Transcription
  misc_feature: MA Experiment 20000069 PARAMETER Experiment Name: At_100uM_ABA_Mutants_cDNA_P Parameter: Plant Line Value: CS23
  misc_feature: MA Experiment 20000069 PARAMETER Experiment Name: At_100uM_ABA_Mutants_cDNA_P Parameter: Timepoint (hr) Value: 6
  misc_feature: MA Experiment 20000069 PARAMETER Experiment Name: At_100uM_ABA_Mutants_cDNA_P Parameter: Tissue Value: Aerial
  misc_feature: MA Experiment 20000069 PARAMETER Experiment Name: At_100uM_ABA_Mutants_cDNA_P Parameter: Treatment Value: 100uM ABA vs. No Treatment
  misc_feature: MA Experiment ID: 20000111 Result: Down-regulated in Transcription
  misc_feature: MA Experiment 20000111 PARAMETER Experiment Name: At_42deg_Heat_cDNA_P Parameter: Temperature (deg C) Value: 42 vs. 22
  misc_feature: MA Experiment 20000111 PARAMETER Experiment Name: At_42deg_Heat_cDNA_P Parameter: Timepoint (hr) Value: 6
  misc_feature: MA Experiment 20000111 PARAMETER Experiment Name: At_42deg_Heat_cDNA_P Parameter: Tissue Value: Aerial
  misc_feature: MA Experiment ID: 20000112 Result: Down-regulated in Transcription
  misc_feature: MA Experiment 20000112 PARAMETER Experiment Name: At_42deg_Heat_cDNA_P Parameter: Temperature (deg C) Value: 42 vs. 22
  misc_feature: MA Experiment 20000112 PARAMETER Experiment Name: At_42deg_Heat_cDNA_P Parameter: Timepoint (hr) Value: 2
  misc_feature: MA Experiment 20000112 PARAMETER Experiment Name: At_42deg_Heat_cDNA_P Parameter: Tissue Value: Aerial
  misc_feature: MA Experiment ID: 20000113 Result: Down-regulated in Transcription
  misc_feature: MA Experiment 20000113 PARAMETER Experiment Name: At_42deg_Heat_cDNA_P Parameter: Temperature (deg C) Value: 42 vs. 22
  misc_feature: MA Experiment 20000113 PARAMETER Experiment Name: At_42deg_Heat_cDNA_P Parameter: Timepoint (hr) Value: 8
  misc_feature: MA Experiment 20000113 PARAMETER Experiment Name: At_42deg_Heat_cDNA_P Parameter: Tissue Value: Aerial
  misc_feature: MA Experiment ID: 20000117 Result: Down-regulated in Transcription
  misc_feature: MA Experiment 20000117 PARAMETER Experiment Name: At_100uM_ABA_Mutants_cDNA_P Parameter: Plant Line Value: Columbia
  misc_feature: MA Experiment 20000117 PARAMETER Experiment Name: At_100uM_ABA_Mutants_cDNA_P Parameter: Timepoint (hr) Value: 6
  misc_feature: MA Experiment 20000117 PARAMETER Experiment Name: At_100uM_ABA_Mutants_cDNA_P Parameter: Tissue Value: Aerial
  misc_feature: MA Experiment 20000117 PARAMETER Experiment Name: At_100uM_ABA_Mutants_cDNA_P Parameter: Treatment Value: 100uM ABA vs. No Treatment
  misc_feature: MA Experiment ID: 20000144 Result: Down-regulated in Transcription
  misc_feature: MA Experiment 20000144 PARAMETER Experiment Name: At_42deg_Heat_cDNA_P Parameter: Temperature (deg C) Value: 42 vs. 22
  misc_feature: MA Experiment 20000144 PARAMETER Experiment Name: At_42deg_Heat_cDNA_P Parameter: Timepoint (hr) Value: 1
  misc_feature: MA Experiment 20000144 PARAMETER Experiment Name: At_42deg_Heat_cDNA_P Parameter: Tissue Value: Aerial
  misc_feature: MA Experiment ID: 20000173 Result: Down-regulated in Transcription
  misc_feature: MA Experiment 20000173 PARAMETER Experiment Name: At_42deg_Heat_P Parameter: Age (day) Value: 14
  misc_feature: MA Experiment 20000173 PARAMETER Experiment Name: At_42deg_Heat_P Parameter: Organism Value: A. thaliana
  misc_feature: MA Experiment 20000173 PARAMETER Experiment Name: At_42deg_Heat_P Parameter: Plant Line Value: WS
  misc_feature: MA Experiment 20000173 PARAMETER Experiment Name: At_42deg_Heat_P Parameter: Temperature (deg C) Value: 42 vs. 22
  misc_feature: MA Experiment 20000173 PARAMETER Experiment Name: At_42deg_Heat_P Parameter: Timepoint (hr) Value: 6
  misc_feature: MA Experiment 20000173 PARAMETER Experiment Name: At_42deg_Heat_P Parameter: Tissue Value: Aerial
  misc_feature: MA Experiment ID: 20000179 Result: Up-regulated in Transcription
  misc_feature: MA Experiment 20000179 PARAMETER Experiment Name: At_Germinating_Seeds_P Parameter: Age (hr) Value: 6 vs. 0
  misc_feature: MA Experiment 20000179 PARAMETER Experiment Name: At_Germinating_Seeds_P Parameter: Tissue Value: Germinating Seeds
  misc_feature: MA Experiment ID: 20000180 Result: Up-regulated in Transcription
  misc_feature: MA Experiment 20000180 PARAMETER Experiment Name: At_Germinating_Seeds_P Parameter: Age (hr) Value: 24 vs. 0
  misc_feature: MA Experiment 20000180 PARAMETER Experiment Name: At_Germinating_Seeds_P Parameter: Tissue Value: Germinating Seeds
  misc_feature: MA Experiment ID: 20000227 Result: Up-regulated in Transcription
  misc_feature: MA Experiment 20000227 PARAMETER Experiment Name: At_Root-Tips-vs-Tops_P Parameter: Tissue Value: Root Tips vs. Root Tops
  misc_feature: MA Experiment ID: 20000234 Result: Up-regulated in Transcription
  misc_feature: MA Experiment 20000234 PARAMETER Experiment Name: At_Siliques_P Parameter: Age (day) Value: 21
  misc_feature: MA Experiment 20000234 PARAMETER Experiment Name: At_Siliques_P Parameter: Organism Value: A. thaliana
  misc_feature: MA Experiment 20000234 PARAMETER Experiment Name: At_Siliques_P Parameter: Plant Line Value: WS
  misc_feature: MA Experiment 20000234 PARAMETER Experiment Name: At_Siliques_P Parameter: Tissue Value: Less Than 5mm Siliques vs. Whole Plant
  misc_feature: MA Experiment ID: 20000264 Result: Up-regulated in Transcription
  misc_feature: MA Experiment 20000264 PARAMETER Experiment Name: At_Open_Flower_P Parameter: Age (day) Value: 21
  misc_feature: MA Experiment 20000264 PARAMETER Experiment Name: At_Open_Flower_P Parameter: Plant Line Value: WS
  misc_feature: MA Experiment 20000264 PARAMETER Experiment Name: At_Open_Flower_P Parameter: Tissue Value: Open Flower vs. Whole Plant
  misc_feature: MA Experiment ID: 20000265 Result: Up-regulated in Transcription
  misc_feature: MA Experiment 20000265 PARAMETER Experiment Name: At_Open_Flower_P Parameter: Age (day) Value: 21
  misc_feature: MA Experiment 20000265 PARAMETER Experiment Name: At_Open_Flower_P Parameter: Plant Line Value: WS
  misc_feature: MA Experiment 20000265 PARAMETER Experiment Name: At_Open_Flower_P Parameter: Tissue Value: Closed Flower vs. Whole Plant
  misc_feature: MA Experiment ID: 20000437 Result: Down-regulated in Transcription
  misc_feature: MA Experiment 20000437 PARAMETER Experiment Name: At_Drought_P Parameter: Age (day) Value: 8
  misc_feature: MA Experiment 20000437 PARAMETER Experiment Name: At_Drought_P Parameter: Organism Value: A. thaliana
  misc_feature: MA Experiment 20000437 PARAMETER Experiment Name: At_Drought_P Parameter: Plant Line Value: WS
  misc_feature: MA Experiment 20000437 PARAMETER Experiment Name: At_Drought_P Parameter: Timepoint (hr) Value: 24
  misc_feature: MA Experiment 20000437 PARAMETER Experiment Name: At_Drought_P Parameter: Tissue Value: Whole Plant
  misc_feature: MA Experiment 20000437 PARAMETER Experiment Name: At_Drought_P Parameter: Treatment Value: Drought vs. No Drought
  misc_feature: MA Experiment ID: 20000438 Result: Up-regulated in Transcription
  misc_feature: MA Experiment 20000438 PARAMETER Experiment Name: At_Shoots__P Parameter: Age (day) Value: 14
  misc_feature: MA Experiment 20000438 PARAMETER Experiment Name: At_Shoots__P Parameter: Tissue Value: Shoots vs. Whole Plant
  misc_feature: MA Experiment ID: 20000794 Result: Down-regulated in Transcription
  misc_feature: MA Experiment 20000794 PARAMETER Experiment Name: At_Petals_P Parameter: Age (day) Value: 23-25 days
  misc_feature: MA Experiment 20000794 PARAMETER Experiment Name: At_Petals_P Parameter: Plant Line Value: WS
  misc_feature: MA Experiment 20000794 PARAMETER Experiment Name: At_Petals_P Parameter: Tissue Value: Petals vs. Whole plant
  misc_feature: MA Experiment ID: 20001248 Result: Down-regulated in Transcription
  misc_feature: MA Experiment 20001248 PARAMETER Experiment Name: At_Far-red-induction_P Parameter: Age (day) Value: 7
  misc_feature: MA Experiment 20001248 PARAMETER Experiment Name: At_Far-red-induction_P Parameter: Light Value: Far-red vs. White
  misc_feature: MA Experiment 20001248 PARAMETER Experiment Name: At_Far-red-induction_P Parameter: Organism Value: A. thaliana
  misc_feature: MA Experiment 20001248 PARAMETER Experiment Name: At_Far-red-induction_P Parameter: Plant Line Value: Columbia
  misc_feature: MA Experiment 20001248 PARAMETER Experiment Name: At_Far-red-induction_P Parameter: Timepoint (hr) Value: 4
  misc_feature: MA Experiment 20001248 PARAMETER Experiment Name: At_Far-red-induction_P Parameter: Tissue Value: Whole Plant
  misc_feature: MA Experiment ID: 20001450 Result: Down-regulated in Transcription
  misc_feature: MA Experiment 20001450 PARAMETER Experiment Name: At_Far-red-induction_P Parameter: Age (day) Value: 7
  misc_feature: MA Experiment 20001450 PARAMETER Experiment Name: At_Far-red-induction_P Parameter: Light Value: Far-red vs. White
  misc_feature: MA Experiment 20001450 PARAMETER Experiment Name: At_Far-red-induction_P Parameter: Organism Value: A. thaliana
  misc_feature: MA Experiment 20001450 PARAMETER Experiment Name: At_Far-red-induction_P Parameter: Plant Line Value: Columbia
  misc_feature: MA Experiment 20001450 PARAMETER Experiment Name: At_Far-red-induction_P Parameter: Timepoint (hr) Value: 8
  misc_feature: MA Experiment 20001450 PARAMETER Experiment Name: At_Far-red-induction_P Parameter: Tissue Value: Whole Plant
  misc_feature: MA Experiment ID: 20001554 Result: Down-regulated in Transcription
  misc_feature: MA Experiment 20001554 PARAMETER Experiment Name: At_Drought_Soil_Dry_P Parameter: Age (day) Value: 21
  misc_feature: MA Experiment 20001554 PARAMETER Experiment Name: At_Drought_Soil_Dry_P Parameter: Organism Value: A. thaliana
  misc_feature: MA Experiment 20001554 PARAMETER Experiment Name: At_Drought_Soil_Dry_P Parameter: Plant Line Value: WS
  misc_feature: MA Experiment 20001554 PARAMETER Experiment Name: At_Drought_Soil_Dry_P Parameter: Post Timepoint (hr) Value: None
  misc_feature: MA Experiment 20001554 PARAMETER Experiment Name: At_Drought_Soil_Dry_P Parameter: Post-Treatment Value: None
  misc_feature: MA Experiment 20001554 PARAMETER Experiment Name: At_Drought_Soil_Dry_P Parameter: Timepoint (day) Value: 7
  misc_feature: MA Experiment 20001554 PARAMETER Experiment Name: At_Drought_Soil_Dry_P Parameter: Treatment Value: Drought vs. No Drought
  misc_feature: MA Experiment ID: 20001555 Result: Down-regulated in Transcription
  misc_feature: MA Experiment 20001555 PARAMETER Experiment Name: At_Drought_Soil_Dry_P Parameter: Age (day) Value: 24
  misc_feature: MA Experiment 20001555 PARAMETER Experiment Name: At_Drought_Soil_Dry_P Parameter: Organism Value: A. thaliana
  misc_feature: MA Experiment 20001555 PARAMETER Experiment Name: At_Drought_Soil_Dry_P Parameter: Plant Line Value: WS
  misc_feature: MA Experiment 20001555 PARAMETER Experiment Name: At_Drought_Soil_Dry_P Parameter: Post Timepoint (hr) Value: None
  misc_feature: MA Experiment 20001555 PARAMETER Experiment Name: At_Drought_Soil_Dry_P Parameter: Post-Treatment Value: None
  misc_feature: MA Experiment 20001555 PARAMETER Experiment Name: At_Drought_Soil_Dry_P Parameter: Timepoint (day) Value: 10
  misc_feature: MA Experiment 20001555 PARAMETER Experiment Name: At_Drought_Soil_Dry_P Parameter: Treatment Value: Drought vs. No Drought
  misc_feature: MA Experiment ID: 20001556 Result: Down-regulated in Transcription
  misc_feature: MA Experiment 20001556 PARAMETER Experiment Name: At_Drought_Soil_Dry_P Parameter: Age (day) Value: 26
  misc_feature: MA Experiment 20001556 PARAMETER Experiment Name: At_Drought_Soil_Dry_P Parameter: Organism Value: A. thaliana
  misc_feature: MA Experiment 20001556 PARAMETER Experiment Name: At_Drought_Soil_Dry_P Parameter: Plant Line Value: WS
  misc_feature: MA Experiment 20001556 PARAMETER Experiment Name: At_Drought_Soil_Dry_P Parameter: Post Timepoint (hr) Value: None
  misc_feature: MA Experiment 20001556 PARAMETER Experiment Name: At_Drought_Soil_Dry_P Parameter: Post-Treatment Value: None
  misc_feature: MA Experiment 20001556 PARAMETER Experiment Name: At_Drought_Soil_Dry_P Parameter: Timepoint (day) Value: 12
  misc_feature: MA Experiment 20001556 PARAMETER Experiment Name: At_Drought_Soil_Dry_P Parameter: Treatment Value: Drought vs. No Drought
  misc_feature: MA Experiment ID: 20001557 Result: Down-regulated in Transcription
  misc_feature: MA Experiment 20001557 PARAMETER Experiment Name: At_Drought_Soil_Dry_P Parameter: Age (day) Value: 27
  misc_feature: MA Experiment 20001557 PARAMETER Experiment Name: At_Drought_Soil_Dry_P Parameter: Organism Value: A. thaliana
  misc_feature: MA Experiment 20001557 PARAMETER Experiment Name: At_Drought_Soil_Dry_P Parameter: Plant Line Value: WS
  misc_feature: MA Experiment 20001557 PARAMETER Experiment Name: At_Drought_Soil_Dry_P Parameter: Post Timepoint (hr) Value: 3
  misc_feature: MA Experiment 20001557 PARAMETER Experiment Name: At_Drought_Soil_Dry_P Parameter: Post-Treatment Value: Re-Water vs. No Drought
  misc_feature: MA Experiment 20001557 PARAMETER Experiment Name: At_Drought_Soil_Dry_P Parameter: Timepoint (day) Value: 13
  misc_feature: MA Experiment 20001557 PARAMETER Experiment Name: At_Drought_Soil_Dry_P Parameter: Treatment Value: Drought vs. No Drought
  misc_feature: MA Experiment ID: 20001560 Result: Up-regulated in Transcription
  misc_feature: MA Experiment 20001560 PARAMETER Experiment Name: At_Drought_Soil_Dry_P Parameter: Age (day) Value: 28
  misc_feature: MA Experiment 20001560 PARAMETER Experiment Name: At_Drought_Soil_Dry_P Parameter: Organism Value: A. thaliana
  misc_feature: MA Experiment 20001560 PARAMETER Experiment Name: At_Drought_Soil_Dry_P Parameter: Plant Line Value: WS
  misc_feature: MA Experiment 20001560 PARAMETER Experiment Name: At_Drought_Soil_Dry_P Parameter: Post Timepoint (hr) Value: None
  misc_feature: MA Experiment 20001560 PARAMETER Experiment Name: At_Drought_Soil_Dry_P Parameter: Post-Treatment Value: None
  misc_feature: MA Experiment 20001560 PARAMETER Experiment Name: At_Drought_Soil_Dry_P Parameter: Timepoint (day) Value: 14
  misc_feature: MA Experiment 20001560 PARAMETER Experiment Name: At_Drought_Soil_Dry_P Parameter: Treatment Value: Drought vs. No Drought
  misc_feature: MA Experiment ID: 20001904 Result: Down-regulated in Transcription
  misc_feature: MA Experiment 20001904 PARAMETER Experiment Name: At_Drought_Reproduction_P Parameter: Age (day) Value: 37
  misc_feature: MA Experiment 20001904 PARAMETER Experiment Name: At_Drought_Reproduction_P Parameter: Organism Value: A. thaliana
  misc_feature: MA Experiment 20001904 PARAMETER Experiment Name: At_Drought_Reproduction_P Parameter: Plant Line Value: WS
  misc_feature: MA Experiment 20001904 PARAMETER Experiment Name: At_Drought_Reproduction_P Parameter: Timepoint (day) Value: 7
  misc_feature: MA Experiment 20001904 PARAMETER Experiment Name: At_Drought_Reproduction_P Parameter: Tissue Value: Rosettes
  misc_feature: MA Experiment 20001904 PARAMETER Experiment Name: At_Drought_Reproduction_P Parameter: Treatment Value: Drought vs. No Drought
  misc_feature: MA Experiment ID: 20001905 Result: Down-regulated in Transcription
  misc_feature: MA Experiment 20001905 PARAMETER Experiment Name: At_Drought_Reproduction_P Parameter: Age (day) Value: 40
  misc_feature: MA Experiment 20001905 PARAMETER Experiment Name: At_Drought_Reproduction_P Parameter: Organism Value: A. thaliana
  misc_feature: MA Experiment 20001905 PARAMETER Experiment Name: At_Drought_Reproduction_P Parameter: Plant Line Value: WS
  misc_feature: MA Experiment 20001905 PARAMETER Experiment Name: At_Drought_Reproduction_P Parameter: Timepoint (day) Value: 10
  misc_feature: MA Experiment 20001905 PARAMETER Experiment Name: At_Drought_Reproduction_P Parameter: Tissue Value: Rosettes
  misc_feature: MA Experiment 20001905 PARAMETER Experiment Name: At_Drought_Reproduction_P Parameter: Treatment Value: Drought vs. No Drought
  misc_feature: MA Experiment ID: 20001911 Result: Down-regulated in Transcription
  misc_feature: MA Experiment 20001911 PARAMETER Experiment Name: At_Drought_Reproduction_P Parameter: Age (day) Value: 40
  misc_feature: MA Experiment 20001911 PARAMETER Experiment Name: At_Drought_Reproduction_P Parameter: Organism Value: A. thaliana
  misc_feature: MA Experiment 20001911 PARAMETER Experiment Name: At_Drought_Reproduction_P Parameter: Plant Line Value: WS
  misc_feature: MA Experiment 20001911 PARAMETER Experiment Name: At_Drought_Reproduction_P Parameter: Timepoint (day) Value: 10
  misc_feature: MA Experiment 20001911 PARAMETER Experiment Name: At_Drought_Reproduction_P Parameter: Tissue Value: Flowers
  misc_feature: MA Experiment 20001911 PARAMETER Experiment Name: At_Drought_Reproduction_P Parameter: Treatment Value: Drought vs. No Drought
aacatcttcttcttcttcatcaaatctcacaaatcttcatcacttattcacaaatctcaaagcttcggatactaaatggctcgtaccaagcaaaccgcaaggaaatccaccggaggaaaagccccaaggaaacaactcgcaacaaaggcggcgaggaaatcagctccggcgaccggaggagtgaagaagccacacagattccgtcctggaactgttgccctaagagaaatcaggaagtatcagaagagcactgagcttctgattcgcaagcttccgttccagcgtttggttcgtgagatcgctcaggatttcaaaacagatctgcgtttccagagcagcgccgtcgcagcacttcaggaagcggctgaagcatacctcgttggattgtttgaagacaccaatctttgcgcgattcatgctaagagagtcactatcatgcctaaggatattcaattggcgaggagaattagaggcgagagggcttaagaaggagattgaagtactctagactgtgatcgttatgcttatgtatatttttcgttttccctaatttcgtgttttagggttggattaggttttgcgtttatgttgttcgatgaaatgcctcaatgaatcttaattaagtctgttttcgaattt

SEQ ID NO: 22253 - protein, 136 aa, Arabidopsis thaliana; identical to SEQ ID NO: 8709
  peptide (1)..(136): Ceres Seq. ID no. 13580411
  misc_feature (17)..(135): Pfam Name: Core histone H2A/H2B/H3/H4 Pfam Description: Core histone H2A/H2B/H3/H4
  misc_feature (17)..(135): Pfam Name: Core histone H2A/H2B/H3/H4 Pfam Description: Core histone H2A/H2B/H3/H4
  misc_feature (17)..(135): Pfam Name: Core histone H2A/H2B/H3/H4 Pfam Description: Core histone H2A/H2B/H3/H4
  misc_feature (1)..(136): Homolog of NCBI NO: 7305139 NR Description: histone 1, H3f; histone H3; histone gene complex
  misc_feature (1)..(136): Homolog of NCBI NO: 122070 NR Description: Histone H3
  misc_feature (1)..(136): Homolog of NCBI NO: 34876396 NR Description: similar to H3 histone family, member I [Rattus
  misc_feature (1)..(136): Homolog of NCBI NO: 37546835 NR Description: similar to histone protein Hist2h3c1 [Homo
  misc_feature (2)..(136): Homolog of NCBI NO: 122083 NR Description: Histone H3
  misc_feature (1)..(136): Homolog of NCBI NO: 7305139 NR Description: histone 1, H3f; histone H3; histone gene complex
  misc_feature (1)..(136): Homolog of NCBI NO: 34876396 NR Description: similar to H3 histone family, member I [Rattus
  misc_feature (2)..(136): Homolog of NCBI NO: 122083 NR Description: Histone H3
  misc_feature (2)..(136): Homolog of NCBI NO: 70753 NR Description: histone H3 - garden pea (tentative sequence)
  misc_feature (2)..(136): Homolog of NCBI NO: 122083 NR Description: Histone H3
  misc_feature (1)..(136): Homolog of NCBI NO: 37546835 NR Description: similar to histone protein Hist2h3c1 [Homo
  misc_feature (1)..(136): Homolog of NCBI NO: 34876396 NR Description: similar to H3 histone family, member I [Rattus
  misc_feature (1)..(136): Homolog of NCBI NO: 15232146 NR Description: histone H3 [Arabidopsis thaliana]
  misc_feature (1)..(136): Homolog of NCBI NO: 122087 NR Description: Histone H3
  misc_feature (1)..(136): Homolog of NCBI NO: 1362108 NR Description: histone H3 homolog - common tobacco
  misc_feature (1)..(136): Homolog of NCBI NO: 166384 NR Description: histone H3 (H3-1.1)
  misc_feature (2)..(136): Homolog of NCBI NO: 70753 NR Description: histone H3 - garden pea (tentative sequence)
  misc_feature (1)..(136): Homolog of NCBI NO: 122070 NR Description: Histone H3
  misc_feature (1)..(136): Homolog of NCBI NO: 7305139 NR Description: histone 1, H3f; histone H3; histone gene complex
  misc_feature (1)..(136): Homolog of NCBI NO: 15232146 NR Description: histone H3 [Arabidopsis thaliana]
  misc_feature (1)..(136): Homolog of NCBI NO: 122087 NR Description: Histone H3
  misc_feature (1)..(136): Homolog of NCBI NO: 1362108 NR Description: histone H3 homolog - common tobacco
  misc_feature (1)..(136): Homolog of NCBI NO: 166384 NR Description: histone H3 (H3-1.1)
  misc_feature (1)..(136): Homolog of NCBI NO: 37546835 NR Description: similar to histone protein Hist2h3c1 [Homo
  misc_feature (1)..(136): Homolog of NCBI NO: 122070 NR Description: Histone H3
  misc_feature (2)..(136): Homolog of NCBI NO: 70753 NR Description: histone H3 - garden pea (tentative sequence)
  misc_feature (1)..(136): Homolog of NCBI NO: 166384 NR Description: histone H3 (H3-1.1)
  misc_feature (1)..(136): Homolog of NCBI NO: 1362108 NR Description: histone H3 homolog - common tobacco
  misc_feature (1)..(136): Homolog of NCBI NO: 122087 NR Description: Histone H3
  misc_feature (1)..(136): Homolog of NCBI NO: 15232146 NR Description: histone H3 [Arabidopsis thaliana]

SEQ ID NO: 22254 - protein, 83 aa, Arabidopsis thaliana
  peptide (1)..(83): Ceres Seq. ID no. 13580412
HLLLLHQISQIFITYSQISKLRILNGSYQANRKEIHRRKSPKETTRNKGGEEISSGDRRSEEATQIPSWNCCPKRNQEVSEEH

SEQ ID NO: 22255 - DNA, 2067 bp, Arabidopsis thaliana
  misc_feature (1)..(2067): Ceres Seq. ID no. 13495763
  misc_feature: MA Experiment ID: 108461 Result: Up-regulated in Transcription
  misc_feature: MA Experiment 108461 PARAMETER Experiment Name: At_Germinating_Seeds_cDNA_P Parameter: Age (day) Value: 1 vs. 0
  misc_feature: MA Experiment 108461 PARAMETER Experiment Name: At_Germinating_Seeds_cDNA_P Parameter: Tissue Value: Germinating Seeds
  misc_feature: MA Experiment ID: 108463 Result: Up-regulated in Transcription
  misc_feature: MA Experiment 108463 PARAMETER Experiment Name: At_Germinating_Seeds_cDNA_P Parameter: Age (day) Value: 3 vs. 0
  misc_feature: MA Experiment 108463 PARAMETER Experiment Name: At_Germinating_Seeds_cDNA_P Parameter: Tissue Value: Germinating Seeds
  misc_feature: MA Experiment ID: 108464 Result: Up-regulated in Transcription
  misc_feature: MA Experiment 108464 PARAMETER Experiment Name: At_Germinating_Seeds_cDNA_P Parameter: Age (day) Value: 4 vs. 0
  misc_feature: MA Experiment 108464 PARAMETER Experiment Name: At_Germinating_Seeds_cDNA_P Parameter: Tissue Value: Germinating Seeds
  misc_feature: MA Experiment ID: 108573 Result: Up-regulated in Transcription
  misc_feature: MA Experiment 108573 PARAMETER Experiment Name: At_Drought_cDNA_P Parameter: Timepoint (hr) Value: 6
  misc_feature: MA Experiment 108573 PARAMETER Experiment Name: At_Drought_cDNA_P Parameter: Tissue Value: Aerial
  misc_feature: MA Experiment 108573 PARAMETER Experiment Name: At_Drought_cDNA_P Parameter: Treatment Value: Drought vs. No Drought
  misc_feature: MA Experiment ID: 20000113 Result: Down-regulated in Transcription
  misc_feature: MA Experiment 20000113 PARAMETER Experiment Name: At_42deg_Heat_cDNA_P Parameter: Temperature (deg C) Value: 42 vs. 22
  misc_feature: MA Experiment 20000113 PARAMETER Experiment Name: At_42deg_Heat_cDNA_P Parameter: Timepoint (hr) Value: 8
  misc_feature: MA Experiment 20000113 PARAMETER Experiment Name: At_42deg_Heat_cDNA_P Parameter: Tissue Value: Aerial
  misc_feature: MA Experiment ID: 20000224 Result: Up-regulated in Transcription
  misc_feature: MA Experiment ID: 20000306 Result: Up-regulated in Transcription
  misc_feature: MA Experiment 20000306 PARAMETER Experiment Name: At_Germinating_Seeds_Sub_P Parameter: Age (hr) Value: 6 vs. 0
  misc_feature: MA Experiment 20000306 PARAMETER Experiment Name: At_Germinating_Seeds_Sub_P Parameter: Organism Value: A. thaliana
  misc_feature: MA Experiment 20000306 PARAMETER Experiment Name: At_Germinating_Seeds_Sub_P Parameter: Plant Line Value: WS
  misc_feature: MA Experiment 20000306 PARAMETER Experiment Name: At_Germinating_Seeds_Sub_P Parameter: Tissue Value: Germinating Seeds
  misc_feature: MA Experiment ID: 20000307 Result: Up-regulated in Transcription
  misc_feature: MA Experiment 20000307 PARAMETER Experiment Name: At_Germinating_Seeds_Sub_P Parameter: Age (hr) Value: 24 vs. 0
  misc_feature: MA Experiment 20000307 PARAMETER Experiment Name: At_Germinating_Seeds_Sub_P Parameter: Organism Value: A. thaliana
  misc_feature: MA Experiment 20000307 PARAMETER Experiment Name: At_Germinating_Seeds_Sub_P Parameter: Plant Line Value: WS
  misc_feature: MA Experiment 20000307 PARAMETER Experiment Name: At_Germinating_Seeds_Sub_P Parameter: Tissue Value: Germinating Seeds
  misc_feature: MA Experiment ID: 20000314 Result: Up-regulated in Transcription
  misc_feature: MA Experiment 20000314 PARAMETER Experiment Name: At_14day_Shoots-Roots_Sub_P Parameter: Age (day) Value: 14
  misc_feature: MA Experiment 20000314 PARAMETER Experiment Name: At_14day_Shoots-Roots_Sub_P Parameter: Organism Value: A. thaliana
  misc_feature: MA Experiment 20000314 PARAMETER Experiment Name: At_14day_Shoots-Roots_Sub_P Parameter: Plant Line Value: WS
  misc_feature: MA Experiment 20000314 PARAMETER Experiment Name: At_14day_Shoots-Roots_Sub_P Parameter: Tissue Value: Roots vs. Whole Plant
  misc_feature: MA Experiment ID: 20000328 Result: Down-regulated in Transcription
  misc_feature: MA Experiment 20000328 PARAMETER Experiment Name: At_42deg_Heat_Sub_P Parameter: Age (day) Value: 14
  misc_feature: MA Experiment 20000328 PARAMETER Experiment Name: At_42deg_Heat_Sub_P Parameter: Organism Value: A. thaliana
  misc_feature: MA Experiment 20000328 PARAMETER Experiment Name: At_42deg_Heat_Sub_P Parameter: Plant Line Value: WS
  misc_feature: MA Experiment 20000328 PARAMETER Experiment Name: At_42deg_Heat_Sub_P Parameter: Temperature (deg C) Value: 42 vs. 22
  misc_feature: MA Experiment 20000328 PARAMETER Experiment Name: At_42deg_Heat_Sub_P Parameter: Timepoint (hr) Value: 6
  misc_feature: MA Experiment 20000328 PARAMETER Experiment Name: At_42deg_Heat_Sub_P Parameter: Tissue Value: Aerial
  misc_feature: MA Experiment ID: 20000440 Result: Up-regulated in Transcription
  misc_feature: MA Experiment 20000440 PARAMETER Experiment Name: At_Closed-Flower__Sub_P Parameter: Tissue Value: Closed Flower vs. Whole Plant
atgaacaaaaacatcctctgtttctctcttttcatatttttctccacatttcctcatctgggtcatctccaaaaatgatttgatgataacccaaattcgcaatttgattaggacaacaacaacaactttatttatctgattccgtctttgattttcagacaagaaaaaaaaaaaaaagatggaatcggatctggggaagctcttcattggtgggatttcgtgggatacagacgaagaaaggttaagagactactttagcaactatggtgatgttgttgaagctgtgatcatgagagatcgtgccacaggtcgtgcacgtggcttcggcttcattgtctttgcagacccctgtgtctcagagagagtgatcatggataaacacatcatcgatggccgcacggttgaggcgaagaaggctgtgcctcgagatgatcagcaggtgctaaagcgacacgctagtcctatccaccttatgtcacctgtccatggtggtggtggaaggacaaagaagatcttcgttggaggtttaccgtctagcattaccgaggaggagttcaagaactactttgatcagtttggtactattgctgatgttgttgtaatgtatgatcataacacgcagaggccaagaggttttggcttcatcacatttgattcagatgatgctgttgatagagttcttcacaagaccttccatgagctcaatgggaaactagttgaggtcaaaagagctgtacctaaggagatttcccctgtttctaatatccgaagcccgcttgctagcggtgttaactatggaggcgggtctaataggatgcctgctaatagctactttaacaactttgctcctggtcctggtttttataacagtctaggtcctgttggtcgtcggtttagtcctgttattggtagtggtagaaatgcggtttctgcttttggcctcgttttgaatcatgacttgagtttgaatttgaatccaagctgcgatgggacaagttctacgtttggttataaccgtattccaagcaacccttacttcaacggtgcttccccgaaccgttacacctctccaatcgggcacaatagaactgagtctccttacaattcgaacaatagagacttatggggaaacagaaccgacactgcaggtcccggttggaacttgaatgtctcgaatggaaacaacagaggaaattggggacttccttcttcttctgctgttagtaatgataacaatggctttggaaggaactatgggacaagttctggactttcctcgtccccatttaatggttttgaaggttctataggggaactgtacagaggcggctcagtctacagcgactcaacgtggcagcaacagcagctaccatctcagtcttctcacgagctagacaatttgtctcgcgcttacggttatgatattgacaatgtaggttcagacccatctgcaaatgacccagaaacttacaatggaagctacaatgttggaaatagacaaactaatagaggtattgctgcataggttatcaaaaaccaagaaaacaaaaaaaaaagttgagagatttgtagattgaaagcaaccaaatttcagttgcagagtttgaacaggttctcatgacaaagaaaccaactttgttgatcacagtgccaaagattatggtttgctttctcttttgttagaccaaaaaaaaaaaaaaaaaagagaaaaacaaagaaccgtttttgtttttcttcttcttacataaagatcagatcgtagcagccagacaaccaaagatactacaaggtggatttagatttgcttctcaaaaaagtttttttttttctttcatagaataaccaaacaaagatcgtagaattttcgatcaaagattcttcagagttctgtgctctgttttgtaattgtactttttttttcttgtttacaaaatgaattgttcatgaaaactttgttttcttaaaaaaaaaattagcgtgggagaaatattgtgtaagagagggatatgactattttgttgcatgtatccctaatgagatatatatatatatatatttttttaaagc

SEQ ID NO: 22256 - protein, 448 aa, Arabidopsis thaliana
  peptide (1)..(448): Ceres Seq. ID no. 13495764
  misc_feature (112)..(182): Pfam Name: RNA recognition motif. (a.k.a. RRM, RBD, or RNP domain) Pfam Description: RNA recognition motif. (a.k.a. RRM, RBD, or RNP
  misc_feature (1)..(415): Homolog of NCBI NO: 18398061 NR Description: heterogeneous nuclear ribonucleoprotein (hnRNP),
  misc_feature (1)..(415): Homolog of NCBI NO: 30680456 NR Description: heterogeneous nuclear ribonucleoprotein (hnRNP),
  misc_feature (1)..(415): Homolog of NCBI NO: 6648193 NR Description: putative RNA-binding protein [Arabidopsis
  misc_feature (65)..(448): Homolog of NCBI NO: 2582639 NR Description: hnRNP-like protein [Arabidopsis thaliana]
  misc_feature (1)..(448): Homolog of NCBI NO: 18416794 NR Description: heterogeneous nuclear ribonucleoprotein (hnRNP),
  misc_feature (3)..(448): Homolog of NCBI NO: 7487039 NR Description: hypothetical protein T15N24.100 - Arabidopsis
  misc_feature (1)..(445): Homolog of NCBI NO: 18423760 NR Description: RNA recognition motif (RRM)-containing protein
  misc_feature (1)..(448): Homolog of NCBI NO: 30696616 NR Description: RNA recognition motif (RRM)-containing protein
  misc_feature (1)..(448): Homolog of NCBI NO: 22531168 NR Description: RNA-binding protein-like [Arabidopsis thaliana]
  misc_feature (1)..(444): Homolog of NCBI NO: 9758187 NR Description: RNA-binding protein-like [Arabidopsis thaliana]
MESDLGKLFIGGISWDTDEERLRDYFSNYGDVVEAVIMRDRATGRARGFGFIVFADPCVSERVIMDKHIIDGRTVEAKKAVPRDDQQVLKRHASPIHLMSPVHGGGGRTKKIFVGGLPSSITEEEFKNYFDQFGTIADVVVMYDHNTQRPRGFGFITFDSDDAVDRVLHKTFHELNGKLVEVKRAVPKEISPVSNIRSPLASGVNYGGGSNRMPANSYFNNFAPGPGFYNSLGPVGRRFSPVIGSGRNAVSAFGLVLNHDLSLNLNPSCDGTSSTFGYNRIPSNPYFNGASPNRYTSPIGHNRTESPYNSNNRDLWGNRTDTAGPGWNLNVSNGNNRGNWGLPSSSAVSNDNNGFGRNYGTSSGLSSSPFNGFEGSIGELYRGGSVYSDSTWQQQQLPSQSSHELDNLSRAYGYDIDNVGSDPSANDPETYNGSYNVGNRQTNRGIAA

SEQ ID NO: 22257 - protein, 411 aa, Arabidopsis thaliana
  peptide (1)..(411): Ceres Seq. ID no. 13495765
  misc_feature (75)..(145): Pfam Name: RNA recognition motif. (a.k.a. RRM, RBD, or RNP domain) Pfam Description: RNA recognition motif. (a.k.a. RRM, RBD, or RNP
  misc_feature (1)..(378): Homolog of NCBI NO: 18398061 NR Description: heterogeneous nuclear ribonucleoprotein (hnRNP),
  misc_feature (1)..(378): Homolog of NCBI NO: 30680456 NR Description: heterogeneous nuclear ribonucleoprotein (hnRNP),
  misc_feature (1)..(378): Homolog of NCBI NO: 6648193 NR Description: putative RNA-binding protein [Arabidopsis
  misc_feature (28)..(411): Homolog of NCBI NO: 2582639 NR Description: hnRNP-like protein [Arabidopsis thaliana]
  misc_feature (1)..(411): Homolog of NCBI NO: 18416794 NR Description: heterogeneous nuclear ribonucleoprotein (hnRNP),
  misc_feature (1)..(411): Homolog of NCBI NO: 7487039 NR Description: hypothetical protein T15N24.100 - Arabidopsis
  misc_feature (1)..(408): Homolog of NCBI NO: 18423760 NR Description: RNA recognition motif (RRM)-containing protein
  misc_feature (1)..(411): Homolog of NCBI NO: 30696616 NR Description: RNA recognition motif (RRM)-containing protein
  misc_feature (1)..(411): Homolog of NCBI NO: 22531168 NR Description: RNA-binding protein-like [Arabidopsis thaliana]
  misc_feature (1)..(407): Homolog of NCBI NO: 9758187 NR Description: RNA-binding protein-like [Arabidopsis thaliana]
MRDRATGRARGFGFIVFADPCVSERVIMDKHIIDGRTVEAKKAVPRDDQQVLKRHASPIHLMSPVHGGGGRTKKIFVGGLPSSITEEEFKNYFDQFGTIADVVVMYDHNTQRPRGFGFITFDSDDAVDRVLHKTFHELNGKLVEVKRAVPKEISPVSNIRSPLASGVNYGGGSNRMPANSYFNNFAPGPGFYNSLGPVGRRFSPVIGSGRNAVSAFGLVLNHDLSLNLNPSCDGTSSTFGYNRIPSNPYFNGASPNRYTSPIGHNRTESPYNSNNRDLWGNRTDTAGPGWNLNVSNGNNRGNWGLPSSSAVSNDNNGFGRNYGTSSGLSSSPFNGFEGSIGELYRGGSVYSDSTWQQQQLPSQSSHELDNLSRAYGYDIDNVGSDPSANDPETYNGSYNVGNRQTNRGIAA

SEQ ID NO: 22258 - protein, 384 aa, Arabidopsis thaliana
  peptide (1)..(384): Ceres Seq. ID no. 13495766
  misc_feature (48)..(118): Pfam Name: RNA recognition motif. (a.k.a. RRM, RBD, or RNP domain) Pfam Description: RNA recognition motif. (a.k.a. RRM, RBD, or RNP
  misc_feature (1)..(380): Homolog of NCBI NO: 9758187 NR Description: RNA-binding protein-like [Arabidopsis thaliana]
  misc_feature (1)..(351): Homolog of NCBI NO: 18398061 NR Description: heterogeneous nuclear ribonucleoprotein (hnRNP),
  misc_feature (1)..(351): Homolog of NCBI NO: 30680456 NR Description: heterogeneous nuclear ribonucleoprotein (hnRNP),
  misc_feature (1)..(351): Homolog of NCBI NO: 6648193 NR Description: putative RNA-binding protein [Arabidopsis
  misc_feature (1)..(384): Homolog of NCBI NO: 2582639 NR Description: hnRNP-like protein [Arabidopsis thaliana]
  misc_feature (1)..(384): Homolog of NCBI NO: 18416794 NR Description: heterogeneous nuclear ribonucleoprotein (hnRNP),
  misc_feature (1)..(384): Homolog of NCBI NO: 7487039 NR Description: hypothetical protein T15N24.100 - Arabidopsis
  misc_feature (1)..(381): Homolog of NCBI NO: 18423760 NR Description: RNA recognition motif (RRM)-containing protein
  misc_feature (1)..(384): Homolog of NCBI NO: 30696616 NR Description: RNA recognition motif (RRM)-containing protein
  misc_feature (1)..(384): Homolog of NCBI NO: 22531168 NR Description: RNA-binding protein-like [Arabidopsis thaliana]
MDKHIIDGRTVEAKKAVPRDDQQVLKRHASPIHLMSPVHGGGGRTKKIFVGGLPSSITEEEFKNYFDQFGTIADVVVMYDHNTQRPRGFGFITFDSDDAVDRVLHKTFHELNGKLVEVKRAVPKEISPVSNIRSPLASGVNYGGGSNRMPANSYFNNFAPGPGFYNSLGPVGRRFSPVIGSGRNAVSAFGLVLNHDLSLNLNPSCDGTSSTFGYNRIPSNPYFNGASPNRYTSPIGHNRTESPYNSNNRDLWGNRTDTAGPGWNLNVSNGNNRGNWGLPSSSAVSNDNNGFGRNYGTSSGLSSSPFNGFEGSIGELYRGGSVYSDSTWQQQQLPSQSSHELDNLSRAYGYDIDNVGSDPSANDPETYNGSYNVGNRQTNRGIAA

SEQ ID NO: 22259 - DNA, 1100 bp, Arabidopsis thaliana
  misc_feature (1)..(1100): Ceres Seq. ID no. 12334822
  misc_feature: MA Experiment ID: 108433 Result: Up-regulated in Transcription
  misc_feature: MA Experiment 108433 PARAMETER Experiment Name: At_rhl_Mutant2_cDNA_P Parameter: Age (day) Value: 7
  misc_feature: MA Experiment 108433 PARAMETER Experiment Name: At_rhl_Mutant2_cDNA_P Parameter: Organism Value: A. thaliana
  misc_feature: MA Experiment 108433 PARAMETER Experiment Name: At_rhl_Mutant2_cDNA_P Parameter: Plant Line Value: rhl Mutant vs. wt landsburg
  misc_feature: MA Experiment 108433 PARAMETER Experiment Name: At_rhl_Mutant2_cDNA_P Parameter: Tissue Value: Roots
  misc_feature: MA Experiment ID: 108434 Result: Down-regulated in Transcription
  misc_feature: MA Experiment 108434 PARAMETER Experiment Name: At_Root_Tips_cDNA_P Parameter: Tissue Value: Root Tips
  misc_feature: MA Experiment ID: 108461 Result: Up-regulated in Transcription
  misc_feature: MA Experiment 108461 PARAMETER Experiment Name: At_Germinating_Seeds_cDNA_P Parameter: Age (day) Value: 1 vs. 0
  misc_feature: MA Experiment 108461 PARAMETER Experiment Name: At_Germinating_Seeds_cDNA_P Parameter: Tissue Value: Germinating Seeds
  misc_feature: MA Experiment ID: 108462 Result: Up-regulated in Transcription
  misc_feature: MA Experiment 108462 PARAMETER Experiment Name: At_Germinating_Seeds_cDNA_P Parameter: Age (day) Value: 2 vs. 0
  misc_feature: MA Experiment 108462 PARAMETER Experiment Name: At_Germinating_Seeds_cDNA_P Parameter: Tissue Value: Germinating Seeds
  misc_feature: MA Experiment ID: 108463 Result: Up-regulated in Transcription
  misc_feature: MA Experiment 108463 PARAMETER Experiment Name: At_Germinating_Seeds_cDNA_P Parameter: Age (day) Value: 3 vs. 0
  misc_feature: MA Experiment 108463 PARAMETER Experiment Name: At_Germinating_Seeds_cDNA_P Parameter: Tissue Value: Germinating Seeds
  misc_feature: MA Experiment ID: 108594 Result: Down-regulated in Transcription
  misc_feature: MA Experiment 108594 PARAMETER Experiment Name: At_Ler-rhl_Root_cDNA_P Parameter: Plant Line Value: null
  misc_feature: MA Experiment ID: 20000069 Result: Up-regulated in Transcription
  misc_feature: MA Experiment 20000069 PARAMETER Experiment Name: At_100uM_ABA_Mutants_cDNA_P Parameter: Plant Line Value: CS23
  misc_feature: MA Experiment 20000069 PARAMETER Experiment Name: At_100uM_ABA_Mutants_cDNA_P Parameter: Timepoint (hr) Value: 6
  misc_feature: MA Experiment 20000069 PARAMETER Experiment Name: At_100uM_ABA_Mutants_cDNA_P Parameter: Tissue Value: Aerial
  misc_feature: MA Experiment 20000069 PARAMETER Experiment Name: At_100uM_ABA_Mutants_cDNA_P Parameter: Treatment Value: 100uM ABA vs. No Treatment
  misc_feature: MA Experiment ID: 20000087 Result: Up-regulated in Transcription
  misc_feature: MA Experiment 20000087 PARAMETER Experiment Name: At_100uM_ABA_Mutants_cDNA_P Parameter: Plant Line Value: WS
  misc_feature: MA Experiment 20000087 PARAMETER Experiment Name: At_100uM_ABA_Mutants_cDNA_P Parameter: Timepoint (hr) Value: 6
  misc_feature: MA Experiment 20000087 PARAMETER Experiment Name: At_100uM_ABA_Mutants_cDNA_P Parameter: Tissue Value: Aerial
  misc_feature: MA Experiment 20000087 PARAMETER Experiment Name: At_100uM_ABA_Mutants_cDNA_P Parameter: Treatment Value: 100uM ABA vs. No Treatment
  misc_feature: MA Experiment ID: 20000113 Result: Down-regulated in Transcription
  misc_feature: MA Experiment 20000113 PARAMETER Experiment Name: At_42deg_Heat_cDNA_P Parameter: Temperature (deg C) Value: 42 vs. 22
  misc_feature: MA Experiment 20000113 PARAMETER Experiment Name: At_42deg_Heat_cDNA_P Parameter: Timepoint (hr) Value: 8
  misc_feature: MA Experiment 20000113 PARAMETER Experiment Name: At_42deg_Heat_cDNA_P Parameter: Tissue Value: Aerial
  misc_feature: MA Experiment ID: 20000180 Result: Up-regulated in Transcription
  misc_feature: MA Experiment 20000180 PARAMETER Experiment Name: At_Germinating_Seeds_P Parameter: Age (hr) Value: 24 vs. 0
  misc_feature: MA Experiment 20000180 PARAMETER Experiment Name: At_Germinating_Seeds_P Parameter: Tissue Value: Germinating Seeds
  misc_feature: MA Experiment ID: 20000185 Result: Up-regulated in Transcription
  misc_feature: MA Experiment 20000185 PARAMETER Experiment Name: At_Roots__P Parameter: Age (day) Value: 7 vs. 21
  misc_feature: MA Experiment 20000185 PARAMETER Experiment Name: At_Roots__P Parameter: Organism Value: A. thaliana
  misc_feature: MA Experiment 20000185 PARAMETER Experiment Name: At_Roots__P Parameter: Tissue Value: Roots vs. Whole Plant
  misc_feature: MA Experiment ID: 20000224 Result: Up-regulated in Transcription
  misc_feature: MA Experiment ID: 20000227 Result: Up-regulated in Transcription
  misc_feature: MA Experiment 20000227 PARAMETER Experiment Name: At_Root-Tips-vs-Tops_P Parameter: Tissue Value: Root Tips vs. Root Tops
  misc_feature: MA Experiment ID: 20000264 Result: Down-regulated in Transcription
  misc_feature: MA Experiment 20000264 PARAMETER Experiment Name: At_Open_Flower_P Parameter: Age (day) Value: 21
  misc_feature: MA Experiment 20000264 PARAMETER Experiment Name: At_Open_Flower_P Parameter: Plant Line Value: WS
  misc_feature: MA Experiment 20000264 PARAMETER Experiment Name: At_Open_Flower_P Parameter: Tissue Value: Open Flower vs. Whole Plant
  misc_feature: MA Experiment ID: 20000438 Result: Down-regulated in Transcription
  misc_feature: MA Experiment 20000438 PARAMETER Experiment Name: At_Shoots__P Parameter: Age (day) Value: 14
  misc_feature: MA Experiment 20000438 PARAMETER Experiment Name: At_Shoots__P Parameter: Tissue Value: Shoots vs. Whole Plant
  misc_feature: MA Experiment ID: 20000439 Result: Up-regulated in Transcription
  misc_feature: MA Experiment 20000439 PARAMETER Experiment Name: At_Roots__P Parameter: Age (day) Value: 14 vs. 21
  misc_feature: MA Experiment 20000439 PARAMETER Experiment Name: At_Roots__P Parameter: Organism Value: A. thaliana
  misc_feature: MA Experiment 20000439 PARAMETER Experiment Name: At_Roots__P Parameter: Tissue Value: Roots vs. Whole Plant
  misc_feature: MA Experiment ID: 20000451 Result: Down-regulated in Transcription
  misc_feature: MA Experiment 20000451 PARAMETER Experiment Name: At_CS6879_Shoots-Roots_P Parameter: Age (day) Value: 14
  misc_feature: MA Experiment 20000451 PARAMETER Experiment Name: At_CS6879_Shoots-Roots_P Parameter: Organism Value: A. thaliana
  misc_feature: MA Experiment 20000451 PARAMETER Experiment Name: At_CS6879_Shoots-Roots_P Parameter: Plant Line Value: CS6879 vs. WS
  misc_feature: MA Experiment 20000451 PARAMETER Experiment Name: At_CS6879_Shoots-Roots_P Parameter: Tissue Value: Roots
  misc_feature: MA Experiment ID: 20000453 Result: Up-regulated in Transcription
  misc_feature: MA Experiment 20000453 PARAMETER Experiment Name: At_100uM_ABA_P Parameter: Age (day) Value: 15
  misc_feature: MA Experiment 20000453 PARAMETER Experiment Name: At_100uM_ABA_P Parameter: Organism Value: A. thaliana
  misc_feature: MA Experiment 20000453 PARAMETER Experiment Name: At_100uM_ABA_P Parameter: Plant Line Value: WS
  misc_feature: MA Experiment 20000453 PARAMETER Experiment Name: At_100uM_ABA_P Parameter: Timepoint (hr) Value: 24
  misc_feature: MA Experiment 20000453 PARAMETER Experiment Name: At_100uM_ABA_P Parameter: Tissue Value: Aerial
  misc_feature: MA Experiment 20000453 PARAMETER Experiment Name: At_100uM_ABA_P Parameter: Treatment Value: 100uM ABA vs. No Treatment
  misc_feature: MA Experiment ID: 20000794 Result: Down-regulated in Transcription
  misc_feature: MA Experiment 20000794 PARAMETER Experiment Name: At_Petals_P Parameter: Age (day) Value: 23-25 days
  misc_feature: MA Experiment 20000794 PARAMETER Experiment Name: At_Petals_P Parameter: Plant Line Value: WS
  misc_feature: MA Experiment 20000794 PARAMETER Experiment Name: At_Petals_P Parameter: Tissue Value: Petals vs. Whole plant
  misc_feature: MA Experiment ID: 20001556 Result: Down-regulated in Transcription
  misc_feature: MA Experiment 20001556 PARAMETER Experiment Name: At_Drought_Soil_Dry_P Parameter: Age (day) Value: 26
  misc_feature: MA Experiment 20001556 PARAMETER Experiment Name: At_Drought_Soil_Dry_P Parameter: Organism Value: A. thaliana
  misc_feature: MA Experiment 20001556 PARAMETER Experiment Name: At_Drought_Soil_Dry_P Parameter: Plant Line Value: WS
  misc_feature: MA Experiment 20001556 PARAMETER Experiment Name: At_Drought_Soil_Dry_P Parameter: Post Timepoint (hr) Value: None
  misc_feature: MA Experiment 20001556 PARAMETER Experiment Name: At_Drought_Soil_Dry_P Parameter: Post-Treatment Value: None
  misc_feature: MA Experiment 20001556 PARAMETER Experiment Name: At_Drought_Soil_Dry_P Parameter: Timepoint (day) Value: 12
  misc_feature: MA Experiment 20001556 PARAMETER Experiment Name: At_Drought_Soil_Dry_P Parameter: Treatment Value: Drought vs. No Drought
  misc_feature: MA Experiment ID: 20001557 Result: Down-regulated in Transcription
  misc_feature: MA Experiment 20001557 PARAMETER Experiment Name: At_Drought_Soil_Dry_P Parameter: Age (day) Value: 27
  misc_feature: MA Experiment 20001557 PARAMETER Experiment Name: At_Drought_Soil_Dry_P Parameter: Organism Value: A. thaliana
  misc_feature: MA Experiment 20001557 PARAMETER Experiment Name: At_Drought_Soil_Dry_P Parameter: Plant Line Value: WS
  misc_feature: MA Experiment 20001557 PARAMETER Experiment Name: At_Drought_Soil_Dry_P Parameter: Post Timepoint (hr) Value: 3
  misc_feature: MA Experiment 20001557 PARAMETER Experiment Name: At_Drought_Soil_Dry_P Parameter: Post-Treatment Value: Re-Water vs. No Drought
  misc_feature: MA Experiment 20001557 PARAMETER Experiment Name: At_Drought_Soil_Dry_P Parameter: Timepoint (day) Value: 13
  misc_feature: MA Experiment 20001557 PARAMETER Experiment Name: At_Drought_Soil_Dry_P Parameter: Treatment Value: Drought vs. No Drought
  misc_feature: MA Experiment ID: 20001558 Result: Down-regulated in Transcription
  misc_feature: MA Experiment 20001558 PARAMETER Experiment Name: At_Drought_Soil_Dry_P Parameter: Age (day) Value: 27
  misc_feature: MA Experiment 20001558 PARAMETER Experiment Name: At_Drought_Soil_Dry_P Parameter: Organism Value: A. thaliana
  misc_feature: MA Experiment 20001558 PARAMETER Experiment Name: At_Drought_Soil_Dry_P Parameter: Plant Line Value: WS
  misc_feature: MA Experiment 20001558 PARAMETER Experiment Name: At_Drought_Soil_Dry_P Parameter: Post Timepoint (hr) Value: 6
  misc_feature: MA Experiment 20001558 PARAMETER Experiment Name: At_Drought_Soil_Dry_P Parameter: Post-Treatment Value: Re-Water vs. No Drought
  misc_feature: MA Experiment 20001558 PARAMETER Experiment Name: At_Drought_Soil_Dry_P Parameter: Timepoint (day) Value: 13
  misc_feature: MA Experiment 20001558 PARAMETER Experiment Name: At_Drought_Soil_Dry_P Parameter: Treatment Value: Drought vs. No Drought
  misc_feature: MA Experiment ID: 20001560 Result: Down-regulated in Transcription
  misc_feature: MA Experiment 20001560 PARAMETER Experiment Name: At_Drought_Soil_Dry_P Parameter: Age (day) Value: 28
  misc_feature: MA Experiment 20001560 PARAMETER Experiment Name: At_Drought_Soil_Dry_P Parameter: Organism Value: A. thaliana
  misc_feature: MA Experiment 20001560 PARAMETER Experiment Name: At_Drought_Soil_Dry_P Parameter: Plant Line Value: WS
  misc_feature: MA Experiment 20001560 PARAMETER Experiment Name: At_Drought_Soil_Dry_P Parameter: Post Timepoint (hr) Value: None
  misc_feature: MA Experiment 20001560 PARAMETER Experiment Name: At_Drought_Soil_Dry_P Parameter: Post-Treatment Value: None
  misc_feature: MA Experiment 20001560 PARAMETER Experiment Name: At_Drought_Soil_Dry_P Parameter: Timepoint (day) Value: 14
  misc_feature: MA Experiment 20001560 PARAMETER Experiment Name: At_Drought_Soil_Dry_P Parameter: Treatment Value: Drought vs. No Drought
aaccaaaacattgatctatagagagagagagagaacaaaaaatgggagagagcaaacgcaccgagaaaacgcgcgttttggtggttggagcgactggatacatagggaagaggatagtaagggcgtgtttggctgaaggtcacgagacttacgttttgcagaggccagagattggtctcgaaatcgagaaagtccaactctttctttctttcaagaaactcggcgcacgtatcgttgaaggttctttctccgaccatcaaagcctcgtatccgccgtgaaacttgttgacgtcgttgtctccgccatgtccggtgttcacttccgtagccataacattctagtccagctcaagctcgtcgaagctatcaaagaggctggtaacgtaaagcggtttttaccatctgaatttggtatggatccaccacgtatgggacatgcgctaccgcccggaagagaaacctttgaccagaaaatggaagtgcgtcaggcgatagaggctgccggaattccttacacttacgttgtgggtgcttgctttgccgcctacttcgccggaaacttgtctcagatggtaactttacttcctccgaaagaaaaagttaatatttatggtgatggaaatgtaaaagtggtgtttgcggatgaagatgatatcgcaaaatacaccgcgaaaacgttaaacgatccacggacattaaacaaaaccgtgaatattagacctcccgacaacgttctcacgcagttggaattagttcagatctgggaaaagctaaccggaaaagaattggagaaaacaaatattgctgcacaagacttcctcgccaacattgaacaaatggagattccacaccaagcagggataggacatttctatcacattttctatgaaggatgtctcactgatcacgaagtcggagaagacgaagaagcttctagtctttatcctgacgtcaagtacaaacgcatggatgattacttaagaatgttcctctgatttgaccaagtcttatctatactaaatacacatatcaaaagtttgatgttttatattcattcatgttctgctatatatgcaaatttaaaaatatattcttcatgc

SEQ ID NO: 22260 - protein, 317 aa, Arabidopsis thaliana
  peptide (1)..(317): Ceres Seq. ID no. 12334823
  misc_feature (7)..(317): Pfam Name: Isoflavone reductase Pfam Description: Isoflavone reductase
  misc_feature (8)..(317): Homolog of NCBI NO: 7542585 NR Description: pinoresinol-lariciresinol reductase [Thuja
  misc_feature (8)..(317): Homolog of NCBI NO: 38492951 NR Description: Chain A, Crystal Structures Of And Phenylcoumaran Benzylic Ether Reductases, And Their
  misc_feature (8)..(317): Homolog of NCBI NO: 7542588 NR Description: pinoresinol-lariciresinol reductase [Thuja
  misc_feature (8)..(317): Homolog of NCBI NO: 7542583 NR Description: pinoresinol-lariciresinol reductase [Thuja
  misc_feature (10)..(317): Homolog of NCBI NO: 7578917 NR Description: pinoresinol-lariciresinol reductase TH2 [Tsuga
  misc_feature (9)..(317): Homolog of NCBI NO: 1769556 NR Description: Forsythia x intermedia
  misc_feature (9)..(317): Homolog of NCBI NO: 1708424 NR Description: ISOFLAVONE REDUCTASE HOMOLOG
  misc_feature (1)..(317): Homolog of NCBI NO: 15236330 NR Description: pinoresinol-lariciresinol reductase, putative
  misc_feature (1)..(317): Homolog of NCBI NO: 21592830 NR Description: pinoresinol-lariciresinol reductase, putative
  misc_feature (1)..(317): Homolog of NCBI NO: 15222571 NR Description: pinoresinol-lariciresinol reductase, putative
MGESKRTEKTRVLVVGATGYIGKRIVRACLAEGHETYVLQRPEIGLEIEKVQLFLSFKKLGARIVEGSFSDHQSLVSAVKLVDVVVSAMSGVHFRSHNILVQLKLVEAIKEAGNVKRFLPSEFGMDPPRMGHALPPGRETFDQKMEVRQAIEAAGIPYTYVVGACFAAYFAGNLSQMVTLLPPKEKVNIYGDGNVKVVFADEDDIAKYTAKTLNDPRTLNKTVNIRPPDNVLTQLELVQIWEKLTGKELEKTNIAAQDFLANIEQMEIPHQAGIGHFYHIFYEGCLTDHEVGEDEEASSLYPDVKYKRMDDYLRMFL

SEQ ID NO: 22261 - protein, 229 aa, Arabidopsis thaliana
  peptide (1)..(229): Ceres Seq. ID no. 12334824
  misc_feature (1)..(229): Pfam Name: Isoflavone reductase Pfam Description: Isoflavone reductase
  misc_feature (1)..(229): Homolog of NCBI NO: 7542585 NR Description: pinoresinol-lariciresinol reductase [Thuja
  misc_feature (1)..(229): Homolog of NCBI NO: 38492951 NR Description: Chain A, Crystal Structures Of And Phenylcoumaran Benzylic Ether Reductases, And Their
  misc_feature (1)..(229): Homolog of NCBI NO: 7542588 NR Description: pinoresinol-lariciresinol reductase [Thuja
  misc_feature (1)..(229): Homolog of NCBI NO: 7542583 NR Description: pinoresinol-lariciresinol reductase [Thuja
  misc_feature (1)..(229): Homolog of NCBI NO: 7578917 NR Description: pinoresinol-lariciresinol reductase TH2 [Tsuga
  misc_feature (1)..(229): Homolog of NCBI NO: 1769556 NR Description: Forsythia x intermedia
  misc_feature (1)..(229): Homolog of NCBI NO: 1708424 NR Description: ISOFLAVONE REDUCTASE HOMOLOG
  misc_feature (1)..(229): Homolog of NCBI NO: 15236330 NR Description: pinoresinol-lariciresinol reductase, putative
  misc_feature (1)..(229): Homolog of NCBI NO: 21592830 NR Description: pinoresinol-lariciresinol reductase, putative
  misc_feature (1)..(229): Homolog of NCBI NO: 15222571 NR Description: pinoresinol-lariciresinol reductase, putative
MSGVHFRSHNILVQLKLVEAIKEAGNVKRFLPSEFGMDPPRMGHALPPGRETFDQKMEVRQAIEAAGIPYTYVVGACFAAYFAGNLSQMVTLLPPKEKVNIYGDGNVKVVFADEDDIAKYTAKTLNDPRTLNKTVNIRPPDNVLTQLELVQIWEKLTGKELEKTNIAAQDFLANIEQMEIPHQAGIGHFYHIFYEGCLTDHEVGEDEEASSLYPDVKYKRMDDYLRMFL

SEQ ID NO: 22262 - protein, 193 aa, Arabidopsis thaliana
  peptide (1)..(193): Ceres Seq. ID no. 12334825
  misc_feature (1)..(193): Pfam Name: Isoflavone reductase Pfam Description: Isoflavone reductase
  misc_feature (1)..(193): Homolog of NCBI NO: 7542585 NR Description: pinoresinol-lariciresinol reductase [Thuja
  misc_feature (1)..(193): Homolog of NCBI NO: 38492951 NR Description: Chain A, Crystal Structures Of And Phenylcoumaran Benzylic Ether Reductases, And Their
  misc_feature (1)..(193): Homolog of NCBI NO: 7542588 NR Description: pinoresinol-lariciresinol reductase [Thuja
  misc_feature (1)..(193): Homolog of NCBI NO: 7542583 NR Description: pinoresinol-lariciresinol reductase [Thuja
  misc_feature (1)..(193): Homolog of NCBI NO: 7578917 NR Description: pinoresinol-lariciresinol reductase TH2 [Tsuga
  misc_feature (1)..(193): Homolog of NCBI NO: 1769556 NR Description: Forsythia x intermedia
  misc_feature (1)..(193): Homolog of NCBI NO: 1708424 NR Description: ISOFLAVONE REDUCTASE HOMOLOG
  misc_feature (1)..(193): Homolog of NCBI NO: 15236330 NR Description: pinoresinol-lariciresinol reductase, putative
  misc_feature (1)..(193): Homolog of NCBI NO: 21592830 NR Description: pinoresinol-lariciresinol reductase, putative
  misc_feature (1)..(193): Homolog of NCBI NO: 15222571 NR Description: pinoresinol-lariciresinol reductase, putative
MDPPRMGHALPPGRETFDQKMEVRQAIEAAGIPYTYVVGACFAAYFAGNLSQMVTLLPPKEKVNIYGDGNVKVVFADEDDIAKYTAKTLNDPRTLNKTVNIRPPDNVLTQLELVQIWEKLTGKELEKTNIAAQDFLANIEQMEIPHQAGIGHFYHIFYEGCLTDHEVGEDEEASSLYPDVKYKRMDDYLRMFL

SEQ ID NO: 22263 - DNA, 1339 bp, Arabidopsis thaliana
  misc_feature (1)..(1339): Ceres Seq. ID no. 12338101
  misc_feature: MA Experiment ID: 108435 Result: Up-regulated in Transcription
  misc_feature: MA Experiment 108435 PARAMETER Experiment Name: At_stm_Mutants_cDNA_P Parameter: Plant Line Value: wt Landsburg vs stm
  misc_feature: MA Experiment 108435 PARAMETER Experiment Name: At_stm_Mutants_cDNA_P Parameter: Tissue Value: Shoot Apical Meristem Region
  misc_feature: MA Experiment ID: 108461 Result: Down-regulated in Transcription
  misc_feature: MA Experiment 108461 PARAMETER Experiment Name: At_Germinating_Seeds_cDNA_P Parameter: Age (day) Value: 1 vs. 0
  misc_feature: MA Experiment 108461 PARAMETER Experiment Name: At_Germinating_Seeds_cDNA_P Parameter: Tissue Value: Germinating Seeds
  misc_feature: MA Experiment ID: 108464 Result: Down-regulated in Transcription
  misc_feature: MA Experiment 108464 PARAMETER Experiment Name: At_Germinating_Seeds_cDNA_P Parameter: Age (day) Value: 4 vs. 0
  misc_feature: MA Experiment 108464 PARAMETER Experiment Name: At_Germinating_Seeds_cDNA_P Parameter: Tissue Value: Germinating Seeds
  misc_feature: MA Experiment ID: 108469 Result: Up-regulated in Transcription
  misc_feature: MA Experiment ID: 108501 Result: Up-regulated in Transcription
  misc_feature: MA Experiment 108501 PARAMETER Experiment Name: At_ap2_floral_buds_cDNA_P Parameter: Plant Line Value: ap2 (Ler.)
  misc_feature: MA Experiment 108501 PARAMETER Experiment Name: At_ap2_floral_buds_cDNA_P Parameter: Tissue Value: Closed Flower
  misc_feature: MA Experiment ID: 108561 Result: Up-regulated in Transcription
  misc_feature: MA Experiment 108561 PARAMETER Experiment Name: At_100uM_ABA_cDNA_P Parameter: Timepoint (hr) Value: 6
  misc_feature: MA Experiment 108561 PARAMETER Experiment Name: At_100uM_ABA_cDNA_P Parameter: Tissue Value: Aerial
  misc_feature: MA Experiment 108561 PARAMETER Experiment Name: At_100uM_ABA_cDNA_P Parameter: Treatment Value: 100uM ABA vs. No Treatment
  misc_feature: MA Experiment ID: 108572 Result: Up-regulated in Transcription
  misc_feature: MA Experiment 108572 PARAMETER Experiment Name: At_Drought_cDNA_P Parameter: Timepoint (hr) Value: 1
  misc_feature: MA Experiment 108572 PARAMETER Experiment Name: At_Drought_cDNA_P Parameter: Tissue Value: Aerial
  misc_feature: MA Experiment 108572 PARAMETER Experiment Name: At_Drought_cDNA_P Parameter: Treatment Value: Drought vs. No Drought
  misc_feature: MA Experiment ID: 108573 Result: Up-regulated in Transcription
  misc_feature: MA Experiment 108573 PARAMETER Experiment Name: At_Drought_cDNA_P Parameter: Timepoint (hr) Value: 6
  misc_feature: MA Experiment 108573 PARAMETER Experiment Name: At_Drought_cDNA_P Parameter: Tissue Value: Aerial
  misc_feature: MA Experiment 108573 PARAMETER Experiment Name: At_Drought_cDNA_P Parameter: Treatment Value: Drought vs. No Drought
  misc_feature: MA Experiment ID: 108577 Result: Up-regulated in Transcription
  misc_feature: MA Experiment 108577 PARAMETER Experiment Name: At_42deg_Heat_cDNA_P Parameter: Temperature (deg C) Value: 42 vs. 22
  misc_feature: MA Experiment 108577 PARAMETER Experiment Name: At_42deg_Heat_cDNA_P Parameter: Timepoint (hr) Value: 6
  misc_feature: MA Experiment 108577 PARAMETER Experiment Name: At_42deg_Heat_cDNA_P Parameter: Tissue Value: Aerial
  misc_feature: MA Experiment ID: 108585 Result: Up-regulated in Transcription
  misc_feature: MA Experiment 108585 PARAMETER Experiment Name: At_5mM_NaNP_cDNA_P Parameter: Timepoint (hr) Value: 6
  misc_feature: MA Experiment 108585 PARAMETER Experiment Name: At_5mM_NaNP_cDNA_P Parameter: Tissue Value: Aerial
  misc_feature: MA Experiment 108585 PARAMETER Experiment Name: At_5mM_NaNP_cDNA_P Parameter: Treatment Value: null
  misc_feature: MA Experiment ID: 108594 Result: Down-regulated in Transcription
  misc_feature: MA Experiment 108594 PARAMETER Experiment Name: At_Ler-rhl_Root_cDNA_P Parameter: Plant Line Value: null
  misc_feature: MA Experiment ID: 108595 Result: Up-regulated in Transcription
  misc_feature: MA Experiment 108595 PARAMETER Experiment Name: At_Ler-pi_Ovule_cDNA_P Parameter: Plant Line Value: null
  misc_feature: MA Experiment ID: 108605 Result: Up-regulated in Transcription
  misc_feature: MA Experiment 108605 PARAMETER Experiment Name: At_100uM_ABA_cDNA_P Parameter: Timepoint (hr) Value: 6
  misc_feature: MA Experiment 108605 PARAMETER Experiment Name: At_100uM_ABA_cDNA_P Parameter: Tissue Value: Aerial
  misc_feature: MA Experiment 108605 PARAMETER Experiment Name: At_100uM_ABA_cDNA_P Parameter: Treatment Value: 100uM ABA vs. No Treatment
  misc_feature: MA Experiment ID: 108607 Result: Up-regulated in Transcription
  misc_feature: MA Experiment 108607 PARAMETER Experiment Name: At_100uM_ABA_cDNA_P Parameter: Timepoint (hr) Value: 4
  misc_feature: MA Experiment 108607 PARAMETER Experiment Name: At_100uM_ABA_cDNA_P Parameter: Tissue Value: Aerial
  misc_feature: MA Experiment 108607 PARAMETER Experiment Name: At_100uM_ABA_cDNA_P Parameter: Treatment Value: 100uM ABA vs. No Treatment
  misc_feature: MA Experiment ID: 108608 Result: Up-regulated in Transcription
  misc_feature: MA Experiment 108608 PARAMETER Experiment Name: At_100uM_ABA_cDNA_P Parameter: Timepoint (hr) Value: 1
  misc_feature: MA Experiment 108608 PARAMETER Experiment Name: At_100uM_ABA_cDNA_P Parameter: Tissue Value: Aerial
  misc_feature: MA Experiment 108608 PARAMETER Experiment Name: At_100uM_ABA_cDNA_P Parameter: Treatment Value: 100uM ABA vs. No Treatment
  misc_feature: MA Experiment ID: 108609 Result: Up-regulated in Transcription
  misc_feature: MA Experiment 108609 PARAMETER Experiment Name: At_100uM_ABA_cDNA_P Parameter: Timepoint (hr) Value: 24
  misc_feature: MA Experiment 108609 PARAMETER Experiment Name: At_100uM_ABA_cDNA_P Parameter: Tissue Value: Aerial
  misc_feature: MA Experiment 108609 PARAMETER Experiment Name: At_100uM_ABA_cDNA_P Parameter: Treatment Value: 100uM ABA vs. No Treatment
  misc_feature: MA Experiment ID: 108668 Result: Up-regulated in Transcription
  misc_feature: MA Experiment 108668 PARAMETER Experiment Name: At_2mM_SA_cDNA_P Parameter: Plant Line Value: WS
  misc_feature: MA Experiment 108668 PARAMETER Experiment Name: At_2mM_SA_cDNA_P Parameter: Timepoint (hr) Value: 6
  misc_feature: MA Experiment 108668 PARAMETER Experiment Name: At_2mM_SA_cDNA_P Parameter: Treatment Value: 2mM SA vs. No Treatment
  misc_feature: MA Experiment ID: 20000069 Result: Up-regulated in Transcription
  misc_feature: MA Experiment 20000069 PARAMETER Experiment Name: At_100uM_ABA_Mutants_cDNA_P Parameter: Plant Line Value: CS23
  misc_feature: MA Experiment 20000069 PARAMETER Experiment Name: At_100uM_ABA_Mutants_cDNA_P Parameter: Timepoint (hr) Value: 6
  misc_feature: MA Experiment 20000069 PARAMETER Experiment Name: At_100uM_ABA_Mutants_cDNA_P Parameter: Tissue Value: Aerial
  misc_feature: MA Experiment 20000069 PARAMETER Experiment Name: At_100uM_ABA_Mutants_cDNA_P Parameter: Treatment Value: 100uM ABA vs. No Treatment
  misc_feature: MA Experiment ID: 20000070 Result: Up-regulated in Transcription
  misc_feature: MA Experiment 20000070 PARAMETER Experiment Name: At_100uM_ABA_Mutants_cDNA_P Parameter: Plant Line Value: CS24
  misc_feature: MA Experiment 20000070 PARAMETER Experiment Name: At_100uM_ABA_Mutants_cDNA_P Parameter: Timepoint (hr) Value: 6
  misc_feature: MA Experiment 20000070 PARAMETER Experiment Name: At_100uM_ABA_Mutants_cDNA_P Parameter: Tissue Value: Aerial
  misc_feature: MA Experiment 20000070 PARAMETER Experiment Name: At_100uM_ABA_Mutants_cDNA_P Parameter: Treatment Value: 100uM ABA vs. No Treatment
  misc_feature: MA Experiment ID: 20000071 Result: Up-regulated in Transcription
  misc_feature: MA Experiment 20000071 PARAMETER Experiment Name: At_100uM_ABA_Mutants_cDNA_P Parameter: Plant Line Value: CS8104
  misc_feature: MA Experiment 20000071 PARAMETER Experiment Name: At_100uM_ABA_Mutants_cDNA_P Parameter: Timepoint (hr) Value: 6
  misc_feature: MA Experiment 20000071 PARAMETER Experiment Name: At_100uM_ABA_Mutants_cDNA_P Parameter: Tissue Value: Aerial
  misc_feature: MA Experiment 20000071 PARAMETER Experiment Name: At_100uM_ABA_Mutants_cDNA_P Parameter: Treatment Value: 100uM ABA vs. No Treatment
  misc_feature: MA Experiment ID: 20000072 Result: Up-regulated in Transcription
  misc_feature: MA Experiment 20000072 PARAMETER Experiment Name: At_100uM_ABA_Mutants_cDNA_P Parameter: Plant Line Value: CS8105
  misc_feature: MA Experiment 20000072 PARAMETER Experiment Name: At_100uM_ABA_Mutants_cDNA_P Parameter: Timepoint (hr) Value: 6
  misc_feature: MA Experiment 20000072 PARAMETER Experiment Name: At_100uM_ABA_Mutants_cDNA_P Parameter: Tissue Value: Aerial
  misc_feature: MA Experiment 20000072 PARAMETER Experiment Name: At_100uM_ABA_Mutants_cDNA_P Parameter: Treatment Value: 100uM ABA vs. No Treatment
  misc_feature: MA Experiment ID: 20000086 Result: Up-regulated in Transcription
  misc_feature: MA Experiment 20000086 PARAMETER Experiment Name: At_100uM_ABA_Mutants_cDNA_P Parameter: Plant Line Value: CS22
  misc_feature: MA Experiment 20000086 PARAMETER Experiment Name: At_100uM_ABA_Mutants_cDNA_P Parameter: Timepoint (hr) Value: 6
  misc_feature: MA Experiment 20000086 PARAMETER Experiment Name: At_100uM_ABA_Mutants_cDNA_P Parameter: Tissue Value: Aerial
  misc_feature: MA Experiment 20000086 PARAMETER Experiment Name: At_100uM_ABA_Mutants_cDNA_P Parameter: Treatment Value: 100uM ABA vs. No Treatment
  misc_feature: MA Experiment ID: 20000087 Result: Up-regulated in Transcription
  misc_feature: MA Experiment 20000087 PARAMETER Experiment Name: At_100uM_ABA_Mutants_cDNA_P Parameter: Plant Line Value: WS
  misc_feature: MA Experiment 20000087 PARAMETER Experiment Name: At_100uM_ABA_Mutants_cDNA_P Parameter: Timepoint (hr) Value: 6
  misc_feature: MA Experiment 20000087 PARAMETER Experiment Name: At_100uM_ABA_Mutants_cDNA_P Parameter: Tissue Value: Aerial
  misc_feature: MA Experiment 20000087 PARAMETER Experiment Name: At_100uM_ABA_Mutants_cDNA_P Parameter: Treatment Value: 100uM ABA vs. No Treatment
  misc_feature: MA Experiment ID: 20000088 Result: Up-regulated in Transcription
  misc_feature: MA Experiment 20000088 PARAMETER Experiment Name: At_100uM_ABA_Mutants_cDNA_P Parameter: Plant Line Value: Landsberg
  misc_feature: MA Experiment 20000088 PARAMETER Experiment Name: At_100uM_ABA_Mutants_cDNA_P Parameter: Timepoint (hr) Value: 6
  misc_feature: MA Experiment 20000088 PARAMETER Experiment Name: At_100uM_ABA_Mutants_cDNA_P Parameter: Tissue Value: Aerial
  misc_feature: MA Experiment 20000088 PARAMETER Experiment Name: At_100uM_ABA_Mutants_cDNA_P Parameter: Treatment Value: 100uM ABA vs. No Treatment
  misc_feature: MA Experiment ID: 20000093 Result: Up-regulated in Transcription
  misc_feature: MA Experiment 20000093 PARAMETER Experiment Name: At_42deg_Heat_cDNA_P Parameter: Temperature (deg C) Value: 42 vs. 22
  misc_feature: MA Experiment 20000093 PARAMETER Experiment Name: At_42deg_Heat_cDNA_P Parameter: Timepoint (hr) Value: 0.5
  misc_feature: MA Experiment 20000093 PARAMETER Experiment Name: At_42deg_Heat_cDNA_P Parameter: Tissue Value: Aerial
  misc_feature: MA Experiment ID: 20000111 Result: Up-regulated in Transcription
  misc_feature: MA Experiment 20000111 PARAMETER Experiment Name: At_42deg_Heat_cDNA_P Parameter: Temperature (deg C) Value: 42 vs. 22
  misc_feature: MA Experiment 20000111 PARAMETER Experiment Name: At_42deg_Heat_cDNA_P Parameter: Timepoint (hr) Value: 6
  misc_feature: MA Experiment 20000111 PARAMETER Experiment Name: At_42deg_Heat_cDNA_P Parameter: Tissue Value: Aerial
  misc_feature: MA Experiment ID: 20000112 Result: Up-regulated in Transcription
  misc_feature: MA Experiment 20000112 PARAMETER Experiment Name: At_42deg_Heat_cDNA_P Parameter: Temperature (deg C) Value: 42 vs. 22
  misc_feature: MA Experiment 20000112 PARAMETER Experiment Name: At_42deg_Heat_cDNA_P Parameter: Timepoint (hr) Value: 2
  misc_feature: MA Experiment 20000112 PARAMETER Experiment Name: At_42deg_Heat_cDNA_P Parameter: Tissue Value: Aerial
  misc_feature: MA Experiment ID: 20000113 Result: Up-regulated in Transcription
  misc_feature: MA Experiment 20000113 PARAMETER Experiment Name: At_42deg_Heat_cDNA_P Parameter: Temperature (deg C) Value: 42 vs. 22
  misc_feature: MA Experiment 20000113 PARAMETER Experiment Name: At_42deg_Heat_cDNA_P Parameter: Timepoint (hr) Value: 8
  misc_feature: MA Experiment 20000113 PARAMETER Experiment Name: At_42deg_Heat_cDNA_P Parameter: Tissue Value: Aerial
  misc_feature: MA Experiment ID: 20000117 Result: Up-regulated in Transcription
  misc_feature: MA Experiment 20000117 PARAMETER Experiment Name: At_100uM_ABA_Mutants_cDNA_P Parameter: Plant Line Value: Columbia
  misc_feature: MA Experiment 20000117 PARAMETER Experiment Name: At_100uM_ABA_Mutants_cDNA_P Parameter: Timepoint (hr) Value: 6
  misc_feature: MA Experiment 20000117 PARAMETER Experiment Name: At_100uM_ABA_Mutants_cDNA_P Parameter: Tissue Value: Aerial
  misc_feature: MA Experiment 20000117 PARAMETER Experiment Name: At_100uM_ABA_Mutants_cDNA_P Parameter: Treatment Value: 100uM ABA vs. No Treatment
  misc_feature: MA Experiment ID: 20000144 Result: Up-regulated in Transcription
  misc_feature: MA Experiment 20000144 PARAMETER Experiment Name: At_42deg_Heat_cDNA_P Parameter: Temperature (deg C) Value: 42 vs. 22
  misc_feature: MA Experiment 20000144 PARAMETER Experiment Name: At_42deg_Heat_cDNA_P Parameter: Timepoint (hr) Value: 1
  misc_feature: MA Experiment 20000144 PARAMETER Experiment Name: At_42deg_Heat_cDNA_P Parameter: Tissue Value: Aerial
  misc_feature: MA Experiment ID: 20000166 Result: Up-regulated in Transcription
  misc_feature: MA Experiment 20000166 PARAMETER Experiment Name: At_100uM_ABA_P Parameter: Age (day) Value: 14
  misc_feature: MA Experiment 20000166 PARAMETER Experiment Name: At_100uM_ABA_P Parameter: Organism Value: A. thaliana
  misc_feature: MA Experiment 20000166 PARAMETER Experiment Name: At_100uM_ABA_P Parameter: Plant Line Value: WS
  misc_feature: MA Experiment 20000166 PARAMETER Experiment Name: At_100uM_ABA_P Parameter: Timepoint (hr) Value: 1
  misc_feature: MA Experiment 20000166 PARAMETER Experiment Name: At_100uM_ABA_P Parameter: Tissue Value: Aerial
  misc_feature: MA Experiment 20000166 PARAMETER Experiment Name: At_100uM_ABA_P Parameter: Treatment Value: 100uM ABA vs. No Treatment
  misc_feature: MA Experiment ID: 20000169 Result: Up-regulated in Transcription
  misc_feature: MA Experiment 20000169 PARAMETER Experiment Name: At_100uM_ABA_P Parameter: Age (day) Value: 14
  misc_feature: MA Experiment 20000169 PARAMETER Experiment Name: At_100uM_ABA_P Parameter: Organism Value: A. thaliana
  misc_feature: MA Experiment 20000169 PARAMETER Experiment Name: At_100uM_ABA_P Parameter: Plant Line Value: WS
  misc_feature: MA Experiment 20000169 PARAMETER Experiment Name: At_100uM_ABA_P Parameter: Timepoint (hr) Value: 6
  misc_feature: MA Experiment 20000169 PARAMETER Experiment Name: At_100uM_ABA_P Parameter: Tissue Value: Aerial
  misc_feature: MA Experiment 20000169 PARAMETER Experiment Name: At_100uM_ABA_P Parameter: Treatment Value: 100uM ABA vs. No Treatment
  misc_feature: MA Experiment ID: 20000171 Result: Up-regulated in Transcription
  misc_feature: MA Experiment 20000171 PARAMETER Experiment Name: At_42deg_Heat_P Parameter: Age (day) Value: 14
  misc_feature: MA Experiment 20000171 PARAMETER Experiment Name: At_42deg_Heat_P Parameter: Organism Value: A. thaliana
  misc_feature: MA Experiment 20000171 PARAMETER Experiment Name: At_42deg_Heat_P Parameter: Plant Line Value: WS
  misc_feature: MA Experiment 20000171 PARAMETER Experiment Name: At_42deg_Heat_P Parameter: Temperature (deg C) Value: 42 vs. 22
  misc_feature: MA Experiment 20000171 PARAMETER Experiment Name: At_42deg_Heat_P Parameter: Timepoint (hr) Value: 1
  misc_feature: MA Experiment 20000171 PARAMETER Experiment Name: At_42deg_Heat_P Parameter: Tissue Value: Aerial
  misc_feature: MA Experiment ID: 20000182 Result: Up-regulated in Transcription
  misc_feature: MA Experiment 20000182 PARAMETER Experiment Name: At_2mM_SA_P Parameter: Age (day) Value: 14
  misc_feature: MA Experiment 20000182 PARAMETER Experiment Name: At_2mM_SA_P Parameter: Organism Value: A. thaliana
  misc_feature: MA Experiment 20000182 PARAMETER Experiment Name: At_2mM_SA_P Parameter: Plant Line Value: WS
  misc_feature: MA Experiment 20000182 PARAMETER Experiment Name: At_2mM_SA_P Parameter: Timepoint (hr) Value: 6
  misc_feature: MA Experiment 20000182 PARAMETER Experiment Name: At_2mM_SA_P Parameter: Tissue Value: Aerial
  misc_feature: MA Experiment 20000182 PARAMETER Experiment Name: At_2mM_SA_P Parameter: Treatment Value: 2mM SA vs. No Treatment
  misc_feature: MA Experiment ID: 20000184 Result: Down-regulated in Transcription
  misc_feature: MA Experiment 20000184 PARAMETER Experiment Name: At_Shoots__P Parameter: Age (day) Value: 7
  misc_feature: MA Experiment 20000184 PARAMETER Experiment Name: At_Shoots__P Parameter: Tissue Value: Shoots vs. Whole Plant
  misc_feature: MA Experiment ID: 20000224 Result: Up-regulated in Transcription
  misc_feature: MA Experiment ID: 20000234 Result: Up-regulated in Transcription
  misc_feature: MA Experiment 20000234 PARAMETER Experiment Name: At_Siliques_P Parameter: Age (day) Value: 21
  misc_feature: MA Experiment 20000234 PARAMETER Experiment Name: At_Siliques_P Parameter: Organism Value: A. thaliana
  misc_feature: MA Experiment 20000234 PARAMETER Experiment Name: At_Siliques_P Parameter: Plant Line Value: WS
  misc_feature: MA Experiment 20000234 PARAMETER Experiment Name: At_Siliques_P Parameter: Tissue Value: Less Than 5mm Siliques vs. Whole Plant
  misc_feature: MA Experiment ID: 20000264 Result: Up-regulated in Transcription
  misc_feature: MA Experiment 20000264 PARAMETER Experiment Name: At_Open_Flower_P Parameter: Age (day) Value: 21
  misc_feature: MA Experiment 20000264 PARAMETER Experiment Name: At_Open_Flower_P Parameter: Plant Line Value: WS
  misc_feature: MA Experiment 20000264 PARAMETER Experiment Name: At_Open_Flower_P Parameter: Tissue Value: Open Flower vs. Whole Plant
  misc_feature: MA Experiment ID: 20000267 Result: Up-regulated in Transcription
  misc_feature: MA Experiment 20000267 PARAMETER Experiment Name: At_Drought_P Parameter: Age (day) Value: 7
  misc_feature: MA Experiment 20000267 PARAMETER Experiment Name: At_Drought_P Parameter: Organism Value: A. thaliana
  misc_feature: MA Experiment 20000267 PARAMETER Experiment Name: At_Drought_P Parameter: Plant Line Value: WS
  misc_feature: MA Experiment 20000267 PARAMETER Experiment Name: At_Drought_P Parameter: Timepoint (hr) Value: 6
  misc_feature: MA Experiment 20000267 PARAMETER Experiment Name: At_Drought_P Parameter: Tissue Value: Whole Plant
  misc_feature: MA Experiment 20000267 PARAMETER Experiment Name: At_Drought_P Parameter: Treatment Value: Drought vs. No Drought
  misc_feature: MA Experiment ID: 20000268 Result: Up-regulated in Transcription
  misc_feature: MA Experiment 20000268 PARAMETER Experiment Name: At_100mM_NaCl__P Parameter: Age (day) Value: 14
  misc_feature: MA Experiment 20000268 PARAMETER Experiment Name: At_100mM_NaCl__P Parameter: Organism Value: A. thaliana
  misc_feature: MA Experiment 20000268 PARAMETER Experiment Name: At_100mM_NaCl__P Parameter: Plant Line Value: WS
  misc_feature: MA Experiment 20000268 PARAMETER Experiment Name: At_100mM_NaCl__P Parameter: Timepoint (hr) Value: 6
  misc_feature: MA Experiment 20000268 PARAMETER Experiment Name: At_100mM_NaCl__P Parameter: Tissue Value: Whole Plant
  misc_feature: MA Experiment 20000268 PARAMETER Experiment Name: At_100mM_NaCl__P Parameter: Treatment Value: 100mM NaCl vs. No Treatment
  misc_feature: MA Experiment ID: 20000436 Result: Up-regulated in Transcription
  misc_feature: MA Experiment 20000436 PARAMETER Experiment Name: At_Drought_P Parameter: Age (day) Value: 7
  misc_feature: MA Experiment 20000436 PARAMETER Experiment Name: At_Drought_P Parameter: Organism Value: A. thaliana
  misc_feature: MA Experiment 20000436 PARAMETER Experiment Name: At_Drought_P Parameter: Plant Line Value: WS
  misc_feature: MA Experiment 20000436 PARAMETER Experiment Name: At_Drought_P Parameter: Timepoint (hr) Value: 12
  misc_feature: MA Experiment 20000436 PARAMETER Experiment Name: At_Drought_P Parameter: Tissue Value: Whole Plant
  misc_feature: MA Experiment 20000436 PARAMETER Experiment Name: At_Drought_P Parameter: Treatment Value: Drought vs. No Drought
  misc_feature: MA Experiment ID: 20000453 Result: Up-regulated in Transcription
  misc_feature: MA Experiment 20000453 PARAMETER Experiment Name: At_100uM_ABA_P Parameter: Age (day) Value: 15
  misc_feature: MA Experiment 20000453 PARAMETER Experiment Name: At_100uM_ABA_P Parameter: Organism Value: A. thaliana
  misc_feature: MA Experiment 20000453 PARAMETER Experiment Name: At_100uM_ABA_P Parameter: Plant Line Value: WS
  misc_feature: MA Experiment 20000453 PARAMETER Experiment Name: At_100uM_ABA_P Parameter: Timepoint (hr) Value: 24
  misc_feature: MA Experiment 20000453 PARAMETER Experiment Name: At_100uM_ABA_P Parameter: Tissue Value: Aerial
  misc_feature: MA Experiment 20000453 PARAMETER Experiment Name: At_100uM_ABA_P Parameter: Treatment Value: 100uM ABA vs. No Treatment
  misc_feature: MA Experiment ID: 20000455 Result: Up-regulated in Transcription
  misc_feature: MA Experiment 20000455 PARAMETER Experiment Name: At_100uM_ABA_P Parameter: Age (day) Value: 16
  misc_feature: MA Experiment 20000455 PARAMETER Experiment Name: At_100uM_ABA_P Parameter: Organism Value: A. thaliana
  misc_feature: MA Experiment 20000455 PARAMETER Experiment Name: At_100uM_ABA_P Parameter: Plant Line Value: WS
  misc_feature: MA Experiment 20000455 PARAMETER Experiment Name: At_100uM_ABA_P Parameter: Timepoint (hr) Value: 48
  misc_feature: MA Experiment 20000455 PARAMETER Experiment Name: At_100uM_ABA_P Parameter: Tissue Value: Aerial
  misc_feature: MA Experiment 20000455 PARAMETER Experiment Name: At_100uM_ABA_P Parameter: Treatment Value: 100uM ABA vs. No Treatment
  misc_feature: MA Experiment ID: 20000794 Result: Up-regulated in Transcription
  misc_feature: MA Experiment 20000794 PARAMETER Experiment Name: At_Petals_P Parameter: Age (day) Value: 23-25 days
  misc_feature: MA Experiment 20000794 PARAMETER Experiment Name: At_Petals_P Parameter: Plant Line Value: WS
  misc_feature: MA Experiment 20000794 PARAMETER Experiment Name: At_Petals_P Parameter: Tissue Value: Petals vs. Whole plant
  misc_feature: MA Experiment ID: 20001248 Result: Down-regulated in Transcription
  misc_feature: MA Experiment 20001248 PARAMETER Experiment Name: At_Far-red-induction_P Parameter: Age (day) Value: 7
  misc_feature: MA Experiment 20001248 PARAMETER Experiment Name: At_Far-red-induction_P Parameter: Light Value: Far-red vs. White
  misc_feature: MA Experiment 20001248 PARAMETER Experiment Name: At_Far-red-induction_P Parameter: Organism Value: A. thaliana
  misc_feature: MA Experiment 20001248 PARAMETER Experiment Name: At_Far-red-induction_P Parameter: Plant Line Value: Columbia
  misc_feature: MA Experiment 20001248 PARAMETER Experiment Name: At_Far-red-induction_P Parameter: Timepoint (hr) Value: 4
  misc_feature: MA Experiment 20001248 PARAMETER Experiment Name: At_Far-red-induction_P Parameter: Tissue Value: Whole Plant
  misc_feature: MA Experiment ID: 20001450 Result: Down-regulated in Transcription
  misc_feature: MA Experiment 20001450 PARAMETER Experiment Name: At_Far-red-induction_P Parameter: Age (day) Value: 7
  misc_feature: MA Experiment 20001450 PARAMETER Experiment Name: At_Far-red-induction_P Parameter: Light Value: Far-red vs. White
  misc_feature: MA Experiment 20001450 PARAMETER Experiment Name: At_Far-red-induction_P Parameter: Organism Value: A. thaliana
  misc_feature: MA Experiment 20001450 PARAMETER Experiment Name: At_Far-red-induction_P Parameter: Plant Line Value: Columbia
  misc_feature: MA Experiment 20001450 PARAMETER Experiment Name: At_Far-red-induction_P Parameter: Timepoint (hr) Value: 8
  misc_feature: MA Experiment 20001450 PARAMETER Experiment Name: At_Far-red-induction_P Parameter: Tissue Value: Whole Plant
  misc_feature: MA Experiment ID: 20001554 Result: Up-regulated in Transcription
  misc_feature: MA Experiment 20001554 PARAMETER Experiment Name: At_Drought_Soil_Dry_P Parameter: Age (day) Value: 21
  misc_feature: MA Experiment 20001554 PARAMETER Experiment Name: At_Drought_Soil_Dry_P Parameter: Organism Value: A. thaliana
  misc_feature: MA Experiment 20001554 PARAMETER Experiment Name: At_Drought_Soil_Dry_P Parameter: Plant Line Value: WS
  misc_feature: MA Experiment 20001554 PARAMETER Experiment Name: At_Drought_Soil_Dry_P Parameter: Post Timepoint (hr) Value: None
  misc_feature: MA Experiment 20001554 PARAMETER Experiment Name: At_Drought_Soil_Dry_P Parameter: Post-Treatment Value: None
  misc_feature: MA Experiment 20001554 PARAMETER Experiment Name: At_Drought_Soil_Dry_P Parameter: Timepoint (day) Value: 7
  misc_feature: MA Experiment 20001554 PARAMETER Experiment Name: At_Drought_Soil_Dry_P Parameter: Treatment Value: Drought vs. No Drought
  misc_feature: MA Experiment ID: 20001555 Result: Up-regulated in Transcription
  misc_feature: MA Experiment 20001555 PARAMETER Experiment Name: At_Drought_Soil_Dry_P Parameter: Age (day) Value: 24
  misc_feature: MA Experiment 20001555 PARAMETER Experiment Name: At_Drought_Soil_Dry_P Parameter: Organism Value: A. thaliana
  misc_feature: MA Experiment 20001555 PARAMETER Experiment Name: At_Drought_Soil_Dry_P Parameter: Plant Line Value: WS
  misc_feature: MA Experiment 20001555 PARAMETER Experiment Name: At_Drought_Soil_Dry_P Parameter: Post Timepoint (hr) Value: None
  misc_feature: MA Experiment 20001555 PARAMETER Experiment Name: At_Drought_Soil_Dry_P Parameter: Post-Treatment Value: None
  misc_feature: MA Experiment 20001555 PARAMETER Experiment Name: At_Drought_Soil_Dry_P Parameter: Timepoint (day) Value: 10
  misc_feature: MA Experiment 20001555 PARAMETER Experiment Name: At_Drought_Soil_Dry_P Parameter: Treatment Value: Drought vs. No Drought
  misc_feature: MA Experiment ID: 20001905 Result: Up-regulated in Transcription
  misc_feature: MA Experiment 20001905 PARAMETER Experiment Name: At_Drought_Reproduction_P Parameter: Age (day) Value: 40
  misc_feature: MA Experiment 20001905 PARAMETER Experiment Name: At_Drought_Reproduction_P Parameter: Organism Value: A. thaliana
  misc_feature: MA Experiment 20001905 PARAMETER Experiment Name: At_Drought_Reproduction_P Parameter: Plant Line Value: WS
  misc_feature: MA Experiment 20001905 PARAMETER Experiment Name: At_Drought_Reproduction_P Parameter: Timepoint (day) Value: 10
  misc_feature: MA Experiment 20001905 PARAMETER Experiment Name: At_Drought_Reproduction_P Parameter: Tissue Value: Rosettes
  misc_feature: MA Experiment 20001905 PARAMETER Experiment Name: At_Drought_Reproduction_P Parameter: Treatment Value: Drought vs. No Drought
aattattactttaatcttctttcccgctctctattcttcttcttctttaggatcaatcaccgtttagctttcttcccatacgtctctccgtttacgaccagtatacagaggctggagctggggaagaaaaggattgtctatggagggagacgtcggaataggtttggtatgccagaatactatggatgggaaggcgagtaatggaaatggtttagagaagactgtaccttcttgttgccttaaggctatggcatgtgtacctgaggatgatgctaagtgtcactccactgttgtttctgggtggttttcggaacctcaccctcgctctgggaaaaaaggcggcaaagcagtctatttcaacaaccctatgtggccaggagaagcacactcactgaaagttgagaaagttctgttcaaagacaagtcggattttcaggaagtcctagtgttcgagtcagccacgtacggaaaggtgcttgttctagatggtatcgtacagctgaccgaaaaagatgaatgtgcatatcaggagatgatagcccatctgcctttatgctctatatcttcccctaaaaatgttcttgttgttggtggaggtgatggtggtgttcttcgagagatttctcgccatagttctgttgaggttattgatatctgtgagatagacaagatggttatagatgtgtctaagaagttcttccccgagttagcggttgggtttgacgatcctcgtgttcaacttcacattagtgatgctgctgagttcctccgtaaatcccctgaagggaagtatgatgccatcattgttgattcttcagatcccgtaggtcctgctcttgcgcttgttgagaagcctttcttcgagacactggctagagcgttgaagcctgggggagttctttgtaacatggcagaaagtatgtggctccatactcatcttattgaagatatgatctccatttgccgtcaaacattcaaaagtgttcactatgcgtggagcagcgtccccacatatccaagcggcgtgattggtttcgtcttgtgctctactgaaggaccagctgttgacttcaagaacccaatcaaccctattgagaaactagacggtgcgatgacccataaaagagaattgaagttctataactctgatatgcacagagccgcatttgctttgcccacattcctgcggagagaagtagcttcacttctggcttcttgacttctgtttggctctaccatatccctcatatcaaactttgtagaactcttgaagaggaataataaatcattgaaggctttgtatctctaagtttactcctttataaaaagacttatattt

SEQ ID NO: 22264 - protein, 359 aa, Arabidopsis thaliana
  peptide (1)..(359): Ceres Seq. ID no. 12338102
  misc_feature (54)..(313): Pfam Name: Spermine/spermidine synthase Pfam Description: Spermine/spermidine synthase
  misc_feature (75)..(355): Homolog of NCBI NO: 6094327 NR Description: Spermidine synthase 1 (Putrescine
  misc_feature (42)..(355): Homolog of NCBI NO: 12229958 NR Description: Spermidine synthase 1 (Putrescine
  misc_feature (75)..(355): Homolog of NCBI NO: 6094330 NR Description: Spermidine synthase 2 (Putrescine
  misc_feature (49)..(355): Homolog of NCBI NO: 6094335 NR Description: Spermidine synthase (Putrescine
  misc_feature (18)..(355): Homolog of NCBI NO: 33354149 NR Description: aminopropyl transferase [Oryza sativa (japonica
  misc_feature (15)..(359): Homolog of NCBI NO: 33150481 NR Description: putative spermine synthase [Lycopersicon
  misc_feature (1)..(359): Homolog of NCBI NO: 9757993 NR Description: spermidine synthase [Arabidopsis thaliana]
  misc_feature (15)..(359): Homolog of NCBI NO: 21592832 NR Description: spermidine synthase [Arabidopsis thaliana]
  misc_feature (1)..(359): Homolog of NCBI NO: 15983394 NR Description: AT5g53120/MFH8_5 [Arabidopsis thaliana]
  misc_feature (1)..(359): Homolog of NCBI NO: 18423473 NR Description: spermidine synthase
MEGDVGIGLVCQNTMDGKASNGNGLEKTVPSCCLKAMACVPEDDAKCHSTVVSGWFSEPHPRSGKKGGKAVYFNNPMWPGEAHSLKVEKVLFKDKSDFQEVLVFESATYGKVLVLDGIVQLTEKDECAYQEMIAHLPLCSISSPKNVLVVGGGDGGVLREISRHSSVEVIDICEIDKMVIDVSKKFFPELAVGFDDPRVQLHISDAAEFLRKSPEGKYDAIIVDSSDPVGPALALVEKPFFETLARALKPGGVLCNMAESMWLHTHLIEDMISICRQTFKSVHYAWSSVPTYPSGVIGFVLCSTEGPAVDFKNPINPIEKLDGAMTHKRELKFYNSDMHRAAFALPTFLRREVASLLAS

SEQ ID NO: 22265 - protein, 345 aa, Arabidopsis thaliana
  peptide (1)..(345): Ceres Seq. ID no. 12338103
  misc_feature (40)..(299): Pfam Name: Spermine/spermidine synthase Pfam Description: Spermine/spermidine synthase
  misc_feature (61)..(341): Homolog of NCBI NO: 6094327 NR Description: Spermidine synthase 1 (Putrescine
  misc_feature (28)..(341): Homolog of NCBI NO: 12229958 NR Description: Spermidine synthase 1 (Putrescine
  misc_feature (61)..(341): Homolog of NCBI NO: 6094330 NR Description: Spermidine synthase 2 (Putrescine
  misc_feature (35)..(341): Homolog of NCBI NO: 6094335 NR Description: Spermidine synthase (Putrescine
  misc_feature (4)..(341): Homolog of NCBI NO: 33354149 NR Description: aminopropyl transferase [Oryza sativa (japonica
  misc_feature (1)..(345): Homolog of NCBI NO: 33150481 NR Description: putative spermine synthase [Lycopersicon
  misc_feature (1)..(345): Homolog of NCBI NO: 9757993 NR Description: spermidine synthase [Arabidopsis thaliana]
  misc_feature (1)..(345): Homolog of NCBI NO: 21592832 NR Description: spermidine synthase [Arabidopsis thaliana]
  misc_feature (1)..(345): Homolog of NCBI NO: 15983394 NR Description: AT5g53120/MFH8_5 [Arabidopsis thaliana]
  misc_feature (1)..(345): Homolog of NCBI NO: 18423473 NR Description: spermidine synthase
MDGKASNGNGLEKTVPSCCLKAMACVPEDDAKCHSTVVSGWFSEPHPRSGKKGGKAVYFNNPMWPGEAHSLKVEKVLFKDKSDFQEVLVFESATYGKVLVLDGIVQLTEKDECAYQEMIAHLPLCSISSPKNVLVVGGGDGGVLREISRHSSVEVIDICEIDKMVIDVSKKFFPELAVGFDDPRVQLHISDAAEFLRKSPEGKYDAIIVDSSDPVGPALALVEKPFFETLARALKPGGVLCNMAESMWLHTHLIEDMISICRQTFKSVHYAWSSVPTYPSGVIGFVLCSTEGPAVDFKNPINPIEKLDGAMTHKRELKFYNSDMHRAAFALPTFLRREVASLLAS

SEQ ID NO: 22266 - protein, 323 aa, Arabidopsis thaliana
  peptide (1)..(323): Ceres Seq. ID no. 12338104
  misc_feature (18)..(277): Pfam Name: Spermine/spermidine synthase Pfam Description: Spermine/spermidine synthase
  misc_feature (39)..(319): Homolog of NCBI NO: 6094327 NR Description: Spermidine synthase 1 (Putrescine
  misc_feature (6)..(319): Homolog of NCBI NO: 12229958 NR Description: Spermidine synthase 1 (Putrescine
  misc_feature (39)..(319): Homolog of NCBI NO: 6094330 NR Description: Spermidine synthase 2 (Putrescine
  misc_feature (13)..(319): Homolog of NCBI NO: 6094335 NR Description: Spermidine synthase (Putrescine
  misc_feature (1)..(319): Homolog of NCBI NO: 33354149 NR Description: aminopropyl transferase [Oryza sativa (japonica
  misc_feature (1)..(323): Homolog of NCBI NO: 33150481 NR Description: putative spermine synthase [Lycopersicon
  misc_feature (1)..(323): Homolog of NCBI NO: 9757993 NR Description: spermidine synthase [Arabidopsis thaliana]
  misc_feature (1)..(323): Homolog of NCBI NO: 21592832 NR Description: spermidine synthase [Arabidopsis thaliana]
  misc_feature (1)..(323): Homolog of NCBI NO: 15983394 NR Description: AT5g53120/MFH8_5 [Arabidopsis thaliana]
  misc_feature (1)..(323): Homolog of NCBI NO: 18423473 NR Description: spermidine synthase
MACVPEDDAKCHSTVVSGWFSEPHPRSGKKGGKAVYFNNPMWPGEAHSLKVEKVLFKDKSDFQEVLVFESATYGKVLVLDGIVQLTEKDECAYQEMIAHLPLCSISSPKNVLVVGGGDGGVLREISRHSSVEVIDICEIDKMVIDVSKKFFPELAVGFDDPRVQLHISDAAEFLRKSPEGKYDAIIVDSSDPVGPALALVEKPFFETLARALKPGGVLCNMAESMWLHTHLIEDMISICRQTFKSVHYAWSSVPTYPSGVIGFVLCSTEGPAVDFKNPINPIEKLDGAMTHKRELKFYNSDMHRAAFALPTFLRREVASLLAS

SEQ ID NO: 22267 - DNA, 1257 bp, Arabidopsis thaliana
  misc_feature (1)..(1257): Ceres Seq. ID no. 12439615
  misc_feature: MA Experiment ID: 108435 Result: Up-regulated in Transcription
  misc_feature: MA Experiment 108435 PARAMETER Experiment Name: At_stm_Mutants_cDNA_P Parameter: Plant Line Value: wt Landsburg vs stm
  misc_feature: MA Experiment 108435 PARAMETER Experiment Name: At_stm_Mutants_cDNA_P Parameter: Tissue Value: Shoot Apical Meristem Region
  misc_feature: MA Experiment ID: 108462 Result: Up-regulated in Transcription
  misc_feature: MA Experiment 108462 PARAMETER Experiment Name: At_Germinating_Seeds_cDNA_P Parameter: Age (day) Value: 2 vs. 0
  misc_feature: MA Experiment 108462 PARAMETER Experiment Name: At_Germinating_Seeds_cDNA_P Parameter: Tissue Value: Germinating Seeds
  misc_feature: MA Experiment ID: 108463 Result: Up-regulated in Transcription
  misc_feature: MA Experiment 108463 PARAMETER Experiment Name: At_Germinating_Seeds_cDNA_P Parameter: Age (day) Value: 3 vs. 0
  misc_feature: MA Experiment 108463 PARAMETER Experiment Name: At_Germinating_Seeds_cDNA_P Parameter: Tissue Value: Germinating Seeds
  misc_feature: MA Experiment ID: 108464 Result: Up-regulated in Transcription
  misc_feature: MA Experiment 108464 PARAMETER Experiment Name: At_Germinating_Seeds_cDNA_P Parameter: Age (day) Value: 4 vs. 0
  misc_feature: MA Experiment 108464 PARAMETER Experiment Name: At_Germinating_Seeds_cDNA_P Parameter: Tissue Value: Germinating Seeds
  misc_feature: MA Experiment ID: 108473 Result: Down-regulated in Transcription
  misc_feature: MA Experiment 108473 PARAMETER Experiment Name: At_Drought_Flowers_cDNA_P Parameter: Timepoint (hr) Value: 7 d
  misc_feature: MA Experiment 108473 PARAMETER Experiment Name: At_Drought_Flowers_cDNA_P Parameter: Tissue Value: Flower
  misc_feature: MA Experiment 108473 PARAMETER Experiment Name: At_Drought_Flowers_cDNA_P Parameter: Treatment Value: Drought vs. No Drought
  misc_feature: MA Experiment ID: 108561 Result: Down-regulated in Transcription
  misc_feature: MA Experiment 108561 PARAMETER Experiment Name: At_100uM_ABA_cDNA_P Parameter: Timepoint (hr) Value: 6
  misc_feature: MA Experiment 108561 PARAMETER Experiment Name: At_100uM_ABA_cDNA_P Parameter: Tissue Value: Aerial
  misc_feature: MA Experiment 108561 PARAMETER Experiment Name: At_100uM_ABA_cDNA_P Parameter: Treatment Value: 100uM ABA vs. No Treatment
  misc_feature: MA Experiment ID: 108569 Result: Up-regulated in Transcription
  misc_feature: MA Experiment 108569 PARAMETER Experiment Name: At_0.001%_MeJA__cDNA_P Parameter: Timepoint (hr) Value: 6
  misc_feature: MA Experiment 108569 PARAMETER Experiment Name: At_0.001%_MeJA__cDNA_P Parameter: Tissue Value: Aerial
  misc_feature: MA Experiment 108569 PARAMETER Experiment Name: At_0.001%_MeJA__cDNA_P Parameter: Treatment Value: 0.001% MeJA vs. No Treatment
  misc_feature: MA Experiment ID: 108573 Result: Down-regulated in Transcription
  misc_feature: MA Experiment 108573 PARAMETER Experiment Name: At_Drought_cDNA_P Parameter: Timepoint (hr) Value: 6
  misc_feature: MA Experiment 108573 PARAMETER Experiment Name: At_Drought_cDNA_P Parameter: Tissue Value: Aerial
  misc_feature: MA Experiment 108573 PARAMETER Experiment Name: At_Drought_cDNA_P Parameter: Treatment Value: Drought vs. No Drought
  misc_feature: MA Experiment ID: 108579 Result: Up-regulated in Transcription
  misc_feature: MA Experiment 108579 PARAMETER Experiment Name: At_4deg_Cold_cDNA_P Parameter: Temperature (deg C) Value: 4 vs. 22
  misc_feature: MA Experiment 108579 PARAMETER Experiment Name: At_4deg_Cold_cDNA_P Parameter: Timepoint (hr) Value: 6
  misc_feature: MA Experiment 108579 PARAMETER Experiment Name: At_4deg_Cold_cDNA_P Parameter: Tissue Value: Aerial
  misc_feature: MA Experiment ID: 108594 Result: Down-regulated in Transcription
  misc_feature: MA Experiment 108594 PARAMETER Experiment Name: At_Ler-rhl_Root_cDNA_P Parameter: Plant Line Value: null
  misc_feature: MA Experiment ID: 108595 Result: Up-regulated in Transcription
  misc_feature: MA Experiment 108595 PARAMETER Experiment Name: At_Ler-pi_Ovule_cDNA_P Parameter: Plant Line Value: null
  misc_feature: MA Experiment ID: 108605 Result: Down-regulated in Transcription
  misc_feature: MA Experiment 108605 PARAMETER Experiment Name: At_100uM_ABA_cDNA_P Parameter: Timepoint (hr) Value: 6
  misc_feature: MA Experiment 108605 PARAMETER Experiment Name: At_100uM_ABA_cDNA_P Parameter: Tissue Value: Aerial
  misc_feature: MA Experiment 108605 PARAMETER Experiment Name: At_100uM_ABA_cDNA_P Parameter: Treatment Value: 100uM ABA vs. No Treatment
  misc_feature: MA Experiment ID: 108609 Result: Down-regulated in Transcription
  misc_feature: MA Experiment 108609 PARAMETER Experiment Name: At_100uM_ABA_cDNA_P Parameter: Timepoint (hr) Value: 24
  misc_feature: MA Experiment 108609 PARAMETER Experiment Name: At_100uM_ABA_cDNA_P Parameter: Tissue Value: Aerial
  misc_feature: MA Experiment 108609 PARAMETER Experiment Name: At_100uM_ABA_cDNA_P Parameter: Treatment Value: 100uM ABA vs. No Treatment
  misc_feature: MA Experiment ID: 20000069 Result: Down-regulated in Transcription
  misc_feature: MA Experiment 20000069 PARAMETER Experiment Name: At_100uM_ABA_Mutants_cDNA_P Parameter: Plant Line Value: CS23
  misc_feature: MA Experiment 20000069 PARAMETER Experiment Name: At_100uM_ABA_Mutants_cDNA_P Parameter: Timepoint (hr) Value: 6
  misc_feature: MA Experiment 20000069 PARAMETER Experiment Name: At_100uM_ABA_Mutants_cDNA_P Parameter: Tissue Value: Aerial
  misc_feature: MA Experiment 20000069 PARAMETER Experiment Name: At_100uM_ABA_Mutants_cDNA_P Parameter: Treatment Value: 100uM ABA vs. No Treatment
  misc_feature: MA Experiment ID: 20000086 Result: Down-regulated in Transcription
  misc_feature: MA Experiment 20000086 PARAMETER Experiment Name: At_100uM_ABA_Mutants_cDNA_P Parameter: Plant Line Value: CS22
  misc_feature: MA Experiment 20000086 PARAMETER Experiment Name: At_100uM_ABA_Mutants_cDNA_P Parameter: Timepoint (hr) Value: 6
  misc_feature: MA Experiment 20000086 PARAMETER Experiment Name: At_100uM_ABA_Mutants_cDNA_P Parameter: Tissue Value: Aerial
  misc_feature: MA Experiment 20000086 PARAMETER Experiment Name: At_100uM_ABA_Mutants_cDNA_P Parameter: Treatment Value: 100uM ABA vs. No Treatment
  misc_feature: MA Experiment ID: 20000087 Result: Down-regulated in Transcription
  misc_feature: MA Experiment 20000087 PARAMETER Experiment Name: At_100uM_ABA_Mutants_cDNA_P Parameter: Plant Line Value: WS
  misc_feature: MA Experiment 20000087 PARAMETER Experiment Name: At_100uM_ABA_Mutants_cDNA_P Parameter: Timepoint (hr) Value: 6
  misc_feature: MA Experiment 20000087 PARAMETER Experiment Name: At_100uM_ABA_Mutants_cDNA_P Parameter: Tissue Value: Aerial
  misc_feature: MA Experiment 20000087 PARAMETER Experiment Name: At_100uM_ABA_Mutants_cDNA_P Parameter: Treatment Value: 100uM ABA vs. No Treatment
  misc_feature: MA Experiment ID: 20000089 Result: Down-regulated in Transcription
  misc_feature: MA Experiment ID: 20000090 Result: Down-regulated in Transcription
  misc_feature: MA Experiment ID: 20000117 Result: Down-regulated in Transcription
  misc_feature: MA Experiment 20000117 PARAMETER Experiment Name: At_100uM_ABA_Mutants_cDNA_P Parameter: Plant Line Value: Columbia
  misc_feature: MA Experiment 20000117 PARAMETER Experiment Name: At_100uM_ABA_Mutants_cDNA_P Parameter: Timepoint (hr) Value: 6
  misc_feature: MA Experiment 20000117 PARAMETER Experiment Name: At_100uM_ABA_Mutants_cDNA_P Parameter: Tissue Value: Aerial
  misc_feature: MA Experiment 20000117 PARAMETER Experiment Name: At_100uM_ABA_Mutants_cDNA_P Parameter: Treatment Value: 100uM ABA vs. No Treatment
  misc_feature: MA Experiment ID: 20000180 Result: Up-regulated in Transcription
  misc_feature: MA Experiment 20000180 PARAMETER Experiment Name: At_Germinating_Seeds_P Parameter: Age (hr) Value: 24 vs. 0
  misc_feature: MA Experiment 20000180 PARAMETER Experiment Name: At_Germinating_Seeds_P Parameter: Tissue Value: Germinating Seeds
  misc_feature: MA Experiment ID: 20000184 Result: Up-regulated in Transcription
  misc_feature: MA Experiment 20000184 PARAMETER Experiment Name: At_Shoots__P Parameter: Age (day) Value: 7
  misc_feature: MA Experiment 20000184 PARAMETER Experiment Name: At_Shoots__P Parameter: Tissue Value: Shoots vs. Whole Plant
  misc_feature: MA Experiment ID: 20000185 Result: Up-regulated in Transcription
  misc_feature: MA Experiment 20000185 PARAMETER Experiment Name: At_Roots__P Parameter: Age (day) Value: 7 vs. 21
  misc_feature: MA Experiment 20000185 PARAMETER Experiment Name: At_Roots__P Parameter: Organism Value: A. thaliana
  misc_feature: MA Experiment 20000185 PARAMETER Experiment Name: At_Roots__P Parameter: Tissue Value: Roots vs. Whole Plant
  misc_feature: MA Experiment ID: 20000227 Result: Down-regulated in Transcription
  misc_feature: MA Experiment 20000227 PARAMETER Experiment Name: At_Root-Tips-vs-Tops_P Parameter: Tissue Value: Root Tips vs. Root Tops
  misc_feature: MA Experiment ID: 20000234 Result: Up-regulated in Transcription
  misc_feature: MA Experiment 20000234 PARAMETER Experiment Name: At_Siliques_P Parameter: Age (day) Value: 21
  misc_feature: MA Experiment 20000234 PARAMETER Experiment Name: At_Siliques_P Parameter: Organism Value: A. thaliana
  misc_feature: MA Experiment 20000234 PARAMETER Experiment Name: At_Siliques_P Parameter: Plant Line Value: WS
  misc_feature: MA Experiment 20000234 PARAMETER Experiment Name: At_Siliques_P Parameter: Tissue Value: Less Than 5mm Siliques vs. Whole Plant
  misc_feature: MA Experiment ID: 20000235 Result: Up-regulated in Transcription
  misc_feature: MA Experiment 20000235 PARAMETER Experiment Name: At_Siliques_P Parameter: Age (day) Value: 21
  misc_feature: MA Experiment 20000235 PARAMETER Experiment Name: At_Siliques_P Parameter: Organism Value: A. thaliana
  misc_feature: MA Experiment 20000235 PARAMETER Experiment Name: At_Siliques_P Parameter: Plant Line Value: WS
  misc_feature: MA Experiment 20000235 PARAMETER Experiment Name: At_Siliques_P Parameter: Tissue Value: 5-10mm Siliques vs. Whole Plant
  misc_feature: MA Experiment ID: 20000264 Result: Up-regulated in Transcription
  misc_feature: MA Experiment 20000264 PARAMETER Experiment Name: At_Open_Flower_P Parameter: Age (day) Value: 21
  misc_feature: MA Experiment 20000264 PARAMETER Experiment Name: At_Open_Flower_P Parameter: Plant Line Value: WS
  misc_feature: MA Experiment 20000264 PARAMETER Experiment Name: At_Open_Flower_P Parameter: Tissue Value: Open Flower vs. Whole Plant
  misc_feature: MA Experiment ID: 20000265 Result: Up-regulated in Transcription
  misc_feature: MA Experiment 20000265 PARAMETER Experiment Name: At_Open_Flower_P Parameter: Age (day) Value: 21
  misc_feature: MA Experiment 20000265 PARAMETER Experiment Name: At_Open_Flower_P Parameter: Plant Line Value: WS
  misc_feature: MA Experiment 20000265 PARAMETER Experiment Name: At_Open_Flower_P Parameter: Tissue Value: Closed Flower vs. Whole Plant
  misc_feature: MA Experiment ID: 20000286 Result: Up-regulated in Transcription
  misc_feature: MA Experiment 20000286 PARAMETER Experiment Name: At_Open_Flower_P Parameter: Age (day) Value: 21
  misc_feature: MA Experiment 20000286 PARAMETER Experiment Name: At_Open_Flower_P Parameter: Plant Line Value: WS
  misc_feature: MA Experiment 20000286 PARAMETER Experiment Name: At_Open_Flower_P Parameter: Tissue Value: Half Open vs. Whole Plant
  misc_feature: MA Experiment ID: 20000437 Result: Down-regulated in Transcription
  misc_feature: MA Experiment 20000437 PARAMETER Experiment Name: At_Drought_P Parameter: Age (day) Value: 8
  misc_feature: MA Experiment 20000437 PARAMETER Experiment Name: At_Drought_P Parameter: Organism Value: A. thaliana
  misc_feature: MA Experiment 20000437 PARAMETER Experiment Name: At_Drought_P Parameter: Plant Line Value: WS
  misc_feature: MA Experiment 20000437 PARAMETER Experiment Name: At_Drought_P Parameter: Timepoint (hr) Value: 24
  misc_feature: MA Experiment 20000437 PARAMETER Experiment Name: At_Drought_P Parameter: Tissue Value: Whole Plant
  misc_feature: MA Experiment 20000437 PARAMETER Experiment Name: At_Drought_P Parameter: Treatment Value: Drought vs. No Drought
  misc_feature: MA Experiment ID: 20000438 Result: Up-regulated in Transcription
  misc_feature: MA Experiment 20000438 PARAMETER Experiment Name: At_Shoots__P Parameter: Age (day) Value: 14
  misc_feature: MA Experiment 20000438 PARAMETER Experiment Name: At_Shoots__P Parameter: Tissue Value: Shoots vs. Whole Plant
  misc_feature: MA Experiment ID: 20000439 Result: Up-regulated in Transcription
  misc_feature: MA Experiment 20000439 PARAMETER Experiment Name: At_Roots__P Parameter: Age (day) Value: 14 vs. 21
  misc_feature: MA Experiment 20000439 PARAMETER Experiment Name: At_Roots__P Parameter: Organism Value: A. thaliana
  misc_feature: MA Experiment 20000439 PARAMETER Experiment Name: At_Roots__P Parameter: Tissue Value: Roots vs. Whole Plant
  misc_feature: MA Experiment ID: 20000441 Result: Down-regulated in Transcription
  misc_feature: MA Experiment 20000441 PARAMETER Experiment Name: At_1uM_BR-BRZ__P Parameter: Tissue Value: Shoot Apices
  misc_feature: MA Experiment 20000441 PARAMETER Experiment Name: At_1uM_BR-BRZ__P Parameter: Treatment Value: 1uM BR vs. No Treatment
  misc_feature: MA Experiment ID: 20000443 Result: Down-regulated in Transcription
  misc_feature: MA Experiment 20000443 PARAMETER Experiment Name: At_1uM_BR-BRZ__P Parameter: Tissue Value: Shoot Apices
  misc_feature: MA Experiment 20000443 PARAMETER Experiment Name: At_1uM_BR-BRZ__P Parameter: Treatment Value: 1uM BRZ vs. No Treatment
  misc_feature: MA Experiment ID: 20000453 Result: Down-regulated in Transcription
  misc_feature: MA Experiment 20000453 PARAMETER Experiment Name: At_100uM_ABA_P Parameter: Age (day) Value: 15
  misc_feature: MA Experiment 20000453 PARAMETER Experiment Name: At_100uM_ABA_P Parameter: Organism Value: A. thaliana
  misc_feature: MA Experiment 20000453 PARAMETER Experiment Name: At_100uM_ABA_P Parameter: Plant Line Value: WS
  misc_feature: MA Experiment 20000453 PARAMETER Experiment Name: At_100uM_ABA_P Parameter: Timepoint (hr) Value: 24
  misc_feature: MA Experiment 20000453 PARAMETER Experiment Name: At_100uM_ABA_P Parameter: Tissue Value: Aerial
  misc_feature: MA Experiment 20000453 PARAMETER Experiment Name: At_100uM_ABA_P Parameter: Treatment Value: 100uM ABA vs. No Treatment
  misc_feature: MA Experiment ID: 20000456 Result: Up-regulated in Transcription
  misc_feature: MA Experiment 20000456 PARAMETER Experiment Name: At_100uM_BA_P Parameter: Age (day) Value: 14
  misc_feature: MA Experiment 20000456 PARAMETER Experiment Name: At_100uM_BA_P Parameter: Organism Value: A. thaliana
  misc_feature: MA Experiment 20000456 PARAMETER Experiment Name: At_100uM_BA_P Parameter: Plant Line Value: WS
  misc_feature: MA Experiment 20000456 PARAMETER Experiment Name: At_100uM_BA_P Parameter: Timepoint (hr) Value: 6
  misc_feature: MA Experiment 20000456 PARAMETER Experiment Name: At_100uM_BA_P Parameter: Tissue Value: Aerial
  misc_feature: MA Experiment 20000456 PARAMETER Experiment Name: At_100uM_BA_P Parameter: Treatment Value: 100uM BA vs. No Treatment
  misc_feature: MA Experiment ID: 20000460 Result: Down-regulated in Transcription
  misc_feature: MA Experiment 20000460 PARAMETER Experiment Name: At_10percent_PEG_P Parameter: Age (day) Value: 12
  misc_feature: MA Experiment 20000460 PARAMETER Experiment Name: At_10percent_PEG_P Parameter: Organism Value: A. thaliana
  misc_feature: MA Experiment 20000460 PARAMETER Experiment Name: At_10percent_PEG_P Parameter: Plant Line Value: WS
  misc_feature: MA Experiment 20000460 PARAMETER Experiment Name: At_10percent_PEG_P Parameter: Timepoint (day) Value: 12
  misc_feature: MA Experiment 20000460 PARAMETER Experiment Name: At_10percent_PEG_P Parameter: Tissue Value: Whole Plant
  misc_feature: MA Experiment 20000460 PARAMETER Experiment Name: At_10percent_PEG_P Parameter: Treatment Value: 10percent PEG vs. No Treatment
  misc_feature: MA Experiment ID: 20000495 Result: Up-regulated in Transcription
  misc_feature: MA Experiment 20000495 PARAMETER Experiment Name: At_Guard_Cells_P Parameter: Harvest Date Value: 8/2/2002
  misc_feature: MA Experiment 20000495 PARAMETER Experiment Name: At_Guard_Cells_P Parameter: Organism Value: A. thaliana
  misc_feature: MA Experiment 20000495 PARAMETER Experiment Name: At_Guard_Cells_P Parameter: Tissue Value: Guard Cells vs. Leaves
  misc_feature: MA Experiment ID: 20000496 Result: Up-regulated in Transcription
  misc_feature: MA Experiment 20000496 PARAMETER Experiment Name: At_Guard_Cells_P Parameter: Harvest Date Value: 7/19/2002
  misc_feature: MA Experiment 20000496 PARAMETER Experiment Name: At_Guard_Cells_P Parameter: Organism Value: Canola
  misc_feature: MA Experiment 20000496 PARAMETER Experiment Name: At_Guard_Cells_P Parameter: Tissue Value: Guard Cells vs. Leaves
  misc_feature: MA Experiment ID: 20000527 Result: Down-regulated in Transcription
  misc_feature: MA Experiment 20000527 PARAMETER Experiment Name: At_10percent_PEG_P Parameter: Age (day) Value: 20
  misc_feature: MA Experiment 20000527 PARAMETER Experiment Name: At_10percent_PEG_P Parameter: Organism Value: A. thaliana
  misc_feature: MA Experiment 20000527 PARAMETER Experiment Name: At_10percent_PEG_P Parameter: Plant Line Value: WS
  misc_feature: MA Experiment 20000527 PARAMETER Experiment Name: At_10percent_PEG_P Parameter: Timepoint (day) Value: 20
  misc_feature: MA Experiment 20000527 PARAMETER Experiment Name: At_10percent_PEG_P Parameter: Tissue Value: Whole Plant
  misc_feature: MA Experiment 20000527 PARAMETER Experiment Name: At_10percent_PEG_P Parameter: Treatment Value: 10percent PEG vs. No Treatment
  misc_feature: MA Experiment ID: 20000573 Result: Down-regulated in Transcription
  misc_feature: MA Experiment 20000573 PARAMETER Experiment Name: At_100uM_ABA_Mutants__P Parameter: Organism Value: A. thaliana
  misc_feature: MA Experiment 20000573 PARAMETER Experiment Name: At_100uM_ABA_Mutants__P Parameter: Plant Line Value: CS22 vs. Ler wt
  misc_feature: MA Experiment 20000573 PARAMETER Experiment Name: At_100uM_ABA_Mutants__P Parameter: Timepoint (hr) Value: N/A
  misc_feature: MA Experiment 20000573 PARAMETER Experiment Name: At_100uM_ABA_Mutants__P Parameter: Tissue Value: Whole Plant
  misc_feature: MA Experiment 20000573 PARAMETER Experiment Name: At_100uM_ABA_Mutants__P Parameter: Treatment Value: None
  misc_feature: MA Experiment ID: 20000574 Result: Down-regulated in Transcription
  misc_feature: MA Experiment 20000574 PARAMETER Experiment Name: At_100uM_ABA_Mutants__P Parameter: Organism Value: A. thaliana
  misc_feature: MA Experiment 20000574 PARAMETER Experiment Name: At_100uM_ABA_Mutants__P Parameter: Plant Line Value: CS23 vs. Ler wt
  misc_feature: MA Experiment 20000574 PARAMETER Experiment Name: At_100uM_ABA_Mutants__P Parameter: Timepoint (hr) Value: N/A
  misc_feature: MA Experiment 20000574 PARAMETER Experiment Name: At_100uM_ABA_Mutants__P Parameter: Tissue Value: Whole Plant
  misc_feature: MA Experiment 20000574 PARAMETER Experiment Name: At_100uM_ABA_Mutants__P Parameter: Treatment Value: None
  misc_feature: MA Experiment ID: 20000575 Result: Down-regulated in Transcription
  misc_feature: MA Experiment 20000575 PARAMETER Experiment Name: At_100uM_ABA_Mutants__P Parameter: Organism Value: A. thaliana
  misc_feature: MA Experiment 20000575 PARAMETER Experiment Name: At_100uM_ABA_Mutants__P Parameter: Plant Line Value: CS22
  misc_feature: MA Experiment 20000575 PARAMETER Experiment Name: At_100uM_ABA_Mutants__P Parameter: Timepoint (hr) Value: 6
  misc_feature: MA Experiment 20000575 PARAMETER Experiment Name: At_100uM_ABA_Mutants__P Parameter: Tissue Value: Whole Plant
  misc_feature: MA Experiment 20000575 PARAMETER Experiment Name: At_100uM_ABA_Mutants__P Parameter: Treatment Value: 1uM ABA vs. No Treatment
  misc_feature: MA Experiment ID: 20000576 Result: Down-regulated in Transcription
  misc_feature: MA Experiment 20000576 PARAMETER Experiment Name: At_100uM_ABA_Mutants__P Parameter: Organism Value: A. thaliana
  misc_feature: MA Experiment 20000576 PARAMETER Experiment Name: At_100uM_ABA_Mutants__P Parameter: Plant Line Value: CS23
  misc_feature: MA Experiment 20000576 PARAMETER Experiment Name: At_100uM_ABA_Mutants__P Parameter: Timepoint (hr) Value: 6
  misc_feature: MA Experiment 20000576 PARAMETER Experiment Name: At_100uM_ABA_Mutants__P Parameter: Tissue Value: Whole Plant
  misc_feature: MA Experiment 20000576 PARAMETER Experiment Name: At_100uM_ABA_Mutants__P Parameter: Treatment Value: 1uM ABA vs. No Treatment
  misc_feature: MA Experiment ID: 20000794 Result: Down-regulated in Transcription
  misc_feature: MA Experiment 20000794 PARAMETER Experiment Name: At_Petals_P Parameter: Age (day) Value: 23-25 days
  misc_feature: MA Experiment 20000794 PARAMETER Experiment Name: At_Petals_P Parameter: Plant Line Value: WS
  misc_feature: MA Experiment 20000794 PARAMETER Experiment Name: At_Petals_P Parameter: Tissue Value: Petals vs. Whole plant
  misc_feature: MA Experiment ID: 20001248 Result: Down-regulated in Transcription
  misc_feature: MA Experiment 20001248 PARAMETER Experiment Name: At_Far-red-induction_P Parameter: Age (day) Value: 7
  misc_feature: MA Experiment 20001248 PARAMETER Experiment Name: At_Far-red-induction_P Parameter: Light Value: Far-red vs. White
  misc_feature: MA Experiment 20001248 PARAMETER Experiment Name: At_Far-red-induction_P Parameter: Organism Value: A. thaliana
  misc_feature: MA Experiment 20001248 PARAMETER Experiment Name: At_Far-red-induction_P Parameter: Plant Line Value: Columbia
  misc_feature: MA Experiment 20001248 PARAMETER Experiment Name: At_Far-red-induction_P Parameter: Timepoint (hr) Value: 4
  misc_feature: MA Experiment 20001248 PARAMETER Experiment Name: At_Far-red-induction_P Parameter: Tissue Value: Whole Plant
  misc_feature: MA Experiment ID: 20001450 Result: Down-regulated in Transcription
  misc_feature: MA Experiment 20001450 PARAMETER Experiment Name: At_Far-red-induction_P Parameter: Age (day) Value: 7
  misc_feature: MA Experiment 20001450 PARAMETER Experiment Name: At_Far-red-induction_P Parameter: Light Value: Far-red vs. White
  misc_feature: MA Experiment 20001450 PARAMETER Experiment Name: At_Far-red-induction_P Parameter: Organism Value: A. thaliana
  misc_feature: MA Experiment 20001450 PARAMETER Experiment Name: At_Far-red-induction_P Parameter: Plant Line Value: Columbia
  misc_feature: MA Experiment 20001450 PARAMETER Experiment Name: At_Far-red-induction_P Parameter: Timepoint (hr) Value: 8
  misc_feature: MA Experiment 20001450 PARAMETER Experiment Name: At_Far-red-induction_P Parameter: Tissue Value: Whole Plant
  misc_feature: MA Experiment ID: 20001451 Result: Down-regulated in Transcription
  misc_feature: MA Experiment 20001451 PARAMETER Experiment Name: At_Far-red-induction_P Parameter: Age (day) Value: 7
  misc_feature: MA Experiment 20001451 PARAMETER Experiment Name: At_Far-red-induction_P Parameter: Light Value: Far-red vs. White
  misc_feature: MA Experiment 20001451 PARAMETER Experiment Name: At_Far-red-induction_P Parameter: Organism Value: A. thaliana
  misc_feature: MA Experiment 20001451 PARAMETER Experiment Name: At_Far-red-induction_P Parameter: Plant Line Value: Columbia
  misc_feature: MA Experiment 20001451 PARAMETER Experiment Name: At_Far-red-induction_P Parameter: Timepoint (hr) Value: 24
  misc_feature: MA Experiment 20001451 PARAMETER Experiment Name: At_Far-red-induction_P Parameter: Tissue Value: Whole Plant
  misc_feature: MA Experiment ID: 20001503 Result: Up-regulated in Transcription
  misc_feature: MA Experiment 20001503 PARAMETER Experiment Name: At_Far-red-enriched_P Parameter: Age (day) Value: 7
  misc_feature: MA Experiment 20001503 PARAMETER Experiment Name: At_Far-red-enriched_P Parameter: Light Value: Far-red enriched vs. White
  misc_feature: MA Experiment 20001503 PARAMETER Experiment Name: At_Far-red-enriched_P Parameter: Organism Value: A. thaliana
  misc_feature: MA Experiment 20001503 PARAMETER Experiment Name: At_Far-red-enriched_P Parameter: Plant Line Value: Columbia
  misc_feature: MA Experiment 20001503 PARAMETER Experiment Name: At_Far-red-enriched_P Parameter: Timepoint (day) Value: 3
  misc_feature: MA Experiment 20001503 PARAMETER Experiment Name: At_Far-red-enriched_P Parameter: Tissue Value: Whole Plant
  misc_feature: MA Experiment ID: 20001905 Result: Down-regulated in Transcription
  misc_feature: MA Experiment 20001905 PARAMETER Experiment Name: At_Drought_Reproduction_P Parameter: Age (day) Value: 40
  misc_feature: MA Experiment 20001905 PARAMETER Experiment Name: At_Drought_Reproduction_P Parameter: Organism Value: A. thaliana
  misc_feature: MA Experiment 20001905 PARAMETER Experiment Name: At_Drought_Reproduction_P Parameter: Plant Line Value: WS
  misc_feature: MA Experiment 20001905 PARAMETER Experiment Name: At_Drought_Reproduction_P Parameter: Timepoint (day) Value: 10
  misc_feature: MA Experiment 20001905 PARAMETER Experiment Name: At_Drought_Reproduction_P Parameter: Tissue Value: Rosettes
  misc_feature: MA Experiment 20001905 PARAMETER Experiment Name: At_Drought_Reproduction_P Parameter: Treatment Value: Drought vs. No Drought
  misc_feature: MA Experiment ID: 20001911 Result: Down-regulated in Transcription
  misc_feature: MA Experiment 20001911 PARAMETER Experiment Name: At_Drought_Reproduction_P Parameter: Age (day) Value: 40
  misc_feature: MA Experiment 20001911 PARAMETER Experiment Name: At_Drought_Reproduction_P Parameter: Organism Value: A. thaliana
  misc_feature: MA Experiment 20001911 PARAMETER Experiment Name: At_Drought_Reproduction_P Parameter: Plant Line Value: WS
  misc_feature: MA Experiment 20001911 PARAMETER Experiment Name: At_Drought_Reproduction_P Parameter: Timepoint (day) Value: 10
  misc_feature: MA Experiment 20001911 PARAMETER Experiment Name: At_Drought_Reproduction_P Parameter: Tissue Value: Flowers
  misc_feature: MA Experiment 20001911 PARAMETER Experiment Name: At_Drought_Reproduction_P Parameter: Treatment Value: Drought vs. No Drought
gaaaaacacataaactcactctcactctctcactgtcggcaaactaacttattcacttttccggcactgattctgctcgggaaaaacaactccggcacaaaatgcagctttttccagtcatgttagccacactctgcattgtcctgcagcttctcattggctcgtcagctttggctacgacaaatcgccacgtgtcaaactctcattggcttcccgcagtagctacatggtacggaagccccaacggtgacggcagcgacggaggagcgtgtggttacggtacgttggtggatgtgaagccgttacatgcgagggttggagcggtgaatccaattctcttcaaaaatggtgaaggttgcggagcttgttacaaggttcgatgcttggacaagagcatttgttcccggagagccgttaccgtcataattaccgatgagtgtcccggctgctctaaaaccagcactcactttgacctcagtggtgccgtctttggccggttagctattgccggagagtcagggcctctccgtaaccgtggactaatcccagtcatttatcgccggactgcatgcaaatatagagggaagaacatagcattccatgtgaacgaaggatcaactgatttttggctatctctgctggtcgagtttgaagatggagaaggagacattggctccatgcacattcgccaagcaggagccagggaatggttagagatgaagcatgtatggggagccaactggtgcatcattggagggccactcaagggaccattctccatcaagctcaccactttgtctgccggtaaaacactctctgccaccgacgttgtccctagaaactgggctcccaaagcaacttacagttcccgcctcaacttctcccctgtcctttgaaccatctcttctacatagtcaaagactattatagttctattactactactactcgtgtgatcgtttttttttagagagaaacagagtgactgctggccgtaggatggaaacagtaagaaaagtacatccgaatcaacggctattgcgttctctcctcttccttcttgtgatgtggatttgtgtgtgtgtgatgtgtcggtgagtgtgttatagaagtcactatagccatcttcaaaggggagatagagctaggagtagtatttggtggtgtcacgtcgtttgttttttctatataatttttgtcactatgtctttctattatgggacatgacataatatatcatatgaataatttatcacc

SEQ ID NO: 22268 - protein, 264 aa, Arabidopsis thaliana
  peptide (1)..(264): Ceres Seq. ID no. 12439616
  misc_feature (164)..(245): Pfam Name: Pollen allergen Pfam Description: Pollen allergen
  misc_feature (1)..(250): Homolog of NCBI NO: 25404942 NR Description: protein F1E22.6 [imported] - Arabidopsis thaliana
  misc_feature (32)..(261): Homolog of NCBI NO: 1076486 NR Description: cim1 protein - soybean
  misc_feature (1)..(260): Homolog of NCBI NO: 20138423 NR Description: Putative beta-expansin 2 precursor (At-EXPB2)
  misc_feature (20)..(197): Homolog of NCBI NO: 21666634 NR Description: beta-expansin [Oryza sativa]
  misc_feature (20)..(264): Homolog of NCBI NO: 38346623 NR Description: OSJNBa0074L08.17 [Oryza sativa (japonica
  misc_feature (13)..(264): Homolog of NCBI NO: 11357194 NR Description: beta-expansin [imported] - Arabidopsis thaliana
  misc_feature (1)..(264): Homolog of NCBI NO: 15225423 NR Description: beta-expansin pollen allergen protein
  misc_feature (7)..(264): Homolog of NCBI NO: 21592834 NR Description: putative beta-expansin/allergen protein
  misc_feature (1)..(264): Homolog of NCBI NO: 18417157 NR Description: beta-expansin pollen allergen protein
  misc_feature (1)..(234): Homolog of NCBI NO: 7484871 NR Description: cim1 protein homolog F26K10.130 - Arabidopsis
MQLFPVMLATLCIVLQLLIGSSALATTNRHVSNSHWLPAVATWYGSPNGDGSDGGACGYGTLVDVKPLHARVGAVNPILFKNGEGCGACYKVRCLDKSICSRRAVTVIITDECPGCSKTSTHFDLSGAVFGRLAIAGESGPLRNRGLIPVIYRRTACKYRGKNIAFHVNEGSTDFWLSLLVEFEDGEGDIGSMHIRQAGAREWLEMKHVWGANWCIIGGPLKGPFSIKLTTLSAGKTLSATDVVPRNWAPKATYSSRLNFSPVL

SEQ ID NO: 22269 - protein, 258 aa, Arabidopsis thaliana
  peptide (1)..(258): Ceres Seq. ID no. 12439617
  misc_feature (158)..(239): Pfam Name: Pollen allergen Pfam Description: Pollen allergen
  misc_feature (14)..(191): Homolog of NCBI NO: 21666634 NR Description: beta-expansin [Oryza sativa]
  misc_feature (14)..(258): Homolog of NCBI NO: 38346623 NR Description: OSJNBa0074L08.17 [Oryza sativa (japonica
  misc_feature (7)..(258): Homolog of NCBI NO: 11357194 NR Description: beta-expansin [imported] - Arabidopsis thaliana
  misc_feature (1)..(258): Homolog of NCBI NO: 15225423 NR Description: beta-expansin pollen allergen protein
  misc_feature (26)..(255): Homolog of NCBI NO: 1076486 NR Description: cim1 protein - soybean
  misc_feature (1)..(254): Homolog of NCBI NO: 20138423 NR Description: Putative beta-expansin 2 precursor (At-EXPB2)
  misc_feature (1)..(244): Homolog of NCBI NO: 25404942 NR Description: protein F1E22.6 [imported] - Arabidopsis thaliana
  misc_feature (1)..(258): Homolog of NCBI NO: 21592834 NR Description: putative beta-expansin/allergen protein
  misc_feature (1)..(258): Homolog of NCBI NO: 18417157 NR Description: beta-expansin pollen allergen protein
  misc_feature (1)..(228): Homolog of NCBI NO: 7484871 NR Description: cim1 protein homolog F26K10.130 - Arabidopsis
MLATLCIVLQLLIGSSALATTNRHVSNSHWLPAVATWYGSPNGDGSDGGACGYGTLVDVKPLHARVGAVNPILFKNGEGCGACYKVRCLDKSICSRRAVTVIITDECPGCSKTSTHFDLSGAVFGRLAIAGESGPLRNRGLIPVIYRRTACKYRGKNIAFHVNEGSTDFWLSLLVEFEDGEGDIGSMHIRQAGAREWLEMKHVWGANWCIIGGPLKGPFSIKLTTLSAGKTLSATDVVPRNWAPKATYSSRLNFSPVL

SEQ ID NO: 22270 - DNA, 2160 bp, Arabidopsis thaliana
  misc_feature (1)..(2160): Ceres Seq. ID no. 12327301
  misc_feature: MA Experiment ID: 108463 Result: Down-regulated in Transcription
  misc_feature: MA Experiment 108463 PARAMETER Experiment Name: At_Germinating_Seeds_cDNA_P Parameter: Age (day) Value: 3 vs. 0
  misc_feature: MA Experiment 108463 PARAMETER Experiment Name: At_Germinating_Seeds_cDNA_P Parameter: Tissue Value: Germinating Seeds
  misc_feature: MA Experiment ID: 108573 Result: Up-regulated in Transcription
  misc_feature: MA Experiment 108573 PARAMETER Experiment Name: At_Drought_cDNA_P Parameter: Timepoint (hr) Value: 6
  misc_feature: MA Experiment 108573 PARAMETER Experiment Name: At_Drought_cDNA_P Parameter: Tissue Value: Aerial
  misc_feature: MA Experiment 108573 PARAMETER Experiment Name: At_Drought_cDNA_P Parameter: Treatment Value: Drought vs. No Drought
  misc_feature: MA Experiment ID: 20000173 Result: Down-regulated in Transcription
  misc_feature: MA Experiment 20000173 PARAMETER Experiment Name: At_42deg_Heat_P Parameter: Age (day) Value: 14
  misc_feature: MA Experiment 20000173 PARAMETER Experiment Name: At_42deg_Heat_P Parameter: Organism Value: A. thaliana
  misc_feature: MA Experiment 20000173 PARAMETER Experiment Name: At_42deg_Heat_P Parameter: Plant Line Value: WS
  misc_feature: MA Experiment 20000173 PARAMETER Experiment Name: At_42deg_Heat_P Parameter: Temperature (deg C) Value: 42 vs. 22
  misc_feature: MA Experiment 20000173 PARAMETER Experiment Name: At_42deg_Heat_P Parameter: Timepoint (hr) Value: 6
  misc_feature: MA Experiment 20000173 PARAMETER Experiment Name: At_42deg_Heat_P Parameter: Tissue Value: Aerial
gacttcttcgtcttcgtttcttcatttcgaagctctctctgtgtgtgatggcgtgccctagaaactccataacatacaacgccacgcgctgcgcgtgcggtatcggtcagctactaaaccggagctccgggagctgcgagatcttcggttggccgtcaacaatctccacagacaaagatgtaaactacagcgtaatatcattcgccgagactttattcgctttcgataggatccgtaagttcacgcaatctcaagctattttcttagaagctacgctcgtgatgcttctctcttggttagtcttttgtttcttcctgagattcaccaaactcggcgatggtcgtaatgtctggtttaatctccgttggtggattactcgacttgacgtcttcttctccactagacattggctcgttagtgctttctctactctcattgcttttgtctccatgaattggtttcttttgagtaaaccaattaggttcctgaatcttgtaggatgatcaacaaattgtcaagaaacgtaaaacagaacttggtggaacattttctgttgcgagctggattgttttcattggtttattcgctgcgtgagtttgataacttcagaatttagtgcttcctttggtttttgttaacttagtcagtttcttcacaggctgctttatcaaatcataaccaagagaacaattgaagttcacaatgtgagagctactggttctccagatttgatctcattcgagaacgatttggagtttaacatcaccgctgtttcggatatgagttgctctaatttacgcggtattgggaacgtggtcatgggtaatcccgggtttagcgagttcaaagttgctgctctttctagtttaggaagctatacttgtaagaatacaacttcaggaccaacagtgaatttcaaatgtaccaaatgtcgtctcaccaacgattacatatatatctcgtggcatttcgttgatcttcctgattcgcctgctgctgctgttggatttcagtttaactttacgtctaagaatggacctaacgagaagcatatgagttttgttagtggcactctgagaaacggaagcattctcgatgaaagtccggttactttccgtggaaccgaagggaatatattgaagtttaatctgtttcctcggatttaccatcatttgcatgatctaaagctaatccaacctctctttcacgagtttatccctggctctgtttaccgagacactactcagcttcaggcatctatgggaaggtcaacagatggcatactcaatacgacattgttcatcaactatctctctgcttatattgttgagatagaccatgaaaatatactcggtcctgttagcttccttgccgatcttggtggtttgtattgcatcagtattggcatatttttctacctactagtgcagtgtgagtacaggatcaagaagctgcgaaatgaagatactgttttcaggaagataaggaatcgtcgtaaagctctagatcactgggataaactgagaagatatgttgcatacacatgggattgcagcatattggtcaatgatgccatcaaaacgacaaaggtatcaggaatgtgtggtttaacgagacctccaacatcttctaatagctcggaacacggggaatcgatcatggcgaacaagaagcctaacttaagtattgagaagaatgtgatttcacaacctgcaagtttagaactgagctcttttgattcggcttcttctctggctcatggagataatttctcaaataaaaagagtataactcatccaatttctcatagtgaagacgtttcaatccctccacctcctccaatggagttcattgaaggatcttctggttcagaagtggacgcaatggatatcaagaataaatttcaacttctttacgactacaatgtattgcttagggaaaaacttttagagactcagtctttgcttaatactttggcacccaaaccaatagcatcatcatcttcaaccgtggaacgcagtgcctagaacaacgaggttgtttgacatgtattgtttgtatactccctgtaacttccacatttattgaacaaaggaatgactgatgcttgttgtatctttgtgaatatacctagttgctaatagtaacaaattttcgctc

SEQ ID NO: 22271 - protein, 415 aa, Arabidopsis thaliana
  peptide (1)..(415): Ceres Seq. ID no. 12327302
  misc_feature (1)..(261): Homolog of NCBI NO: 34893992 NR Description: P0672D08.4 [Oryza sativa (japonica
  misc_feature (1)..(415): Homolog of NCBI NO: 9759136 NR Description: gene_id:MQK4.27~unknown protein [Arabidopsis
  misc_feature (1)..(415): Homolog of NCBI NO: 30685896 NR Description: expressed protein [Arabidopsis thaliana]
MSCSNLRGIGNVVMGNPGFSEFKVAALSSLGSYTCKNTTSGPTVNFKCTKCRLTNDYIYISWHFVDLPDSPAAAVGFQFNFTSKNGPNEKHMSFVSGTLRNGSILDESPVTFRGTEGNILKFNLFPRIYHHLHDLKLIQPLFHEFIPGSVYRDTTQLQASMGRSTDGILNTTLFINYLSAYIVEIDHENILGPVSFLADLGGLYCISIGIFFYLLVQCEYRIKKLRNEDTVFRKIRNRRKALDHWDKLRRYVAYTWDCSILVNDAIKTTKVSGMCGLTRPPTSSNSSEHGESIMANKKPNLSIEKNVISQPASLELSSFDSASSLAHGDNFSNKKSITHPISHSEDVSIPPPPPMEFIEGSSGSEVDAMDIKNKFQLLYDYNVLLREKLLETQSLLNTLAPKPIASSSSTVERSA

SEQ ID NO: 22272 - protein, 402 aa, Arabidopsis thaliana
  peptide (1)..(402): Ceres Seq. ID no. 12327303
  misc_feature (1)..(248): Homolog of NCBI NO: 34893992 NR Description: P0672D08.4 [Oryza sativa (japonica
  misc_feature (1)..(402): Homolog of NCBI NO: 9759136 NR Description: gene_id:MQK4.27~unknown protein [Arabidopsis
  misc_feature (1)..(402): Homolog of NCBI NO: 30685896 NR Description: expressed protein [Arabidopsis thaliana]
MGNPGFSEFKVAALSSLGSYTCKNTTSGPTVNFKCTKCRLTNDYIYISWHFVDLPDSPAAAVGFQFNFTSKNGPNEKHMSFVSGTLRNGSILDESPVTFRGTEGNILKFNLFPRIYHHLHDLKLIQPLFHEFIPGSVYRDTTQLQASMGRSTDGILNTTLFINYLSAYIVEIDHENILGPVSFLADLGGLYCISIGIFFYLLVQCEYRIKKLRNEDTVFRKIRNRRKALDHWDKLRRYVAYTWDCSILVNDAIKTTKVSGMCGLTRPPTSSNSSEHGESIMANKKPNLSIEKNVISQPASLELSSFDSASSLAHGDNFSNKKSITHPISHSEDVSIPPPPPMEFIEGSSGSEVDAMDIKNKFQLLYDYNVLLREKLLETQSLLNTLAPKPIASSSSTVERSA

SEQ ID NO: 22273 - protein, 324 aa, Arabidopsis thaliana
  peptide (1)..(324): Ceres Seq. ID no. 12327304
  misc_feature (1)..(170): Homolog of NCBI NO: 34893992 NR Description: P0672D08.4 [Oryza sativa (japonica
  misc_feature (1)..(324): Homolog of NCBI NO: 9759136 NR Description: gene_id:MQK4.27~unknown protein [Arabidopsis
  misc_feature (1)..(324): Homolog of NCBI NO: 30685896 NR Description: expressed protein [Arabidopsis thaliana]
MSFVSGTLRNGSILDESPVTFRGTEGNILKFNLFPRIYHHLHDLKLIQPLFHEFIPGSVYRDTTQLQASMGRSTDGILNTTLFINYLSAYIVEIDHENILGPVSFLADLGGLYCISIGIFFYLLVQCEYRIKKLRNEDTVFRKIRNRRKALDHWDKLRRYVAYTWDCSILVNDAIKTTKVSGMCGLTRPPTSSNSSEHGESIMANKKPNLSIEKNVISQPASLELSSFDSASSLAHGDNFSNKKSITHPISHSEDVSIPPPPPMEFIEGSSGSEVDAMDIKNKFQLLYDYNVLLREKLLETQSLLNTLAPKPIASSSSTVERSA

SEQ ID NO: 22274 - DNA, 1689 bp, Arabidopsis thaliana
  misc_feature (1)..(1689): Ceres Seq. ID no. 13488203
  misc_feature: MA Experiment ID: 108463 Result: Up-regulated in Transcription
  misc_feature: MA Experiment 108463 PARAMETER Experiment Name: At_Germinating_Seeds_cDNA_P Parameter: Age (day) Value: 3 vs. 0
  misc_feature: MA Experiment 108463 PARAMETER Experiment Name: At_Germinating_Seeds_cDNA_P Parameter: Tissue Value: Germinating Seeds
  misc_feature: MA Experiment ID: 108464 Result: Up-regulated in Transcription
  misc_feature: MA Experiment 108464 PARAMETER Experiment Name: At_Germinating_Seeds_cDNA_P Parameter: Age (day) Value: 4 vs. 0
  misc_feature: MA Experiment 108464 PARAMETER Experiment Name: At_Germinating_Seeds_cDNA_P Parameter: Tissue Value: Germinating Seeds
  misc_feature: MA Experiment ID: 108569 Result: Up-regulated in Transcription
  misc_feature: MA Experiment 108569 PARAMETER Experiment Name: At_0.001%_MeJA__cDNA_P Parameter: Timepoint (hr) Value: 6
  misc_feature: MA Experiment 108569 PARAMETER Experiment Name: At_0.001%_MeJA__cDNA_P Parameter: Tissue Value: Aerial
  misc_feature: MA Experiment 108569 PARAMETER Experiment Name: At_0.001%_MeJA__cDNA_P Parameter: Treatment Value: 0.001% MeJA vs. No Treatment
  misc_feature: MA Experiment ID: 108572 Result: Up-regulated in Transcription
  misc_feature: MA Experiment 108572 PARAMETER Experiment Name: At_Drought_cDNA_P Parameter: Timepoint (hr) Value: 1
  misc_feature: MA Experiment 108572 PARAMETER Experiment Name: At_Drought_cDNA_P Parameter: Tissue Value: Aerial
  misc_feature: MA Experiment 108572 PARAMETER Experiment Name: At_Drought_cDNA_P Parameter: Treatment Value: Drought vs. No Drought
  misc_feature: MA Experiment ID: 108573 Result: Up-regulated in Transcription
  misc_feature: MA Experiment 108573 PARAMETER Experiment Name: At_Drought_cDNA_P Parameter: Timepoint (hr) Value: 6
  misc_feature: MA Experiment 108573 PARAMETER Experiment Name: At_Drought_cDNA_P Parameter: Tissue Value: Aerial
  misc_feature: MA Experiment 108573 PARAMETER Experiment Name: At_Drought_cDNA_P Parameter: Treatment Value: Drought vs. No Drought
  misc_feature: MA Experiment ID: 108574 Result: Up-regulated in Transcription
  misc_feature: MA Experiment 108574 PARAMETER Experiment Name: At_Wounding__cDNA_P Parameter: Timepoint (hr) Value: 1
  misc_feature: MA Experiment 108574 PARAMETER Experiment Name: At_Wounding__cDNA_P Parameter: Tissue Value: Aerial
  misc_feature: MA Experiment 108574 PARAMETER Experiment Name: At_Wounding__cDNA_P Parameter: Treatment Value: Wounding vs. No Wounding
  misc_feature: MA Experiment ID: 108595 Result: Up-regulated in Transcription
  misc_feature: MA Experiment 108595 PARAMETER Experiment Name: At_Ler-pi_Ovule_cDNA_P Parameter: Plant Line Value: null
  misc_feature: MA Experiment ID: 108609 Result: Up-regulated in Transcription
  misc_feature: MA Experiment 108609 PARAMETER Experiment Name: At_100uM_ABA_cDNA_P Parameter: Timepoint (hr) Value: 24
  misc_feature: MA Experiment 108609 PARAMETER Experiment Name: At_100uM_ABA_cDNA_P Parameter: Tissue Value: Aerial
  misc_feature: MA Experiment 108609 PARAMETER Experiment Name: At_100uM_ABA_cDNA_P Parameter: Treatment Value: 100uM ABA vs. No Treatment
  misc_feature: MA Experiment ID: 20000113 Result: Down-regulated in Transcription
  misc_feature: MA Experiment 20000113 PARAMETER Experiment Name: At_42deg_Heat_cDNA_P Parameter: Temperature (deg C) Value: 42 vs. 22
  misc_feature: MA Experiment 20000113 PARAMETER Experiment Name: At_42deg_Heat_cDNA_P Parameter: Timepoint (hr) Value: 8
  misc_feature: MA Experiment 20000113 PARAMETER Experiment Name: At_42deg_Heat_cDNA_P Parameter: Tissue Value: Aerial
  misc_feature: MA Experiment ID: 20000184 Result: Down-regulated in Transcription
  misc_feature: MA Experiment 20000184 PARAMETER Experiment Name: At_Shoots__P Parameter: Age (day) Value: 7
  misc_feature: MA Experiment 20000184 PARAMETER Experiment Name: At_Shoots__P Parameter: Tissue Value: Shoots vs. Whole Plant
  misc_feature: MA Experiment ID: 20000185 Result: Down-regulated in Transcription
  misc_feature: MA Experiment 20000185 PARAMETER Experiment Name: At_Roots__P Parameter: Age (day) Value: 7 vs. 21
  misc_feature: MA Experiment 20000185 PARAMETER Experiment Name: At_Roots__P Parameter: Organism Value: A. thaliana
  misc_feature: MA Experiment 20000185 PARAMETER Experiment Name: At_Roots__P Parameter: Tissue Value: Roots vs. Whole Plant
  misc_feature: MA Experiment ID: 20000224 Result: Up-regulated in Transcription
  misc_feature: MA Experiment ID: 20000234 Result: Up-regulated in Transcription
  misc_feature: MA Experiment 20000234 PARAMETER Experiment Name: At_Siliques_P Parameter: Age (day) Value: 21
  misc_feature: MA Experiment 20000234 PARAMETER Experiment Name: At_Siliques_P Parameter: Organism Value: A. thaliana
  misc_feature: MA Experiment 20000234 PARAMETER Experiment Name: At_Siliques_P Parameter: Plant Line Value: WS
  misc_feature: MA Experiment 20000234 PARAMETER Experiment Name: At_Siliques_P Parameter: Tissue Value: Less Than 5mm Siliques vs. Whole Plant
  misc_feature: MA Experiment ID: 20000264 Result: Up-regulated in Transcription
  misc_feature: MA Experiment 20000264 PARAMETER Experiment Name: At_Open_Flower_P Parameter: Age (day) Value: 21
  misc_feature: MA Experiment 20000264 PARAMETER Experiment Name: At_Open_Flower_P Parameter: Plant Line Value: WS
  misc_feature: MA Experiment 20000264 PARAMETER Experiment Name: At_Open_Flower_P Parameter: Tissue Value: Open Flower vs. Whole Plant
  misc_feature: MA Experiment ID: 20000265 Result: Up-regulated in Transcription
  misc_feature: MA Experiment 20000265 PARAMETER Experiment Name: At_Open_Flower_P Parameter: Age (day) Value: 21
  misc_feature: MA Experiment 20000265 PARAMETER Experiment Name: At_Open_Flower_P Parameter: Plant Line Value: WS
  misc_feature: MA Experiment 20000265 PARAMETER Experiment Name: At_Open_Flower_P Parameter: Tissue Value: Closed Flower vs. Whole Plant
  misc_feature: MA Experiment ID: 20000267 Result: Up-regulated in Transcription
  misc_feature: MA Experiment 20000267 PARAMETER Experiment Name: At_Drought_P Parameter: Age (day) Value: 7
  misc_feature: MA Experiment 20000267 PARAMETER Experiment Name: At_Drought_P Parameter: Organism Value: A. thaliana
  misc_feature: MA Experiment 20000267 PARAMETER Experiment Name: At_Drought_P Parameter: Plant Line Value: WS
  misc_feature: MA Experiment 20000267 PARAMETER Experiment Name: At_Drought_P Parameter: Timepoint (hr) Value: 6
  misc_feature: MA Experiment 20000267 PARAMETER Experiment Name: At_Drought_P Parameter: Tissue Value: Whole Plant
  misc_feature: MA Experiment 20000267 PARAMETER Experiment Name: At_Drought_P Parameter: Treatment Value: Drought vs. No Drought
  misc_feature: MA Experiment ID: 20000286 Result: Up-regulated in Transcription
  misc_feature: MA Experiment 20000286 PARAMETER Experiment Name: At_Open_Flower_P Parameter: Age (day) Value: 21
  misc_feature: MA Experiment 20000286 PARAMETER Experiment Name: At_Open_Flower_P Parameter: Plant Line Value: WS
  misc_feature: MA Experiment 20000286 PARAMETER Experiment Name: At_Open_Flower_P Parameter: Tissue Value: Half Open vs. Whole Plant
  misc_feature: MA Experiment ID: 20000438 Result: Down-regulated in Transcription
  misc_feature: MA Experiment 20000438 PARAMETER Experiment Name: At_Shoots__P Parameter: Age (day) Value: 14
  misc_feature: MA Experiment 20000438 PARAMETER Experiment Name: At_Shoots__P Parameter: Tissue Value: Shoots vs. Whole Plant
  misc_feature: MA Experiment ID: 20000439 Result: Down-regulated in Transcription
  misc_feature: MA Experiment 20000439 PARAMETER Experiment Name: At_Roots__P Parameter: Age (day) Value: 14 vs. 21
  misc_feature: MA Experiment 20000439 PARAMETER Experiment Name: At_Roots__P Parameter: Organism Value: A. thaliana
  misc_feature: MA Experiment 20000439 PARAMETER Experiment Name: At_Roots__P Parameter: Tissue Value: Roots vs. Whole Plant
  misc_feature: MA Experiment ID: 20000452 Result: Up-regulated in Transcription
  misc_feature: MA Experiment 20000452 PARAMETER Experiment Name: At_CS6879_Shoots-Roots_P Parameter: Age (day) Value: 14
  misc_feature: MA Experiment 20000452 PARAMETER Experiment Name: At_CS6879_Shoots-Roots_P Parameter: Organism Value: A. thaliana
  misc_feature: MA Experiment 20000452 PARAMETER Experiment Name: At_CS6879_Shoots-Roots_P Parameter: Plant Line Value: CS6879 vs. WS
  misc_feature: MA Experiment 20000452 PARAMETER Experiment Name: At_CS6879_Shoots-Roots_P Parameter: Tissue Value: Shoots
  misc_feature: MA Experiment ID: 20000453 Result: Up-regulated in Transcription
  misc_feature: MA Experiment 20000453 PARAMETER Experiment Name: At_100uM_ABA_P Parameter: Age (day) Value: 15
  misc_feature: MA Experiment 20000453 PARAMETER Experiment Name: At_100uM_ABA_P Parameter: Organism Value: A. thaliana
  misc_feature: MA Experiment 20000453 PARAMETER Experiment Name: At_100uM_ABA_P Parameter: Plant Line Value: WS
  misc_feature: MA Experiment 20000453 PARAMETER Experiment Name: At_100uM_ABA_P Parameter: Timepoint (hr) Value: 24
  misc_feature: MA Experiment 20000453 PARAMETER Experiment Name: At_100uM_ABA_P Parameter: Tissue Value: Aerial
  misc_feature: MA Experiment 20000453 PARAMETER Experiment Name: At_100uM_ABA_P Parameter: Treatment Value: 100uM ABA vs. No Treatment
  misc_feature: MA Experiment ID: 20000456 Result: Down-regulated in Transcription
  misc_feature: MA Experiment 20000456 PARAMETER Experiment Name: At_100uM_BA_P Parameter: Age (day) Value: 14
  misc_feature: MA Experiment 20000456 PARAMETER Experiment Name: At_100uM_BA_P Parameter: Organism Value: A. thaliana
  misc_feature: MA Experiment 20000456 PARAMETER Experiment Name: At_100uM_BA_P Parameter: Plant Line Value: WS
  misc_feature: MA Experiment 20000456 PARAMETER Experiment Name: At_100uM_BA_P Parameter: Timepoint (hr) Value: 6
  misc_feature: MA Experiment 20000456 PARAMETER Experiment Name: At_100uM_BA_P Parameter: Tissue Value: Aerial
  misc_feature: MA Experiment 20000456 PARAMETER Experiment Name: At_100uM_BA_P Parameter: Treatment Value: 100uM BA vs. No Treatment
  misc_feature: MA Experiment ID: 20000495 Result: Up-regulated in Transcription
  misc_feature: MA Experiment 20000495 PARAMETER Experiment Name: At_Guard_Cells_P Parameter: Harvest Date Value: 8/2/2002
  misc_feature: MA Experiment 20000495 PARAMETER Experiment Name: At_Guard_Cells_P Parameter: Organism Value: A. thaliana
  misc_feature: MA Experiment 20000495 PARAMETER Experiment Name: At_Guard_Cells_P Parameter: Tissue Value: Guard Cells vs. Leaves
  misc_feature: MA Experiment ID: 20000527 Result: Down-regulated in Transcription
  misc_feature: MA Experiment 20000527 PARAMETER Experiment Name: At_10percent_PEG_P Parameter: Age (day) Value: 20
  misc_feature: MA Experiment 20000527 PARAMETER Experiment Name: At_10percent_PEG_P Parameter: Organism Value: A. thaliana
  misc_feature: MA Experiment 20000527 PARAMETER Experiment Name: At_10percent_PEG_P Parameter: Plant Line Value: WS
  misc_feature: MA Experiment 20000527 PARAMETER Experiment Name: At_10percent_PEG_P Parameter: Timepoint (day) Value: 20
  misc_feature: MA Experiment 20000527 PARAMETER Experiment Name: At_10percent_PEG_P Parameter: Tissue Value: Whole Plant
  misc_feature: MA Experiment 20000527 PARAMETER Experiment Name: At_10percent_PEG_P Parameter: Treatment Value: 10percent PEG vs. No Treatment
  misc_feature: MA Experiment ID: 20000573 Result: Up-regulated in Transcription
  misc_feature: MA Experiment 20000573 PARAMETER Experiment Name: At_100uM_ABA_Mutants__P Parameter: Organism Value: A. thaliana
  misc_feature: MA Experiment 20000573 PARAMETER Experiment Name: At_100uM_ABA_Mutants__P Parameter: Plant Line Value: CS22 vs. Ler wt
  misc_feature: MA Experiment 20000573 PARAMETER Experiment Name: At_100uM_ABA_Mutants__P Parameter: Timepoint (hr) Value: N/A
  misc_feature: MA Experiment 20000573 PARAMETER Experiment Name: At_100uM_ABA_Mutants__P Parameter: Tissue Value: Whole Plant
  misc_feature: MA Experiment 20000573 PARAMETER Experiment Name: At_100uM_ABA_Mutants__P Parameter: Treatment Value: None
  misc_feature: MA Experiment ID: 20000574 Result: Up-regulated in Transcription
  misc_feature: MA Experiment 20000574 PARAMETER Experiment Name: At_100uM_ABA_Mutants__P Parameter: Organism Value: A. thaliana
  misc_feature: MA Experiment 20000574 PARAMETER Experiment Name: At_100uM_ABA_Mutants__P Parameter: Plant Line Value: CS23 vs. Ler wt
  misc_feature: MA Experiment 20000574 PARAMETER Experiment Name: At_100uM_ABA_Mutants__P Parameter: Timepoint (hr) Value: N/A
  misc_feature: MA Experiment 20000574 PARAMETER Experiment Name: At_100uM_ABA_Mutants__P Parameter: Tissue Value: Whole Plant
  misc_feature: MA Experiment 20000574 PARAMETER Experiment Name: At_100uM_ABA_Mutants__P Parameter: Treatment Value: None
  misc_feature: MA Experiment ID: 20001247 Result: Down-regulated in Transcription
  misc_feature: MA Experiment 20001247 PARAMETER Experiment Name: At_Far-red-induction_P Parameter: Age (day) Value: 7
  misc_feature: MA Experiment 20001247 PARAMETER Experiment Name: At_Far-red-induction_P Parameter: Light Value: Far-red vs. White
  misc_feature: MA Experiment 20001247 PARAMETER Experiment Name: At_Far-red-induction_P Parameter: Organism Value: A. thaliana
  misc_feature: MA Experiment 20001247 PARAMETER Experiment Name: At_Far-red-induction_P Parameter: Plant Line Value: Columbia
  misc_feature: MA Experiment 20001247 PARAMETER Experiment Name: At_Far-red-induction_P Parameter: Timepoint (hr) Value: 1
  misc_feature: MA Experiment 20001247 PARAMETER Experiment Name: At_Far-red-induction_P Parameter: Tissue Value: Whole Plant
  misc_feature: MA Experiment ID: 20001248 Result: Down-regulated in Transcription
  misc_feature: MA Experiment 20001248 PARAMETER Experiment Name: At_Far-red-induction_P Parameter: Age (day) Value: 7
  misc_feature: MA Experiment 20001248 PARAMETER Experiment Name: At_Far-red-induction_P Parameter: Light Value: Far-red vs. White
  misc_feature: MA Experiment 20001248 PARAMETER Experiment Name: At_Far-red-induction_P Parameter: Organism Value: A. thaliana
  misc_feature: MA Experiment 20001248 PARAMETER Experiment Name: At_Far-red-induction_P Parameter: Plant Line Value: Columbia
  misc_feature: MA Experiment 20001248 PARAMETER Experiment Name: At_Far-red-induction_P Parameter: Timepoint (hr) Value: 4
  misc_feature: MA Experiment 20001248 PARAMETER Experiment Name: At_Far-red-induction_P Parameter: Tissue Value: Whole Plant
  misc_feature: MA Experiment ID: 20001450 Result: Down-regulated in Transcription
  misc_feature: MA Experiment 20001450 PARAMETER Experiment Name: At_Far-red-induction_P Parameter: Age (day) Value: 7
  misc_feature: MA Experiment 20001450 PARAMETER Experiment Name: At_Far-red-induction_P Parameter: Light Value: Far-red vs. White
  misc_feature: MA Experiment 20001450 PARAMETER Experiment Name: At_Far-red-induction_P Parameter: Organism Value: A. thaliana
  misc_feature: MA Experiment 20001450 PARAMETER Experiment Name: At_Far-red-induction_P Parameter: Plant Line Value: Columbia
  misc_feature: MA Experiment 20001450 PARAMETER Experiment Name: At_Far-red-induction_P Parameter: Timepoint (hr) Value: 8
  misc_feature: MA Experiment 20001450 PARAMETER Experiment Name: At_Far-red-induction_P Parameter: Tissue Value: Whole Plant
  misc_feature: MA Experiment ID: 20001458 Result: Down-regulated in Transcription
  misc_feature: MA Experiment 20001458 PARAMETER Experiment Name: At_50mM_NH4NO3_L-to-H_P Parameter: Age (day) Value: Undefined
  misc_feature: MA Experiment 20001458 PARAMETER Experiment Name: At_50mM_NH4NO3_L-to-H_P Parameter: Organism Value: Undefined
  misc_feature: MA Experiment 20001458 PARAMETER Experiment Name: At_50mM_NH4NO3_L-to-H_P Parameter: Plant Line Value: Undefined
  misc_feature: MA Experiment 20001458 PARAMETER Experiment Name: At_50mM_NH4NO3_L-to-H_P Parameter: Timepoint (hr) Value: 2
  misc_feature: MA Experiment 20001458 PARAMETER Experiment Name: At_50mM_NH4NO3_L-to-H_P Parameter: Tissue Value: Siliques
  misc_feature: MA Experiment 20001458 PARAMETER Experiment Name: At_50mM_NH4NO3_L-to-H_P Parameter: Treatment Value: 50mM NH4NO3 vs. 100mM Manitol
  misc_feature: MA Experiment ID: 20001554 Result: Up-regulated in Transcription
  misc_feature: MA Experiment 20001554 PARAMETER Experiment Name: At_Drought_Soil_Dry_P Parameter: Age (day) Value: 21
  misc_feature: MA Experiment 20001554 PARAMETER Experiment Name: At_Drought_Soil_Dry_P Parameter: Organism Value: A. thaliana
  misc_feature: MA Experiment 20001554 PARAMETER Experiment Name: At_Drought_Soil_Dry_P Parameter: Plant Line Value: WS
  misc_feature: MA Experiment 20001554 PARAMETER Experiment Name: At_Drought_Soil_Dry_P Parameter: Post Timepoint (hr) Value: None
  misc_feature: MA Experiment 20001554 PARAMETER Experiment Name: At_Drought_Soil_Dry_P Parameter: Post-Treatment Value: None
  misc_feature: MA Experiment 20001554 PARAMETER Experiment Name: At_Drought_Soil_Dry_P Parameter: Timepoint (day) Value: 7
  misc_feature: MA Experiment 20001554 PARAMETER Experiment Name: At_Drought_Soil_Dry_P Parameter: Treatment Value: Drought vs. No Drought
  misc_feature: MA Experiment ID: 20001557 Result: Down-regulated in Transcription
  misc_feature: MA Experiment 20001557 PARAMETER Experiment Name: At_Drought_Soil_Dry_P Parameter: Age (day) Value: 27
  misc_feature: MA Experiment 20001557 PARAMETER Experiment Name: At_Drought_Soil_Dry_P Parameter: Organism Value: A. thaliana
  misc_feature: MA Experiment 20001557 PARAMETER Experiment Name: At_Drought_Soil_Dry_P Parameter: Plant Line Value: WS
  misc_feature: MA Experiment 20001557 PARAMETER Experiment Name: At_Drought_Soil_Dry_P Parameter: Post Timepoint (hr) Value: 3
  misc_feature: MA Experiment 20001557 PARAMETER Experiment Name: At_Drought_Soil_Dry_P Parameter: Post-Treatment Value: Re-Water vs. No Drought
  misc_feature: MA Experiment 20001557 PARAMETER Experiment Name: At_Drought_Soil_Dry_P Parameter: Timepoint (day) Value: 13
  misc_feature: MA Experiment 20001557 PARAMETER Experiment Name: At_Drought_Soil_Dry_P Parameter: Treatment Value: Drought vs. No Drought
  misc_feature: MA Experiment ID: 20001558 Result: Down-regulated in Transcription
  misc_feature: MA Experiment 20001558 PARAMETER Experiment Name: At_Drought_Soil_Dry_P Parameter: Age (day) Value: 27
  misc_feature: MA Experiment 20001558 PARAMETER Experiment Name: At_Drought_Soil_Dry_P Parameter: Organism Value: A. thaliana
  misc_feature: MA Experiment 20001558 PARAMETER Experiment Name: At_Drought_Soil_Dry_P Parameter: Plant Line Value: WS
  misc_feature: MA Experiment 20001558 PARAMETER Experiment Name: At_Drought_Soil_Dry_P Parameter: Post Timepoint (hr) Value: 6
  misc_feature: MA Experiment 20001558 PARAMETER Experiment Name: At_Drought_Soil_Dry_P Parameter: Post-Treatment Value: Re-Water vs. No Drought
  misc_feature: MA Experiment 20001558 PARAMETER Experiment Name: At_Drought_Soil_Dry_P Parameter: Timepoint (day) Value: 13
  misc_feature: MA Experiment 20001558 PARAMETER Experiment Name: At_Drought_Soil_Dry_P Parameter: Treatment Value: Drought vs. No Drought
  misc_feature: MA Experiment ID: 20001906 Result: Down-regulated in Transcription
  misc_feature: MA Experiment 20001906 PARAMETER Experiment Name: At_Drought_Reproduction_P Parameter: Age (day) Value: 35
  misc_feature: MA Experiment 20001906 PARAMETER Experiment Name: At_Drought_Reproduction_P Parameter: Organism Value: A. thaliana
  misc_feature: MA Experiment 20001906 PARAMETER Experiment Name: At_Drought_Reproduction_P Parameter: Plant Line Value: WS
  misc_feature: MA Experiment 20001906 PARAMETER Experiment Name: At_Drought_Reproduction_P Parameter: Timepoint (day) Value: 5
  misc_feature: MA Experiment 20001906 PARAMETER Experiment Name: At_Drought_Reproduction_P Parameter: Tissue Value: Siliques
  misc_feature: MA Experiment 20001906 PARAMETER Experiment Name: At_Drought_Reproduction_P Parameter: Treatment Value: Drought vs. No Drought
cgatagaaatagaaggcgaagagataatttccaaaaacaagaaaaacctctaagctcaaaagatgttgttgagaacgatggcggcgacttccccgcggccaccaccgtcaacatccctaacatctcagcagccaccatcacccccctcacagcttcccctccgtacaatgccgggatcgtacggctggccgttggttggaccattatcggaccgtttagattacttctggttccaaggacccgataagtttttccggacaagagctgagaagtataagagcactgtgttccgtacaaatattcctccgacgtttcctttcttcggcaacgttaaccctaacatcgtcgccgttcttgacgtcaagtcttttagccatctttttgacatggatctagttgataaaagagatgttctcatcggagacttccggcctagccttgggttctacggcggcgttcgtgttggagtttatctcgacactactgagccaaagcacgccaagataaaaggtttcgctatggaaacactaaaacgaagctcaaaagtatggctacaagagcttcgttcaaacctaaacattttctggggaacaatcgaatccgaaatctccaaaaacggtgccgcttcatatatcttccctctccaacgttgcatcttcagtttcctctgcgcctctctcgccggcgttgacgcttccgtatcgccggacatcgctgagaacggttggaaaacaatcaatacttggcttgcgttgcaagttattcccactgctaaacttggcgtagttcctcagcctcttgaagagattttacttcatacttggccttatccttctctcttaatcgccggaaattacaaaaagctttacaatttcatcgacgagaacgccggagattgtctccggttaggtcaagaagaattcgggttgacccgagatgaggctattcaaaatcttctctttgttttaggttttaatgcctacgggggcttttccgtcttcttaccttctttgatcgggagaataaccggcgacaattccggtttacaggagaggattagaaccgaagtcaggagagtttgcggatccgggtcggatcttaatttcaagacggttaacgaaatggagctggttaaatccgtggtttacgaaacgctgcgttttagtcctccggttccgctgcaattcgcacgtgcgaggaaagattttcagataagttcacacgatgctgtttttgaggtcaagaaaggtgagcttctttgtggttatcagccgcttgtgatgagagacgctaatgtttttgacgaaccggaggaatttaaaccggaccggtatgtaggtgagaccgggtctgaattgctgaattatctctactggtctaacggtccacaaaccggtaccccgagcgcgtcgaacaaacagtgtgcagctaaggacattgtcactctcacggcttccttgctcgttgccgatttatttctccggtatgatacgattactggtgactccggttcaattaaagctgttgttaaagctaaataagttaaagattgattagtgtttaatgttatgtaatcaatcttcaacggtttcatttgttcggagtgtataaattatatgtaaactaaaataatccgaattgaaactcaaattgttatgttagatggtgttgctatgttagagagatttt

SEQ ID NO: 22275 - protein, 492 aa, Arabidopsis thaliana
  peptide (1)..(492): Ceres Seq. ID no. 13488204
  misc_feature (6)..(492): Homolog of NCBI NO: 5830469 NR Description: hydroperoxide lyase [Medicago sativa]
  misc_feature (6)..(492): Homolog of NCBI NO: 5830467 NR Description: hydroperoxide lyase [Medicago sativa]
  misc_feature (6)..(492): Homolog of NCBI NO: 5830465 NR Description: hydroperoxide lyase [Medicago sativa]
  misc_feature (1)..(492): Homolog of NCBI NO: 29373125 NR Description: fatty acid hydroperoxide lyase [Citrus sinensis]
  misc_feature (155)..(492): Homolog of NCBI NO: 19424049 NR Description: putative hydroperoxide lyase HPOL [Arabidopsis
  misc_feature (109)..(492): Homolog of NCBI NO: 15233810 NR Description: hydroperoxide lyase (HPOL) like protein
  misc_feature (6)..(53): Homolog of NCBI NO: 7488048 NR Description: probable allene oxide synthase - Arabidopsis
  misc_feature (100)..(477): Homolog of NCBI NO: 7488048 NR Description: probable allene oxide synthase - Arabidopsis
  misc_feature (26)..(492): Homolog of NCBI NO: 25308880 NR Description: hydroperoxide lyase (HPOL) like protein
  misc_feature (1)..(492): Homolog of NCBI NO: 11357336 NR Description: hydroperoxide lyase (EC 4.1.2.-)
MLLRTMAATSPRPPPSTSLTSQQPPSPPSQLPLRTMPGSYGWPLVGPLSDRLDYFWFQGPDKFFRTRAEKYKSTVFRTNIPPTFPFFGNVNPNIVAVLDVKSFSHLFDMDLVDKRDVLIGDFRPSLGFYGGVRVGVYLDTTEPKHAKIKGFAMETLKRSSKVWLQELRSNLNIFWGTIESEISKNGAASYIFPLQRCIFSFLCASLAGVDASVSPDIAENGWKTINTWLALQVIPTAKLGVVPQPLEEILLHTWPYPSLLIAGNYKKLYNFIDENAGDCLRLGQEEFGLTRDEAIQNLLFVLGFNAYGGFSVFLPSLIGRITGDNSGLQERIRTEVRRVCGSGSDLNFKTVNEMELVKSVVYETLRFSPPVPLQFARARKDFQISSHDAVFEVKKGELLCGYQPLVMRDANVFDEPEEFKPDRYVGETGSELLNYLYWSNGPQTGTPSASNKQCAAKDIVTLTASLLVADLFLRYDTITGDSGSIKAVVKAK

SEQ ID NO: 22276 - protein, 487 aa, Arabidopsis thaliana
  peptide (1)..(487): Ceres Seq. ID no. 13488205
  misc_feature (1)..(487): Homolog of NCBI NO: 5830469 NR Description: hydroperoxide lyase [Medicago sativa]
  misc_feature (1)..(487): Homolog of NCBI NO: 5830467 NR Description: hydroperoxide lyase [Medicago sativa]
  misc_feature (1)..(487): Homolog of NCBI NO: 5830465 NR Description: hydroperoxide lyase [Medicago sativa]
  misc_feature (1)..(487): Homolog of NCBI NO: 29373125 NR Description: fatty acid hydroperoxide lyase [Citrus sinensis]
  misc_feature (150)..(487): Homolog of NCBI NO: 19424049 NR Description: putative hydroperoxide lyase HPOL [Arabidopsis
  misc_feature (104)..(487): Homolog of NCBI NO: 15233810 NR Description: hydroperoxide lyase (HPOL) like protein
  misc_feature (1)..(48): Homolog of NCBI NO: 7488048 NR Description: probable allene oxide synthase - Arabidopsis
  misc_feature (95)..(472): Homolog of NCBI NO: 7488048 NR Description: probable allene oxide synthase - Arabidopsis
  misc_feature (21)..(487): Homolog of NCBI NO: 25308880 NR Description: hydroperoxide lyase (HPOL) like protein
  misc_feature (1)..(487): Homolog of NCBI NO: 11357336 NR Description: hydroperoxide lyase (EC 4.1.2.-)
MAATSPRPPPSTSLTSQQPPSPPSQLPLRTMPGSYGWPLVGPLSDRLDYFWFQGPDKFFRTRAEKYKSTVFRTNIPPTFPFFGNVNPNIVAVLDVKSFSHLFDMDLVDKRDVLIGDFRPSLGFYGGVRVGVYLDTTEPKHAKIKGFAMETLKRSSKVWLQELRSNLNIFWGTIESEISKNGAASYIFPLQRCIFSFLCASLAGVDASVSPDIAENGWKTINTWLALQVIPTAKLGVVPQPLEEILLHTWPYPSLLIAGNYKKLYNFIDENAGDCLRLGQEEFGLTRDEAIQNLLFVLGFNAYGGFSVFLPSLIGRITGDNSGLQERIRTEVRRVCGSGSDLNFKTVNEMELVKSVVYETLRFSPPVPLQFARARKDFQISSHDAVFEVKKGELLCGYQPLVMRDANVFDEPEEFKPDRYVGETGSELLNYLYWSNGPQTGTPSASNKQCAAKDIVTLTASLLVADLFLRYDTITGDSGSIKAVVKAK

SEQ ID NO: 22277 - protein, 457 aa, Arabidopsis thaliana
  peptide (1)..(457): Ceres Seq. ID no. 13488206
  misc_feature (1)..(457): Homolog of NCBI NO: 5830469 NR Description: hydroperoxide lyase [Medicago sativa]
  misc_feature (1)..(457): Homolog of NCBI NO: 5830467 NR Description: hydroperoxide lyase [Medicago sativa]
  misc_feature (1)..(457): Homolog of NCBI NO: 5830465 NR Description: hydroperoxide lyase [Medicago sativa]
  misc_feature (1)..(457): Homolog of NCBI NO: 29373125 NR Description: fatty acid hydroperoxide lyase [Citrus sinensis]
  misc_feature (120)..(457): Homolog of NCBI NO: 19424049 NR Description: putative hydroperoxide lyase HPOL [Arabidopsis
  misc_feature (74)..(457): Homolog of NCBI NO: 15233810 NR Description: hydroperoxide lyase (HPOL) like protein
  misc_feature (1)..(18): Homolog of NCBI NO: 7488048 NR Description: probable allene oxide synthase - Arabidopsis
  misc_feature (65)..(442): Homolog of NCBI NO: 7488048 NR Description: probable allene oxide synthase - Arabidopsis
  misc_feature (1)..(457): Homolog of NCBI NO: 25308880 NR Description: hydroperoxide lyase (HPOL) like protein
  misc_feature (1)..(457): Homolog of NCBI NO: 11357336 NR Description: hydroperoxide lyase (EC 4.1.2.-)
MPGSYGWPLVGPLSDRLDYFWFQGPDKFFRTRAEKYKSTVFRTNIPPTFPFFGNVNPNIVAVLDVKSFSHLFDMDLVDKRDVLIGDFRPSLGFYGGVRVGVYLDTTEPKHAKIKGFAMETLKRSSKVWLQELRSNLNIFWGTIESEISKNGAASYIFPLQRCIFSFLCASLAGVDASVSPDIAENGWKTINTWLALQVIPTAKLGVVPQPLEEILLHTWPYPSLLIAGNYKKLYNFIDENAGDCLRLGQEEFGLTRDEAIQNLLFVLGFNAYGGFSVFLPSLIGRITGDNSGLQERIRTEVRRVCGSGSDLNFKTVNEMELVKSVVYETLRFSPPVPLQFARARKDFQISSHDAVFEVKKGELLCGYQPLVMRDANVFDEPEEFKPDRYVGETGSELLNYLYWSNGPQTGTPSASNKQCAAKDIVTLTASLLVADLFLRYDTITGDSGSIKAVVKAK

SEQ ID NO: 22278 - DNA, 495 bp, Arabidopsis thaliana
  misc_feature (1)..(495): Ceres Seq. ID no. 12578716
  misc_feature: MA Experiment ID: 20000169 Result: Up-regulated in Transcription
  misc_feature: MA Experiment 20000169 PARAMETER Experiment Name: At_100uM_ABA_P Parameter: Age (day) Value: 14
  misc_feature: MA Experiment 20000169 PARAMETER Experiment Name: At_100uM_ABA_P Parameter: Organism Value: A. thaliana
  misc_feature: MA Experiment 20000169 PARAMETER Experiment Name: At_100uM_ABA_P Parameter: Plant Line Value: WS
  misc_feature: MA Experiment 20000169 PARAMETER Experiment Name: At_100uM_ABA_P Parameter: Timepoint (hr) Value: 6
  misc_feature: MA Experiment 20000169 PARAMETER Experiment Name: At_100uM_ABA_P Parameter: Tissue Value: Aerial
  misc_feature: MA Experiment 20000169 PARAMETER Experiment Name: At_100uM_ABA_P Parameter: Treatment Value: 100uM ABA vs. No Treatment
  misc_feature: MA Experiment ID: 20000171 Result: Up-regulated in Transcription
  misc_feature: MA Experiment 20000171 PARAMETER Experiment Name: At_42deg_Heat_P Parameter: Age (day) Value: 14
  misc_feature: MA Experiment 20000171 PARAMETER Experiment Name: At_42deg_Heat_P Parameter: Organism Value: A. thaliana
  misc_feature: MA Experiment 20000171 PARAMETER Experiment Name: At_42deg_Heat_P Parameter: Plant Line Value: WS
  misc_feature: MA Experiment 20000171 PARAMETER Experiment Name: At_42deg_Heat_P Parameter: Temperature (deg C) Value: 42 vs. 22
  misc_feature: MA Experiment 20000171 PARAMETER Experiment Name: At_42deg_Heat_P Parameter: Timepoint (hr) Value: 1
  misc_feature: MA Experiment 20000171 PARAMETER Experiment Name: At_42deg_Heat_P Parameter: Tissue Value: Aerial
  misc_feature: MA Experiment ID: 20000173 Result: Up-regulated in Transcription
  misc_feature: MA Experiment 20000173 PARAMETER Experiment Name: At_42deg_Heat_P Parameter: Age (day) Value: 14
  misc_feature: MA Experiment 20000173 PARAMETER Experiment Name: At_42deg_Heat_P Parameter: Organism Value: A. thaliana
  misc_feature: MA Experiment 20000173 PARAMETER Experiment Name: At_42deg_Heat_P Parameter: Plant Line Value: WS
  misc_feature: MA Experiment 20000173 PARAMETER Experiment Name: At_42deg_Heat_P Parameter: Temperature (deg C) Value: 42 vs. 22
  misc_feature: MA Experiment 20000173 PARAMETER Experiment Name: At_42deg_Heat_P Parameter: Timepoint (hr) Value: 6
  misc_feature: MA Experiment 20000173 PARAMETER Experiment Name: At_42deg_Heat_P Parameter: Tissue Value: Aerial
  misc_feature: MA Experiment ID: 20000180 Result: Up-regulated in Transcription
  misc_feature: MA Experiment 20000180 PARAMETER Experiment Name: At_Germinating_Seeds_P Parameter: Age (hr) Value: 24 vs. 0
  misc_feature: MA Experiment 20000180 PARAMETER Experiment Name: At_Germinating_Seeds_P Parameter: Tissue Value: Germinating Seeds
  misc_feature: MA Experiment ID: 20000185 Result: Down-regulated in Transcription
  misc_feature: MA Experiment 20000185 PARAMETER Experiment Name: At_Roots__P Parameter: Age (day) Value: 7 vs. 21
  misc_feature: MA Experiment 20000185 PARAMETER Experiment Name: At_Roots__P Parameter: Organism Value: A. thaliana
  misc_feature: MA Experiment 20000185 PARAMETER Experiment Name: At_Roots__P Parameter: Tissue Value: Roots vs. Whole Plant
  misc_feature: MA Experiment ID: 20000234 Result: Down-regulated in Transcription
  misc_feature: MA Experiment 20000234 PARAMETER Experiment Name: At_Siliques_P Parameter: Age (day) Value: 21
  misc_feature: MA Experiment 20000234 PARAMETER Experiment Name: At_Siliques_P Parameter: Organism Value: A. thaliana
  misc_feature: MA Experiment 20000234 PARAMETER Experiment Name: At_Siliques_P Parameter: Plant Line Value: WS
  misc_feature: MA Experiment 20000234 PARAMETER Experiment Name: At_Siliques_P Parameter: Tissue Value: Less Than 5mm Siliques vs. Whole Plant
  misc_feature: MA Experiment ID: 20000235 Result: Down-regulated in Transcription
  misc_feature: MA Experiment 20000235 PARAMETER Experiment Name: At_Siliques_P Parameter: Age (day) Value: 21
  misc_feature: MA Experiment 20000235 PARAMETER Experiment Name: At_Siliques_P Parameter: Organism Value: A. thaliana
  misc_feature: MA Experiment 20000235 PARAMETER Experiment Name: At_Siliques_P Parameter: Plant Line Value: WS
  misc_feature: MA Experiment 20000235 PARAMETER Experiment Name: At_Siliques_P Parameter: Tissue Value: 5-10mm Siliques vs. Whole Plant
  misc_feature: MA Experiment ID: 20000264 Result: Up-regulated in Transcription
  misc_feature: MA Experiment 20000264 PARAMETER Experiment Name: At_Open_Flower_P Parameter: Age (day) Value: 21
  misc_feature: MA Experiment 20000264 PARAMETER Experiment Name: At_Open_Flower_P Parameter: Plant Line Value: WS
  misc_feature: MA Experiment 20000264 PARAMETER Experiment Name: At_Open_Flower_P Parameter: Tissue Value: Open Flower vs. Whole Plant
  misc_feature: MA Experiment ID: 20000268 Result: Up-regulated in Transcription
  misc_feature: MA Experiment 20000268 PARAMETER Experiment Name: At_100mM_NaCl__P Parameter: Age (day) Value: 14
  misc_feature: MA Experiment 20000268 PARAMETER Experiment Name: At_100mM_NaCl__P Parameter: Organism Value: A. thaliana
  misc_feature: MA Experiment 20000268 PARAMETER Experiment Name: At_100mM_NaCl__P Parameter: Plant Line Value: WS
  misc_feature: MA Experiment 20000268 PARAMETER Experiment Name: At_100mM_NaCl__P Parameter: Timepoint (hr) Value: 6
  misc_feature: MA Experiment 20000268 PARAMETER Experiment Name: At_100mM_NaCl__P Parameter: Tissue Value: Whole Plant
  misc_feature: MA Experiment 20000268 PARAMETER Experiment Name: At_100mM_NaCl__P Parameter: Treatment Value: 100mM NaCl vs. No Treatment
  misc_feature: MA Experiment ID: 20000436 Result: Up-regulated in Transcription
  misc_feature: MA Experiment 20000436 PARAMETER Experiment Name: At_Drought_P Parameter: Age (day) Value: 7
  misc_feature: MA Experiment 20000436 PARAMETER Experiment Name: At_Drought_P Parameter: Organism Value: A. thaliana
  misc_feature: MA Experiment 20000436 PARAMETER Experiment Name: At_Drought_P Parameter: Plant Line Value: WS
  misc_feature: MA Experiment 20000436 PARAMETER Experiment Name: At_Drought_P Parameter: Timepoint (hr) Value: 12
  misc_feature: MA Experiment 20000436 PARAMETER Experiment Name: At_Drought_P Parameter: Tissue Value: Whole Plant
  misc_feature: MA Experiment 20000436 PARAMETER Experiment Name: At_Drought_P Parameter: Treatment Value: Drought vs. No Drought
  misc_feature: MA Experiment ID: 20000439 Result: Down-regulated in Transcription
  misc_feature: MA Experiment 20000439 PARAMETER Experiment Name: At_Roots__P Parameter: Age (day) Value: 14 vs. 21
  misc_feature: MA Experiment 20000439 PARAMETER Experiment Name: At_Roots__P Parameter: Organism Value: A. thaliana
  misc_feature: MA Experiment 20000439 PARAMETER Experiment Name: At_Roots__P Parameter: Tissue Value: Roots vs. Whole Plant
  misc_feature: MA Experiment ID: 20000453 Result: Up-regulated in Transcription
  misc_feature: MA Experiment 20000453 PARAMETER Experiment Name: At_100uM_ABA_P Parameter: Age (day) Value: 15
  misc_feature: MA Experiment 20000453 PARAMETER Experiment Name: At_100uM_ABA_P Parameter: Organism Value: A. thaliana
  misc_feature: MA Experiment 20000453 PARAMETER Experiment Name: At_100uM_ABA_P Parameter: Plant Line Value: WS
  misc_feature: MA Experiment 20000453 PARAMETER Experiment Name: At_100uM_ABA_P Parameter: Timepoint (hr) Value: 24
  misc_feature: MA Experiment 20000453 PARAMETER Experiment Name: At_100uM_ABA_P Parameter: Tissue Value: Aerial
  misc_feature: MA Experiment 20000453 PARAMETER Experiment Name: At_100uM_ABA_P Parameter: Treatment Value: 100uM ABA vs. No Treatment
  misc_feature: MA Experiment ID: 20000794 Result: Up-regulated in Transcription
  misc_feature: MA Experiment 20000794 PARAMETER Experiment Name: At_Petals_P Parameter: Age (day) Value: 23-25 days
  misc_feature: MA Experiment 20000794 PARAMETER Experiment Name: At_Petals_P Parameter: Plant Line Value: WS
  misc_feature: MA Experiment 20000794 PARAMETER Experiment Name: At_Petals_P Parameter: Tissue Value: Petals vs. Whole plant
  misc_feature: MA Experiment ID: 20001248 Result: Down-regulated in Transcription
  misc_feature: MA Experiment 20001248 PARAMETER Experiment Name: At_Far-red-induction_P Parameter: Age (day) Value: 7
  misc_feature: MA Experiment 20001248 PARAMETER Experiment Name: At_Far-red-induction_P Parameter: Light Value: Far-red vs. White
  misc_feature: MA Experiment 20001248 PARAMETER Experiment Name: At_Far-red-induction_P Parameter: Organism Value: A. thaliana
  misc_feature: MA Experiment 20001248 PARAMETER Experiment Name: At_Far-red-induction_P Parameter: Plant Line Value: Columbia
  misc_feature: MA Experiment 20001248 PARAMETER Experiment Name: At_Far-red-induction_P Parameter: Timepoint (hr) Value: 4
  misc_feature: MA Experiment 20001248 PARAMETER Experiment Name: At_Far-red-induction_P Parameter: Tissue Value: Whole Plant
  misc_feature: MA Experiment ID: 20001451 Result: Down-regulated in Transcription
  misc_feature: MA Experiment 20001451 PARAMETER Experiment Name: At_Far-red-induction_P Parameter: Age (day) Value: 7
  misc_feature: MA Experiment 20001451 PARAMETER Experiment Name: At_Far-red-induction_P Parameter: Light Value: Far-red vs. White
  misc_feature: MA Experiment 20001451 PARAMETER Experiment Name: At_Far-red-induction_P Parameter: Organism Value: A. thaliana
  misc_feature: MA Experiment 20001451 PARAMETER Experiment Name: At_Far-red-induction_P Parameter: Plant Line Value: Columbia
  misc_feature: MA Experiment 20001451 PARAMETER Experiment Name: At_Far-red-induction_P Parameter: Timepoint (hr) Value: 24
  misc_feature: MA Experiment 20001451 PARAMETER Experiment Name: At_Far-red-induction_P Parameter: Tissue Value: Whole Plant
  misc_feature: MA Experiment ID: 20001555 Result: Up-regulated in Transcription
  misc_feature: MA Experiment 20001555 PARAMETER Experiment Name: At_Drought_Soil_Dry_P Parameter: Age (day) Value: 24
  misc_feature: MA Experiment 20001555 PARAMETER Experiment Name: At_Drought_Soil_Dry_P Parameter: Organism Value: A. thaliana
  misc_feature: MA Experiment 20001555 PARAMETER Experiment Name: At_Drought_Soil_Dry_P Parameter: Plant Line Value: WS
  misc_feature: MA Experiment 20001555 PARAMETER Experiment Name: At_Drought_Soil_Dry_P Parameter: Post Timepoint (hr) Value: None
  misc_feature: MA Experiment 20001555 PARAMETER Experiment Name: At_Drought_Soil_Dry_P Parameter: Post-Treatment Value: None
  misc_feature: MA Experiment 20001555 PARAMETER Experiment Name: At_Drought_Soil_Dry_P Parameter: Timepoint (day) Value: 10
  misc_feature: MA Experiment 20001555 PARAMETER Experiment Name: At_Drought_Soil_Dry_P Parameter: Treatment Value: Drought vs. No Drought
  misc_feature: MA Experiment ID: 20001559 Result: Up-regulated in Transcription
  misc_feature: MA Experiment 20001559 PARAMETER Experiment Name: At_Drought_Soil_Dry_P Parameter: Age (day) Value: 28
  misc_feature: MA Experiment 20001559 PARAMETER Experiment Name: At_Drought_Soil_Dry_P Parameter: Organism Value: A. thaliana
  misc_feature: MA Experiment 20001559 PARAMETER Experiment Name: At_Drought_Soil_Dry_P Parameter: Plant Line Value: WS
  misc_feature: MA Experiment 20001559 PARAMETER Experiment Name: At_Drought_Soil_Dry_P Parameter: Post Timepoint (hr) Value: 29
  misc_feature: MA Experiment 20001559 PARAMETER Experiment Name: At_Drought_Soil_Dry_P Parameter: Post-Treatment Value: Re-Water vs. No Drought
  misc_feature: MA Experiment 20001559 PARAMETER Experiment Name: At_Drought_Soil_Dry_P Parameter: Timepoint (day) Value: 14
  misc_feature: MA Experiment 20001559 PARAMETER Experiment Name: At_Drought_Soil_Dry_P Parameter: Treatment Value: Drought vs. No Drought
  misc_feature: MA Experiment ID: 20001904 Result: Up-regulated in Transcription
  misc_feature: MA Experiment 20001904 PARAMETER Experiment Name: At_Drought_Reproduction_P Parameter: Age (day) Value: 37
  misc_feature: MA Experiment 20001904 PARAMETER Experiment Name: At_Drought_Reproduction_P Parameter: Organism Value: A. thaliana
  misc_feature: MA Experiment 20001904 PARAMETER Experiment Name: At_Drought_Reproduction_P Parameter: Plant Line Value: WS
  misc_feature: MA Experiment 20001904 PARAMETER Experiment Name: At_Drought_Reproduction_P Parameter: Timepoint (day) Value: 7
  misc_feature: MA Experiment 20001904 PARAMETER Experiment Name: At_Drought_Reproduction_P Parameter: Tissue Value: Rosettes
  misc_feature: MA Experiment 20001904 PARAMETER Experiment Name: At_Drought_Reproduction_P Parameter: Treatment Value: Drought vs. No Drought
  misc_feature: MA Experiment ID: 20001905 Result: Up-regulated in Transcription
  misc_feature: MA Experiment 20001905 PARAMETER Experiment Name: At_Drought_Reproduction_P Parameter: Age (day) Value: 40
  misc_feature: MA Experiment 20001905 PARAMETER Experiment Name: At_Drought_Reproduction_P Parameter: Organism Value: A. thaliana
  misc_feature: MA Experiment 20001905 PARAMETER Experiment Name: At_Drought_Reproduction_P Parameter: Plant Line Value: WS
  misc_feature: MA Experiment 20001905 PARAMETER Experiment Name: At_Drought_Reproduction_P Parameter: Timepoint (day) Value: 10
  misc_feature: MA Experiment 20001905 PARAMETER Experiment Name: At_Drought_Reproduction_P Parameter: Tissue Value: Rosettes
  misc_feature: MA Experiment 20001905 PARAMETER Experiment Name: At_Drought_Reproduction_P Parameter: Treatment Value: Drought vs. No Drought
caaactcgattagcaccaacgctaaattcgaaatccgaagccctaaacgcgtccagattaagtttgagcaaggcgtaattgggacgcctcagctaacggattctattgagataccggaatatgtagaggttcttggtcaaaagattgatcttaacccgatcagagggttacttacctcggtgcaagacacagcctcgtctgtggctagaaccatatcaagccaaccaccgttgaaattctctttgccggcggacaatgcgcagtcttggctactcacgacttatctagacaaagacattcggatctctagaggagacggtggaagtgtctttgtgcttatcaaagaaggaagccctctcttgaatccttgaacttggtcaaaatatatgtgtctctcttgtcgttgtgttaagtgagacaaatatatatagtgttgttgtaggtttacttcttaatcgttattatgaacttgatgataatgaatataatgttttt

SEQ ID NO: 22279 - protein, 122 aa, Arabidopsis thaliana
  peptide (1)..(122): Ceres Seq. ID no. 12578717
  misc_feature (1)..(113): Pfam Name: PAP_fibrillin Pfam Description: PAP_fibrillin
  misc_feature (2)..(122): Homolog of NCBI NO: 7489179 NR Description: plastid-lipid-associated protein pap - common
  misc_feature (2)..(122): Homolog of NCBI NO: 4139097 NR Description: fibrillin [Brassica napus]
  misc_feature (2)..(122): Homolog of NCBI NO: 15233357 NR Description: putative fibrillin
  misc_feature (2)..(122): Homolog of NCBI NO: 14248548 NR Description: plastid-lipid associated protein PAP1 [Brassica
  misc_feature (2)..(122): Homolog of NCBI NO: 14248554 NR Description: plastid-lipid associated protein PAP1 [Brassica
  misc_feature (2)..(122): Homolog of NCBI NO: 14248556 NR Description: plastid-lipid associated protein PAP2 [Brassica
  misc_feature (2)..(122): Homolog of NCBI NO: 14248550 NR Description: plastid-lipid associated protein PAP2 [Brassica
  misc_feature (1)..(122): Homolog of NCBI NO: 18377868 NR Description: AT4g22240/T10I14_70 [Arabidopsis thaliana]
  misc_feature (1)..(122): Homolog of NCBI NO: 21618237 NR Description: fibrillin precursor-like protein [Arabidopsis
  misc_feature (1)..(122): Homolog of NCBI NO: 15235575 NR Description: fibrillin precursor-like protein
NSISTNAKFEIRSPKRVQIKFEQGVIGTPQLTDSIEIPEYVEVLGQKIDLNPIRGLLTSVQDTASSVARTISSQPPLKFSLPADNAQSWLLTTYLDKDIRISRGDGGSVFVLIKEGSPLLNP

SEQ ID NO: 22280 - DNA, 911 bp, Arabidopsis thaliana
  misc_feature (1)..(911): Ceres Seq. ID no. 12334617
  misc_feature: MA Experiment ID: 108462 Result: Up-regulated in Transcription
  misc_feature: MA Experiment 108462 PARAMETER Experiment Name: At_Germinating_Seeds_cDNA_P Parameter: Age (day) Value: 2 vs. 0
  misc_feature: MA Experiment 108462 PARAMETER Experiment Name: At_Germinating_Seeds_cDNA_P Parameter: Tissue Value: Germinating Seeds
  misc_feature: MA Experiment ID: 108464 Result: Up-regulated in Transcription
  misc_feature: MA Experiment 108464 PARAMETER Experiment Name: At_Germinating_Seeds_cDNA_P Parameter: Age (day) Value: 4 vs. 0
  misc_feature: MA Experiment 108464 PARAMETER Experiment Name: At_Germinating_Seeds_cDNA_P Parameter: Tissue Value: Germinating Seeds
  misc_feature: MA Experiment ID: 20000180 Result: Up-regulated in Transcription
  misc_feature: MA Experiment 20000180 PARAMETER Experiment Name: At_Germinating_Seeds_P Parameter: Age (hr) Value: 24 vs. 0
  misc_feature: MA Experiment 20000180 PARAMETER Experiment Name: At_Germinating_Seeds_P Parameter: Tissue Value: Germinating Seeds
  misc_feature: MA Experiment ID: 20000224 Result: Down-regulated in Transcription
  misc_feature: MA Experiment ID: 20000794 Result: Down-regulated in Transcription
  misc_feature: MA Experiment 20000794 PARAMETER Experiment Name: At_Petals_P Parameter: Age (day) Value: 23-25 days
  misc_feature: MA Experiment 20000794 PARAMETER Experiment Name: At_Petals_P Parameter: Plant Line Value: WS
  misc_feature: MA Experiment 20000794 PARAMETER Experiment Name: At_Petals_P Parameter: Tissue Value: Petals vs. Whole plant
gcgtcatcgcgtttctcttaagcttctctcacatttctctttcaaatttcttcgagtctctctcgctctctccgtttcttcgcggtctctctctctcagatctctccgaaacattcttcgtagtgaagcaaaatggggttgagtttcgccaagctgtttagcaggctttttgccaagaaggagatgcgaattctgatggttggtcttgatgctgctggtaagaccacaatcttgtacaagctcaagctcggagagattgtcaccaccatccctactattggtttcaatgtggaaactgtggaatacaagaacattagtttcaccgtgtgggatgtcgggggtcaggacaagatccgtcccttgtggagacactacttccagaacactcaaggtctaatctttgttgttgatagcaatgacagagacagagttgttgaggctcgagatgaactccacaggatgctgaatgaggacgagctgcgtgatgctgtgttgcttgtgtttgccaacaagcaagatcttccaaatgctatgaacgctgctgaaatcacagataagcttggccttcactccctccgtcagcgtcattggtatatccagagcacatgtgccacttcaggtgaagggctttatgaaggtctggactggctctccaacaacatcgctggcaaggcatgatgagggagaaattgcgttgcatcgagatgattctgtctgctgtgttgggatctctctctgtcttgatgcaagagagattataaatattatctgaacctttttgcttttttgggtatgtgaatgtttcttattgtgcaagtagatggtcttgtacctaaaaatttactagaagaacccttttaaatagctttcgtgtattgtgcctggattaatatgattgattgttttgcttt

SEQ ID NO: 22281 - protein, 181 aa, Arabidopsis thaliana
  peptide (1)..(181): Ceres Seq. ID no. 12334618
  misc_feature (4)..(177): Pfam Name: ADP-ribosylation factor family Pfam Description: ADP-ribosylation factor family
  misc_feature (1)..(181): Homolog of NCBI NO: 11131026 NR Description: ADP-ribosylation factor
  misc_feature (1)..(181): Homolog of NCBI NO: 39653273 NR Description: ADP-ribosylation factor [Medicago sativa]
  misc_feature (1)..(181): Homolog of NCBI NO: 15228723 NR Description: ADP-ribosylation factor-like protein
  misc_feature (1)..(180): Homolog of NCBI NO: 6573751 NR Description: F20B24.7 [Arabidopsis thaliana]
  misc_feature (1)..(180): Homolog of NCBI NO: 17154685 NR Description: ADP-ribosylation factor [Gossypium hirsutum]
  misc_feature (1)..(181): Homolog of NCBI NO: 25294169 NR Description: ADP-ribosylation factor [imported] - pepper
  misc_feature (1)..(181): Homolog of NCBI NO: 15226521 NR Description: ADP-ribosylation factor 1
  misc_feature (1)..(181): Homolog of NCBI NO: 30681825 NR Description: ADP-ribosylation factor, putative [Arabidopsis
  misc_feature (1)..(180): Homolog of NCBI NO: 25294174 NR Description: F5O8.5 protein - Arabidopsis thaliana
  misc_feature (1)..(181): Homolog of NCBI NO: 15223164 NR Description: putative ADP-ribosylation factor 1
MGLSFAKLFSRLFAKKEMRILMVGLDAAGKTTILYKLKLGEIVTTIPTIGFNVETVEYKNISFTVWDVGGQDKIRPLWRHYFQNTQGLIFVVDSNDRDRVVEARDELHRMLNEDELRDAVLLVFANKQDLPNAMNAAEITDKLGLHSLRQRHWYIQSTCATSGEGLYEGLDWLSNNIAGKA

SEQ ID NO: 22282 - protein, 164 aa, Arabidopsis thaliana
  peptide (1)..(164): Ceres Seq. ID no. 12334619
  misc_feature (1)..(160): Pfam Name: ADP-ribosylation factor family Pfam Description: ADP-ribosylation factor family
  misc_feature (1)..(164): Homolog of NCBI NO: 11131026 NR Description: ADP-ribosylation factor
  misc_feature (1)..(164): Homolog of NCBI NO: 39653273 NR Description: ADP-ribosylation factor [Medicago sativa]
  misc_feature (1)..(164): Homolog of NCBI NO: 15228723 NR Description: ADP-ribosylation factor-like protein
  misc_feature (1)..(163): Homolog of NCBI NO: 6573751 NR Description: F20B24.7 [Arabidopsis thaliana]
  misc_feature (1)..(163): Homolog of NCBI NO: 17154685 NR Description: ADP-ribosylation factor [Gossypium hirsutum]
  misc_feature (1)..(164): Homolog of NCBI NO: 25294169 NR Description: ADP-ribosylation factor [imported] - pepper
  misc_feature (1)..(164): Homolog of NCBI NO: 15226521 NR Description: ADP-ribosylation factor 1
  misc_feature (1)..(164): Homolog of NCBI NO: 30681825 NR Description: ADP-ribosylation factor, putative [Arabidopsis
  misc_feature (1)..(163): Homolog of NCBI NO: 25294174 NR Description: F5O8.5 protein - Arabidopsis thaliana
  misc_feature (1)..(164): Homolog of NCBI NO: 15223164 NR Description: putative ADP-ribosylation factor 1
MRILMVGLDAAGKTTILYKLKLGEIVTTIPTIGFNVETVEYKNISFTVWDVGGQDKIRPLWRHYFQNTQGLIFVVDSNDRDRVVEARDELHRMLNEDELRDAVLLVFANKQDLPNAMNAAEITDKLGLHSLRQRHWYIQSTCATSGEGLYEGLDWLSNNIAGKA

SEQ ID NO: 22283 - protein, 160 aa, Arabidopsis thaliana
  peptide (1)..(160): Ceres Seq. ID no. 12334620
  misc_feature (1)..(156): Pfam Name: ADP-ribosylation factor family Pfam Description: ADP-ribosylation factor family
  misc_feature (1)..(160): Homolog of NCBI NO: 11131026 NR Description: ADP-ribosylation factor
  misc_feature (1)..(160): Homolog of NCBI NO: 39653273 NR Description: ADP-ribosylation factor [Medicago sativa]
  misc_feature (1)..(160): Homolog of NCBI NO: 15228723 NR Description: ADP-ribosylation factor-like protein
  misc_feature (1)..(159): Homolog of NCBI NO: 6573751 NR Description: F20B24.7 [Arabidopsis thaliana]
  misc_feature (1)..(159): Homolog of NCBI NO: 17154685 NR Description: ADP-ribosylation factor [Gossypium hirsutum]
  misc_feature (1)..(160): Homolog of NCBI NO: 25294169 NR Description: ADP-ribosylation factor [imported] - pepper
  misc_feature (1)..(160): Homolog of NCBI NO: 15226521 NR Description: ADP-ribosylation factor 1
  misc_feature (1)..(160): Homolog of NCBI NO: 30681825 NR Description: ADP-ribosylation factor, putative [Arabidopsis
  misc_feature (1)..(159): Homolog of NCBI NO: 25294174 NR Description: F5O8.5 protein - Arabidopsis thaliana
  misc_feature (1)..(160): Homolog of NCBI NO: 15223164 NR Description: putative ADP-ribosylation factor 1
MVGLDAAGKTTILYKLKLGEIVTTIPTIGFNVETVEYKNISFTVWDVGGQDKIRPLWRHYFQNTQGLIFVVDSNDRDRVVEARDELHRMLNEDELRDAVLLVFANKQDLPNAMNAAEITDKLGLHSLRQRHWYIQSTCATSGEGLYEGLDWLSNNIAGKA

SEQ ID NO: 22284 - DNA, 1451 bp, Arabidopsis thaliana
  misc_feature (1)..(1451): Ceres Seq. ID no. 13487624
  misc_feature: MA Experiment ID: 20000227 Result: Up-regulated in Transcription
  misc_feature: MA Experiment 20000227 PARAMETER Experiment Name: At_Root-Tips-vs-Tops_P Parameter: Tissue Value: Root Tips vs. Root Tops
  misc_feature: MA Experiment ID: 20001557 Result: Up-regulated in Transcription
  misc_feature: MA Experiment 20001557 PARAMETER Experiment Name: At_Drought_Soil_Dry_P Parameter: Age (day) Value: 27
  misc_feature: MA Experiment 20001557 PARAMETER Experiment Name: At_Drought_Soil_Dry_P Parameter: Organism Value: A. thaliana
  misc_feature: MA Experiment 20001557 PARAMETER Experiment Name: At_Drought_Soil_Dry_P Parameter: Plant Line Value: WS
  misc_feature: MA Experiment 20001557 PARAMETER Experiment Name: At_Drought_Soil_Dry_P Parameter: Post Timepoint (hr) Value: 3
  misc_feature: MA Experiment 20001557 PARAMETER Experiment Name: At_Drought_Soil_Dry_P Parameter: Post-Treatment Value: Re-Water vs. No Drought
  misc_feature: MA Experiment 20001557 PARAMETER Experiment Name: At_Drought_Soil_Dry_P Parameter: Timepoint (day) Value: 13
  misc_feature: MA Experiment 20001557 PARAMETER Experiment Name: At_Drought_Soil_Dry_P Parameter: Treatment Value: Drought vs. No Drought
  misc_feature: MA Experiment ID: 20001558 Result: Up-regulated in Transcription
  misc_feature: MA Experiment 20001558 PARAMETER Experiment Name: At_Drought_Soil_Dry_P Parameter: Age (day) Value: 27
  misc_feature: MA Experiment 20001558 PARAMETER Experiment Name: At_Drought_Soil_Dry_P Parameter: Organism Value: A. thaliana
  misc_feature: MA Experiment 20001558 PARAMETER Experiment Name: At_Drought_Soil_Dry_P Parameter: Plant Line Value: WS
  misc_feature: MA Experiment 20001558 PARAMETER Experiment Name: At_Drought_Soil_Dry_P Parameter: Post Timepoint (hr) Value: 6
  misc_feature: MA Experiment 20001558 PARAMETER Experiment Name: At_Drought_Soil_Dry_P Parameter: Post-Treatment Value: Re-Water vs. No Drought
  misc_feature: MA Experiment 20001558 PARAMETER Experiment Name: At_Drought_Soil_Dry_P Parameter: Timepoint (day) Value: 13
  misc_feature: MA Experiment 20001558 PARAMETER Experiment Name: At_Drought_Soil_Dry_P Parameter: Treatment Value: Drought vs. No Drought
gctctcactcccaaaacgatgtcgtctctatctcgcgttctccgtggcaccttcaacacttgcccgatccgccgtttttcctccgccgccaccgtagtctccgaacccaccgcagtcactgccgcaatctcgcctcctcaaaagtcactaaccagtctcgtgaatggcgaacgaaaccccaaacggatcgtggagaaattcaagaaggcatgtgagtcggagcggttccggaccaacatagccgtgtacgatagaaccgtgcgccgtctcgtagccgcaaagagattacactatgtcgaagagattttggaggagcagaagaagtaccgcgacatgtcaaaagagggattcgcggcgaggatcatttctctgtatggaaaagccggcatgtttgaaaatgcacagaaggtgttcgaagaaatgccaaacagagactgcaagaggtcagtgttgtccttcaatgccttgcttagtgcatatagactttccaagaaattcgatgtggttgaagaacttttcaatgagttacctggaaagttatcaatcaaaccagatattgtatcttacaatactttgattaaggcattgtgtgagaaggattctttacctgaagctgttgcattgcttgatgagattgagaacaagggactaaaacctgatatagttacattcaacacacttttactgtcttcgtatctaaagggacagtttgagctaggggaagagatatgggctaaaatggtggagaagaatgtagcaatagacatcaggacttacaatgctaggctgcttggattagccaatgaggcgaaatcgaaagagctagtaaatctctttggagaacttaaggctagtggtctcaaacctgatgttttcagtttcaatgctatgattagaggatctatcaacgaaggaaaaatggacgaagctgaagcgtggtacaaagaaattgtgaagcatggttatcgtcctgataaagctacctttgctttattgcttcctgctatgtgtaaagcaggtgactttgagtctgcgattgagctcttcaaggagacattcagtaagcggtatcttgtcggtcaaacaacgttgcagcagttagttgatgaattggtgaaagggtctaagagagaagaagctgaggagattgtgaagattgcaaagaccaatgatttcttaaagttgaagctaaatttgccgtcccaggaagagtaagtcatttgctactctctcactaagtgtctcgttgaattgtgtctgagcagcttaagctatatgtatttgctggtgttgctttgtggcttttctacttctctaaactttcctctgtggaagtaagacttgtttctttctatgtagtttcgcttatttcactggtgcaaaaaacagcatgtagtcgaggtttaggcagaagaaaccctacaaatttaataaattttggttatttgttt

SEQ ID NO: 22285 - protein, 404 aa, Arabidopsis thaliana
  peptide (1)..(404): Ceres Seq. ID no. 13487625
  misc_feature (292)..(326): Pfam Name: PPR repeat Pfam Description: PPR repeat
  misc_feature (7)..(384): Homolog of NCBI NO: 21553755 NR Description: putative membrane-associated salt-inducible
  misc_feature (7)..(384): Homolog of NCBI NO: 18407365 NR Description: pentatricopeptide (PPR) repeat-containing protein
  misc_feature (47)..(404): Homolog of NCBI NO: 34910148 NR Description: B1070A12.17 [Oryza sativa (japonica
  misc_feature (5)..(394): Homolog of NCBI NO: 15231160 NR Description: pentatricopeptide (PPR) repeat-containing protein
  misc_feature (23)..(388): Homolog of NCBI NO: 25455786 NR Description: membrane-associated salt-inducible protein like
  misc_feature (23)..(388): Homolog of NCBI NO: 15234493 NR Description: pentatricopeptide (PPR) repeat-containing protein
  misc_feature (23)..(386): Homolog of NCBI NO: 15220068 NR Description: pentatricopeptide (PPR) repeat-containing protein
  misc_feature (7)..(403): Homolog of NCBI NO: 18399887 NR Description: pentatricopeptide (PPR) repeat-containing protein
  misc_feature (7)..(403): Homolog of NCBI NO: 21617993 NR Description: unknown [Arabidopsis thaliana]
  misc_feature (7)..(404): Homolog of NCBI NO: 15222796 NR Description: pentatricopeptide (PPR) repeat-containing protein
ALTPKTMSSLSRVLRGTFNTCPIRRFSSAATVVSEPTAVTAAISPPQKSLTSLVNGERNPKRIVEKFKKACESERFRTNIAVYDRTVRRLVAAKRLHYVEEILEEQKKYRDMSKEGFAARIISLYGKAGMFENAQKVFEEMPNRDCKRSVLSFNALLSAYRLSKKFDVVEELFNELPGKLSIKPDIVSYNTLIKALCEKDSLPEAVALLDEIENKGLKPDIVTFNTLLLSSYLKGQFELGEEIWAKMVEKNVAIDIRTYNARLLGLANEAKSKELVNLFGELKASGLKPDVFSFNAMIRGSINEGKMDEAEAWYKEIVKHGYRPDKATFALLLPAMCKAGDFESAIELFKETFSKRYLVGQTTLQQLVDELVKGSKREEAEEIVKIAKTNDFLKLKLNLPSQEE

SEQ ID NO: 22286 - protein, 398 aa, Arabidopsis thaliana
  peptide (1)..(398): Ceres Seq. ID no. 13487626
  misc_feature (286)..(320): Pfam Name: PPR repeat Pfam Description: PPR repeat
  misc_feature (17)..(380): Homolog of NCBI NO: 15220068 NR Description: pentatricopeptide (PPR) repeat-containing protein
  misc_feature (17)..(382): Homolog of NCBI NO: 25455786 NR Description: membrane-associated salt-inducible protein like
  misc_feature (17)..(382): Homolog of NCBI NO: 15234493 NR Description: pentatricopeptide (PPR) repeat-containing protein
  misc_feature (1)..(378): Homolog of NCBI NO: 21553755 NR Description: putative membrane-associated salt-inducible
  misc_feature (1)..(378): Homolog of NCBI NO: 18407365 NR Description: pentatricopeptide (PPR) repeat-containing protein
  misc_feature (41)..(398): Homolog of NCBI NO: 34910148 NR Description: B1070A12.17 [Oryza sativa (japonica
  misc_feature (1)..(388): Homolog of NCBI NO: 15231160 NR Description: pentatricopeptide (PPR) repeat-containing protein
  misc_feature (1)..(397): Homolog of NCBI NO: 18399887 NR Description: pentatricopeptide (PPR) repeat-containing protein
  misc_feature (1)..(397): Homolog of NCBI NO: 21617993 NR Description: unknown [Arabidopsis thaliana]
  misc_feature (1)..(398): Homolog of NCBI NO: 15222796 NR Description: pentatricopeptide (PPR) repeat-containing protein
MSSLSRVLRGTFNTCPIRRFSSAATVVSEPTAVTAAISPPQKSLTSLVNGERNPKRIVEKFKKACESERFRTNIAVYDRTVRRLVAAKRLHYVEEILEEQKKYRDMSKEGFAARIISLYGKAGMFENAQKVFEEMPNRDCKRSVLSFNALLSAYRLSKKFDVVEELFNELPGKLSIKPDIVSYNTLIKALCEKDSLPEAVALLDEIENKGLKPDIVTFNTLLLSSYLKGQFELGEEIWAKMVEKNVAIDIRTYNARLLGLANEAKSKELVNLFGELKASGLKPDVFSFNAMIRGSINEGKMDEAEAWYKEIVKHGYRPDKATFALLLPAMCKAGDFESAIELFKETFSKRYLVGQTTLQQLVDELVKGSKREEAEEIVKIAKTNDFLKLKLNLPSQEE

SEQ ID NO: 22287 - protein, 293 aa, Arabidopsis thaliana
  peptide (1)..(293): Ceres Seq. ID no. 13487627
  misc_feature (181)..(215): Pfam Name: PPR repeat Pfam Description: PPR repeat
  misc_feature (1)..(275): Homolog of NCBI NO: 15220068 NR Description: pentatricopeptide (PPR) repeat-containing protein
  misc_feature (1)..(277): Homolog of NCBI NO: 25455786 NR Description: membrane-associated salt-inducible protein like
  misc_feature (1)..(277): Homolog of NCBI NO: 15234493 NR Description: pentatricopeptide (PPR) repeat-containing protein
  misc_feature (1)..(273): Homolog of NCBI NO: 21553755 NR Description: putative membrane-associated salt-inducible
  misc_feature (1)..(273): Homolog of NCBI NO: 18407365 NR Description: pentatricopeptide (PPR) repeat-containing protein
  misc_feature (1)..(293): Homolog of NCBI NO: 34910148 NR Description: B1070A12.17 [Oryza sativa (japonica
  misc_feature (1)..(283): Homolog of NCBI NO: 15231160 NR Description: pentatricopeptide (PPR) repeat-containing protein
  misc_feature (1)..(292): Homolog of NCBI NO: 18399887 NR Description: pentatricopeptide (PPR) repeat-containing protein
  misc_feature (1)..(292): Homolog of NCBI NO: 21617993 NR Description: unknown [Arabidopsis thaliana]
  misc_feature (1)..(293): Homolog of NCBI NO: 15222796 NR Description: pentatricopeptide (PPR) repeat-containing protein
MSKEGFAARIISLYGKAGMFENAQKVFEEMPNRDCKRSVLSFNALLSAYRLSKKFDVVEELFNELPGKLSIKPDIVSYNTLIKALCEKDSLPEAVALLDEIENKGLKPDIVTFNTLLLSSYLKGQFELGEEIWAKMVEKNVAIDIRTYNARLLGLANEAKSKELVNLFGELKASGLKPDVFSFNAMIRGSINEGKMDEAEAWYKEIVKHGYRPDKATFALLLPAMCKAGDFESAIELFKETFSKRYLVGQTTLQQLVDELVKGSKREEAEEIVKIAKTNDFLKLKLNLPSQEE

SEQ ID NO: 22288 - DNA, 1235 bp, Arabidopsis thaliana
  misc_feature (1)..(1235): Ceres Seq. ID no. 12324896
  misc_feature: MA Experiment ID: 108434 Result: Down-regulated in Transcription
  misc_feature: MA Experiment 108434 PARAMETER Experiment Name: At_Root_Tips_cDNA_P Parameter: Tissue Value: Root Tips
  misc_feature: MA Experiment ID: 108464 Result: Up-regulated in Transcription
  misc_feature: MA Experiment 108464 PARAMETER Experiment Name: At_Germinating_Seeds_cDNA_P Parameter: Age (day) Value: 4 vs. 0
  misc_feature: MA Experiment 108464 PARAMETER Experiment Name: At_Germinating_Seeds_cDNA_P Parameter: Tissue Value: Germinating Seeds
  misc_feature: MA Experiment ID: 108594 Result: Down-regulated in Transcription
  misc_feature: MA Experiment 108594 PARAMETER Experiment Name: At_Ler-rhl_Root_cDNA_P Parameter: Plant Line Value: null
  misc_feature: MA Experiment ID: 20000184 Result: Up-regulated in Transcription
  misc_feature: MA Experiment 20000184 PARAMETER Experiment Name: At_Shoots__P Parameter: Age (day) Value: 7
  misc_feature: MA Experiment 20000184 PARAMETER Experiment Name: At_Shoots__P Parameter: Tissue Value: Shoots vs. Whole Plant
  misc_feature: MA Experiment ID: 20000185 Result: Up-regulated in Transcription
  misc_feature: MA Experiment 20000185 PARAMETER Experiment Name: At_Roots__P Parameter: Age (day) Value: 7 vs. 21
  misc_feature: MA Experiment 20000185 PARAMETER Experiment Name: At_Roots__P Parameter: Organism Value: A. thaliana
  misc_feature: MA Experiment 20000185 PARAMETER Experiment Name: At_Roots__P Parameter: Tissue Value: Roots vs. Whole Plant
  misc_feature: MA Experiment ID: 20000227 Result: Down-regulated in Transcription
  misc_feature: MA Experiment 20000227 PARAMETER Experiment Name: At_Root-Tips-vs-Tops_P Parameter: Tissue Value: Root Tips vs. Root Tops
  misc_feature: MA Experiment ID: 20000267 Result: Down-regulated in Transcription
  misc_feature: MA Experiment 20000267 PARAMETER Experiment Name: At_Drought_P Parameter: Age (day) Value: 7
  misc_feature: MA Experiment 20000267 PARAMETER Experiment Name: At_Drought_P Parameter: Organism Value: A. thaliana
  misc_feature: MA Experiment 20000267 PARAMETER Experiment Name: At_Drought_P Parameter: Plant Line Value: WS
  misc_feature: MA Experiment 20000267 PARAMETER Experiment Name: At_Drought_P Parameter: Timepoint (hr) Value: 6
  misc_feature: MA Experiment 20000267 PARAMETER Experiment Name: At_Drought_P Parameter: Tissue Value: Whole Plant
  misc_feature: MA Experiment 20000267 PARAMETER Experiment Name: At_Drought_P Parameter: Treatment Value: Drought vs. No Drought
  misc_feature: MA Experiment ID: 20000436 Result: Down-regulated in Transcription
  misc_feature: MA Experiment 20000436 PARAMETER Experiment Name: At_Drought_P Parameter: Age (day) Value: 7
  misc_feature: MA Experiment 20000436 PARAMETER Experiment Name: At_Drought_P Parameter: Organism Value: A. thaliana
  misc_feature: MA Experiment 20000436 PARAMETER Experiment Name: At_Drought_P Parameter: Plant Line Value: WS
  misc_feature: MA Experiment 20000436 PARAMETER Experiment Name: At_Drought_P Parameter: Timepoint (hr) Value: 12
  misc_feature: MA Experiment 20000436 PARAMETER Experiment Name: At_Drought_P Parameter: Tissue Value: Whole Plant
  misc_feature: MA Experiment 20000436 PARAMETER Experiment Name: At_Drought_P Parameter: Treatment Value: Drought vs. No Drought
  misc_feature: MA Experiment ID: 20000437 Result: Down-regulated in Transcription
  misc_feature: MA Experiment 20000437 PARAMETER Experiment Name: At_Drought_P Parameter: Age (day) Value: 8
  misc_feature: MA Experiment 20000437 PARAMETER Experiment Name: At_Drought_P Parameter: Organism Value: A. thaliana
  misc_feature: MA Experiment 20000437 PARAMETER Experiment Name: At_Drought_P Parameter: Plant Line Value: WS
  misc_feature: MA Experiment 20000437 PARAMETER Experiment Name: At_Drought_P Parameter: Timepoint (hr) Value: 24
  misc_feature: MA Experiment 20000437 PARAMETER Experiment Name: At_Drought_P Parameter: Tissue Value: Whole Plant
  misc_feature: MA Experiment 20000437 PARAMETER Experiment Name: At_Drought_P Parameter: Treatment Value: Drought vs. No Drought
  misc_feature: MA Experiment ID: 20000438 Result: Up-regulated in Transcription
  misc_feature: MA Experiment 20000438 PARAMETER Experiment Name: At_Shoots__P Parameter: Age (day) Value: 14
  misc_feature: MA Experiment 20000438 PARAMETER Experiment Name: At_Shoots__P Parameter: Tissue Value: Shoots vs. Whole Plant
  misc_feature: MA Experiment ID: 20000439 Result: Up-regulated in Transcription
  misc_feature: MA Experiment 20000439 PARAMETER Experiment Name: At_Roots__P Parameter: Age (day) Value: 14 vs. 21
  misc_feature: MA Experiment 20000439 PARAMETER Experiment Name: At_Roots__P Parameter: Organism Value: A. thaliana
  misc_feature: MA Experiment 20000439 PARAMETER Experiment Name: At_Roots__P Parameter: Tissue Value: Roots vs. Whole Plant
  misc_feature: MA Experiment ID: 20000451 Result: Up-regulated in Transcription
  misc_feature: MA Experiment 20000451 PARAMETER Experiment Name: At_CS6879_Shoots-Roots_P Parameter: Age (day) Value: 14
  misc_feature: MA Experiment 20000451 PARAMETER Experiment Name: At_CS6879_Shoots-Roots_P Parameter: Organism Value: A. thaliana
  misc_feature: MA Experiment 20000451 PARAMETER Experiment Name: At_CS6879_Shoots-Roots_P Parameter: Plant Line Value: CS6879 vs. WS
  misc_feature: MA Experiment 20000451 PARAMETER Experiment Name: At_CS6879_Shoots-Roots_P Parameter: Tissue Value: Roots
acacctatgaagcaatggaagaagagagagaccacaatgcatctgagtcgtctctcccatctttgagcaagcagttggagagctcgactcttggaggaagcgcggtcgacgttcccgtcgttgatctaagcgtttctgatgaagacttcttggtgcgtgaggtggtgaaagcgagtgaagagtggggagtttttcaggtggttaaccatgggattccaaccgagctgatgcggcagctgcaaatggttggtacgcagtttttcgagctcccggatgctgaaaaggaaaccgtggcgaaagaggaagacttcgaaggatacaagaagaattatctaggaggtataaacaattgggacgaacatctctttcacagactctctccaccctcaattatcaattataaatattggcctaagaatcctcctcaatatagggaggtgacggaggagtatacaaagcatatgaagaggctaacggagaagattcttggttggttatcagagggattagggttacagcgtgagacgttcacgcaaagtataggtggtgacacggcagagtatgtgcttagggtcaatttctatccgccaactcaagatacggaattagtcataggagccgcggcgcacagcgatatgggtgcaatcgcactcctcatcccaaatgaggttcctggacttcaagccttcaaggacgaacaatggttggaccttgactatatcgactccgccgtggttgttatcattggcgatcaactcatgaggatgaccaacgggaggttaaagaacgttcttcacagagcgaagtctgataaggacaaattgaggatttcttggcctgtttttgttgcacctagggctgatatgtccgtcggacctttgccggagtttaccggagacgagaatcctcccaaattcgagactttaatatataatgactatattgaccagaagataagaggctgggcgctcgaagatcttcctgtctactgaaaaccctcaatacctacaataaatgatgatgaattgttcaaggagacaattctttaatagcttccttttgagggtttctatatgtggtacaataaaactatttcaagaatttaaaataatatgtggaaaagctaagcggttagacaaaatattcatctgattgatgctatacattcaaatgtaatcgctcctatcctatgtacgtagtgattaacctcaaaaataatcagcttaagttgctgt

SEQ ID NO: 22289 - protein, 329 aa, Arabidopsis thaliana
  peptide (1)..(329): Ceres Seq. ID no. 12324897
  misc_feature (185)..(284): Pfam Name: 2OG-Fe(II) oxygenase superfamily Pfam Description: 2OG-Fe(II) oxygenase superfamily
  misc_feature (185)..(284): Pfam Name: 2OG-Fe(II) oxygenase superfamily Pfam Description: 2OG-Fe(II) oxygenase superfamily
  misc_feature (3)..(318): Homolog of NCBI NO: 14916565 NR Description: Flavonol synthase (FLS)
  misc_feature (20)..(318): Homolog of NCBI NO: 1706822 NR Description: Flavonol synthase (FLS)
  misc_feature (20)..(313): Homolog of NCBI NO: 14916564 NR Description: Flavonol synthase (FLS)
  misc_feature (23)..(313): Homolog of NCBI NO: 14916566 NR Description: Flavonol synthase (FLS) (CitFLS)
  misc_feature (37)..(318): Homolog of NCBI NO: 6015164 NR Description: Flavonol synthase (FLS)
  misc_feature (3)..(318): Homolog of NCBI NO: 14916565 NR Description: Flavonol synthase (FLS)
  misc_feature (20)..(313): Homolog of NCBI NO: 14916564 NR Description: Flavonol synthase (FLS)
  misc_feature (37)..(318): Homolog of NCBI NO: 6015164 NR Description: Flavonol synthase (FLS)
  misc_feature (5)..(329): Homolog of NCBI NO: 15242828 NR Description: 1-aminocyclopropane-1-carboxylic acid
  misc_feature (33)..(324): Homolog of NCBI NO: 21554244 NR Description: flavonol synthase [Arabidopsis thaliana]
  misc_feature (33)..(324): Homolog of NCBI NO: 15242827 NR Description: flavonol synthase
  misc_feature (5)..(324): Homolog of NCBI NO: 15242339 NR Description: flavonol synthase (FLS) (sp Q96330)
  misc_feature (34)..(313): Homolog of NCBI NO: 10177039 NR Description: flavonol synthase [Arabidopsis thaliana]
  misc_feature (23)..(313): Homolog of NCBI NO: 14916566 NR Description: Flavonol synthase (FLS) (CitFLS)
  misc_feature (20)..(318): Homolog of NCBI NO: 1706822 NR Description: Flavonol synthase (FLS)
  misc_feature (34)..(313): Homolog of NCBI NO: 10177039 NR Description: flavonol synthase [Arabidopsis thaliana]
  misc_feature (5)..(324): Homolog of NCBI NO: 15242339 NR Description: flavonol synthase (FLS) (sp Q96330)
  misc_feature (33)..(324): Homolog of NCBI NO: 15242827 NR Description: flavonol synthase
  misc_feature (33)..(324): Homolog of NCBI NO: 21554244 NR Description: flavonol synthase [Arabidopsis thaliana]
  misc_feature (5)..(329): Homolog of NCBI NO: 15242828 NR Description: 1-aminocyclopropane-1-carboxylic acid
TYEAMEEERDHNASESSLPSLSKQLESSTLGGSAVDVPVVDLSVSDEDFLVREVVKASEEWGVFQVVNHGIPTELMRQLQMVGTQFFELPDAEKETVAKEEDFEGYKKNYLGGINNWDEHLFHRLSPPSIINYKYWPKNPPQYREVTEEYTKHMKRLTEKILGWLSEGLGLQRETFTQSIGGDTAEYVLRVNFYPPTQDTELVIGAAAHSDMGAIALLIPNEVPGLQAFKDEQWLDLDYIDSAVVVIIGDQLMRMTNGRLKNVLHRAKSDKDKLRISWPVFVAPRADMSVGPLPEFTGDENPPKFETLIYNDYIDQKIRGWALEDLPVY

SEQ ID NO: 22290 - protein, 325 aa, Arabidopsis thaliana
  peptide (1)..(325): Ceres Seq. ID no. 12324898
  misc_feature (181)..(280): Pfam Name: 2OG-Fe(II) oxygenase superfamily Pfam Description: 2OG-Fe(II) oxygenase superfamily
  misc_feature (181)..(280): Pfam Name: 2OG-Fe(II) oxygenase superfamily Pfam Description: 2OG-Fe(II) oxygenase superfamily
  misc_feature (1)..(314): Homolog of NCBI NO: 14916565 NR Description: Flavonol synthase (FLS)
  misc_feature (16)..(314): Homolog of NCBI NO: 1706822 NR Description: Flavonol synthase (FLS)
  misc_feature (16)..(309): Homolog of NCBI NO: 14916564 NR Description: Flavonol synthase (FLS)
  misc_feature (19)..(309): Homolog of NCBI NO: 14916566 NR Description: Flavonol synthase (FLS) (CitFLS)
  misc_feature (33)..(314): Homolog of NCBI NO: 6015164 NR Description: Flavonol synthase (FLS)
  misc_feature (1)..(314): Homolog of NCBI NO: 14916565 NR Description: Flavonol synthase (FLS)
  misc_feature (16)..(309): Homolog of NCBI NO: 14916564 NR Description: Flavonol synthase (FLS)
  misc_feature (33)..(314): Homolog of NCBI NO: 6015164 NR Description: Flavonol synthase (FLS)
  misc_feature (1)..(325): Homolog of NCBI NO: 15242828 NR Description: 1-aminocyclopropane-1-carboxylic acid
  misc_feature (29)..(320): Homolog of NCBI NO: 21554244 NR Description: flavonol synthase [Arabidopsis thaliana]
  misc_feature (29)..(320): Homolog of NCBI NO: 15242827 NR Description: flavonol synthase
  misc_feature (1)..(320): Homolog of NCBI NO: 15242339 NR Description: flavonol synthase (FLS) (sp Q96330)
  misc_feature (30)..(309): Homolog of NCBI NO: 10177039 NR Description: flavonol synthase [Arabidopsis thaliana]
  misc_feature (19)..(309): Homolog of NCBI NO: 14916566 NR Description: Flavonol synthase (FLS) (CitFLS)
  misc_feature (16)..(314): Homolog of NCBI NO: 1706822 NR Description: Flavonol synthase (FLS)
  misc_feature (30)..(309): Homolog of NCBI NO: 10177039 NR Description: flavonol synthase [Arabidopsis thaliana]
  misc_feature (1)..(320): Homolog of NCBI NO: 15242339 NR Description: flavonol synthase (FLS) (sp Q96330)
  misc_feature (29)..(320): Homolog of NCBI NO: 15242827 NR Description: flavonol synthase
  misc_feature (29)..(320): Homolog of NCBI NO: 21554244 NR Description: flavonol synthase [Arabidopsis thaliana]
  misc_feature (1)..(325): Homolog of NCBI NO: 15242828 NR Description: 1-aminocyclopropane-1-carboxylic acid
MEEERDHNASESSLPSLSKQLESSTLGGSAVDVPVVDLSVSDEDFLVREVVKASEEWGVFQVVNHGIPTELMRQLQMVGTQFFELPDAEKETVAKEEDFEGYKKNYLGGINNWDEHLFHRLSPPSIINYKYWPKNPPQYREVTEEYTKHMKRLTEKILGWLSEGLGLQRETFTQSIGGDTAEYVLRVNFYPPTQDTELVIGAAAHSDMGAIALLIPNEVPGLQAFKDEQWLDLDYIDSAVVVIIGDQLMRMTNGRLKNVLHRAKSDKDKLRISWPVFVAPRADMSVGPLPEFTGDENPPKFETLIYNDYIDQKIRGWALEDLPVY

SEQ ID NO: 22291 - protein, 254 aa, Arabidopsis thaliana
  peptide (1)..(254): Ceres Seq. ID no. 12324899
  misc_feature (110)..(209): Pfam Name: 2OG-Fe(II) oxygenase superfamily Pfam Description: 2OG-Fe(II) oxygenase superfamily
  misc_feature (110)..(209): Pfam Name: 2OG-Fe(II) oxygenase superfamily Pfam Description: 2OG-Fe(II) oxygenase superfamily
  misc_feature (1)..(243): Homolog of NCBI NO: 14916565 NR Description: Flavonol synthase (FLS)
  misc_feature (1)..(243): Homolog of NCBI NO: 1706822 NR Description: Flavonol synthase (FLS)
  misc_feature (1)..(238): Homolog of NCBI NO: 14916564 NR Description: Flavonol synthase (FLS)
  misc_feature (1)..(238): Homolog of NCBI NO: 14916566 NR Description: Flavonol synthase (FLS) (CitFLS)
  misc_feature (1)..(243): Homolog of NCBI NO: 6015164 NR Description: Flavonol synthase (FLS)
  misc_feature (1)..(243): Homolog of NCBI NO: 14916565 NR Description: Flavonol synthase (FLS)
  misc_feature (1)..(238): Homolog of NCBI NO: 14916564 NR Description: Flavonol synthase (FLS)
  misc_feature (1)..(243): Homolog of NCBI NO: 6015164 NR Description: Flavonol synthase (FLS)
  misc_feature (1)..(254): Homolog of NCBI NO: 15242828 NR Description: 1-aminocyclopropane-1-carboxylic acid
  misc_feature (1)..(249): Homolog of NCBI NO: 21554244 NR Description: flavonol synthase [Arabidopsis thaliana]
  misc_feature (1)..(249): Homolog of NCBI NO: 15242827 NR Description: flavonol synthase
  misc_feature (1)..(249): Homolog of NCBI NO: 15242339 NR Description: flavonol synthase (FLS) (sp Q96330)
  misc_feature (1)..(238): Homolog of NCBI NO: 10177039 NR Description: flavonol synthase [Arabidopsis thaliana]
  misc_feature (1)..(238): Homolog of NCBI NO: 14916566 NR Description: Flavonol synthase (FLS) (CitFLS)
  misc_feature (1)..(243): Homolog of NCBI NO: 1706822 NR Description: Flavonol synthase (FLS)
  misc_feature (1)..(238): Homolog of NCBI NO: 10177039 NR Description: flavonol synthase [Arabidopsis thaliana]
  misc_feature (1)..(249): Homolog of NCBI NO: 15242339 NR Description: flavonol synthase (FLS) (sp Q96330)
  misc_feature (1)..(249): Homolog of NCBI NO: 15242827 NR Description: flavonol synthase
  misc_feature (1)..(249): Homolog of NCBI NO: 21554244 NR Description: flavonol synthase [Arabidopsis thaliana]
  misc_feature (1)..(254): Homolog of NCBI NO: 15242828 NR Description: 1-aminocyclopropane-1-carboxylic acid
MRQLQMVGTQFFELPDAEKETVAKEEDFEGYKKNYLGGINNWDEHLFHRLSPPSIINYKYWPKNPPQYREVTEEYTKHMKRLTEKILGWLSEGLGLQRETFTQSIGGDTAEYVLRVNFYPPTQDTELVIGAAAHSDMGAIALLIPNEVPGLQAFKDEQWLDLDYIDSAVVVIIGDQLMRMTNGRLKNVLHRAKSDKDKLRISWPVFVAPRADMSVGPLPEFTGDENPPKFETLIYNDYIDQKIRGWALEDLPVY

SEQ ID NO: 22292 - DNA, 1107 bp, Arabidopsis thaliana
  misc_feature (1)..(1107): Ceres Seq. ID no. 12334724
  misc_feature: MA Experiment ID: 108473 Result: Down-regulated in Transcription
  misc_feature: MA Experiment 108473 PARAMETER Experiment Name: At_Drought_Flowers_cDNA_P Parameter: Timepoint (hr) Value: 7 d
  misc_feature: MA Experiment 108473 PARAMETER Experiment Name: At_Drought_Flowers_cDNA_P Parameter: Tissue Value: Flower
  misc_feature: MA Experiment 108473 PARAMETER Experiment Name: At_Drought_Flowers_cDNA_P Parameter: Treatment Value: Drought vs. No Drought
  misc_feature: MA Experiment ID: 108474 Result: Down-regulated in Transcription
  misc_feature: MA Experiment 108474 PARAMETER Experiment Name: At_Drought_Flowers_cDNA_P Parameter: Timepoint (hr) Value: null
  misc_feature: MA Experiment 108474 PARAMETER Experiment Name: At_Drought_Flowers_cDNA_P Parameter: Treatment Value: Drought vs. No Drought
  misc_feature: MA Experiment ID: 108501 Result: Down-regulated in Transcription
  misc_feature: MA Experiment 108501 PARAMETER Experiment Name: At_ap2_floral_buds_cDNA_P Parameter: Plant Line Value: ap2 (Ler.)
  misc_feature: MA Experiment 108501 PARAMETER Experiment Name: At_ap2_floral_buds_cDNA_P Parameter: Tissue Value: Closed Flower
  misc_feature: MA Experiment ID: 20000087 Result: Up-regulated in Transcription
  misc_feature: MA Experiment 20000087 PARAMETER Experiment Name: At_100uM_ABA_Mutants_cDNA_P Parameter: Plant Line Value: WS
  misc_feature: MA Experiment 20000087 PARAMETER Experiment Name: At_100uM_ABA_Mutants_cDNA_P Parameter: Timepoint (hr) Value: 6
  misc_feature: MA Experiment 20000087 PARAMETER Experiment Name: At_100uM_ABA_Mutants_cDNA_P Parameter: Tissue Value: Aerial
  misc_feature: MA Experiment 20000087 PARAMETER Experiment Name: At_100uM_ABA_Mutants_cDNA_P Parameter: Treatment Value: 100uM ABA vs. No Treatment
  misc_feature: MA Experiment ID: 20000234 Result: Up-regulated in Transcription
  misc_feature: MA Experiment 20000234 PARAMETER Experiment Name: At_Siliques_P Parameter: Age (day) Value: 21
  misc_feature: MA Experiment 20000234 PARAMETER Experiment Name: At_Siliques_P Parameter: Organism Value: A. thaliana
  misc_feature: MA Experiment 20000234 PARAMETER Experiment Name: At_Siliques_P Parameter: Plant Line Value: WS
  misc_feature: MA Experiment 20000234 PARAMETER Experiment Name: At_Siliques_P Parameter: Tissue Value: Less Than 5mm Siliques vs. Whole Plant
  misc_feature: MA Experiment ID: 20000235 Result: Up-regulated in Transcription
  misc_feature: MA Experiment 20000235 PARAMETER Experiment Name: At_Siliques_P Parameter: Age (day) Value: 21
  misc_feature: MA Experiment 20000235 PARAMETER Experiment Name: At_Siliques_P Parameter: Organism Value: A. thaliana
  misc_feature: MA Experiment 20000235 PARAMETER Experiment Name: At_Siliques_P Parameter: Plant Line Value: WS
  misc_feature: MA Experiment 20000235 PARAMETER Experiment Name: At_Siliques_P Parameter: Tissue Value: 5-10mm Siliques vs. Whole Plant
tctctgattattttctcaaattatttaattaatttcttcttcttcatcaccaccaattacactcaaaattatggtgtttgcacatttgaaccttcttcggaagattgtggggattataggaaacttcatcgctctatgtctgttcttgtcaccaacgccaacatttgttcggatagtgaaaaagaagtcagtggaggaatattcaccaataccgtatttagcgactcttataaactgtttggtttgggttctttacggactaccaacggtgcatccggacagcacattggtcattacaataaacggcacagggatcttgatcgaaatcgtattccttacgatctttttcgtttattgtggccgccaaaaacagcggttgataatatccgctgttatagcggctgaaaccgcgttcatagctattcttgcggttttggtattaactctccaacacactaccgaaaaacgtactatgagtgttggaatcgtatgttgcgttttcaacgttatgatgtacgcttctccattgtctgttatgaaaatggtaataaaaacaaaaagtgtggagttcatgccgttttggttatcggtagctggatttctaaacgcaggcgtttggacaatttatgctctcatgcctttcgacccattcatggctataccaaatggaattggatgtttatttgggctagctcaactaatattgtatggtgcctactataagtccaccaaaagaataatggcggaaagagaaaaccaacctggttacgtcggtttatcaagtgcgatcgctcgtaccggatctgagaaaaccgcgaataccaaccaagaacctaacaatgtttaatttggtctagtgttattaaacttcggattatgggatttttttcccatccaagactcttagtatatgaataagatggaaactttcattactttgtttttctttttgtctaaaattccattactttgttttaaaattcaaactttgtaatgcaattttgacgtcccttttttgaggagcaataagctacttttcaaagtttctggtgtaatgttcaaacttttatgattatgcggggttaaattaaaataaattagtcgtcg

SEQ ID NO: 22293 - protein, 258 aa, Arabidopsis thaliana
  peptide (1)..(258): Ceres Seq. ID no. 12334725
  misc_feature (11)..(100): Pfam Name: MtN3/saliva family Pfam Description: MtN3/saliva family
  misc_feature (10)..(197): Homolog of NCBI NO: 10177463 NR Description: contains similarity to MtN3
  misc_feature (41)..(253): Homolog of NCBI NO: 431154 NR Description: ORF [Lilium longiflorum]
  misc_feature (10)..(249): Homolog of NCBI NO: 21592355 NR Description: contains similarity to nodulin MtN3 protein
  misc_feature (10)..(249): Homolog of NCBI NO: 18405611 NR Description: Expressed protein
  misc_feature (10)..(250): Homolog of NCBI NO: 34912454 NR Description: P0681B11.31 [Oryza sativa (japonica
  misc_feature (10)..(244): Homolog of NCBI NO: 34912462 NR Description: MtN3-like protein [Oryza sativa (japonica
  misc_feature (1)..(258): Homolog of NCBI NO: 15219732 NR Description: hypothetical protein; protein id: At1g66770.1
  misc_feature (30)..(258): Homolog of NCBI NO: 7486709 NR Description: hypothetical protein F8M12.20 - Arabidopsis
  misc_feature (30)..(258): Homolog of NCBI NO: 7486148 NR Description: hypothetical protein F25I24.60 - Arabidopsis
  misc_feature (1)..(258): Homolog of NCBI NO: 18413388 NR Description: putative protein
MVFAHLNLLRKIVGIIGNFIALCLFLSPTPTFVRIVKKKSVEEYSPIPYLATLINCLVWVLYGLPTVHPDSTLVITINGTGILIEIVFLTIFFVYCGRQKQRLIISAVIAAETAFIAILAVLVLTLQHTTEKRTMSVGIVCCVFNVMMYASPLSVMKMVIKTKSVEFMPFWLSVAGFLNAGVWTIYALMPFDPFMAIPNGIGCLFGLAQLILYGAYYKSTKRIMAERENQPGYVGLSSAIARTGSEKTANTNQEPNNV

SEQ ID NO: 22294 - protein, 134 aa, Arabidopsis thaliana
  peptide (1)..(134): Ceres Seq. ID no. 12334726
SLIIFSNYLINFFFFITTNYTQNYGVCTFEPSSEDCGDYRKLHRSMSVLVTNANICSDSEKEVSGGIFTNTVFSDSYKLFGLGSLRTTNGASGQHIGHYNKRHRDLDRNRIPYDLFRLLWPPKTAVDNIRCYSG

SEQ ID NO: 22295 - DNA, 1504 bp, Arabidopsis thaliana
  misc_feature (1)..(1504): Ceres Seq. ID no. 12335092
  misc_feature: MA Experiment ID: 108461 Result: Up-regulated in Transcription
  misc_feature: MA Experiment 108461 PARAMETER Experiment Name: At_Germinating_Seeds_cDNA_P Parameter: Age (day) Value: 1 vs. 0
  misc_feature: MA Experiment 108461 PARAMETER Experiment Name: At_Germinating_Seeds_cDNA_P Parameter: Tissue Value: Germinating Seeds
  misc_feature: MA Experiment ID: 108462 Result: Up-regulated in Transcription
  misc_feature: MA Experiment 108462 PARAMETER Experiment Name: At_Germinating_Seeds_cDNA_P Parameter: Age (day) Value: 2 vs. 0
  misc_feature: MA Experiment 108462 PARAMETER Experiment Name: At_Germinating_Seeds_cDNA_P Parameter: Tissue Value: Germinating Seeds
  misc_feature: MA Experiment ID: 108463 Result: Up-regulated in Transcription
  misc_feature: MA Experiment 108463 PARAMETER Experiment Name: At_Germinating_Seeds_cDNA_P Parameter: Age (day) Value: 3 vs. 0
  misc_feature: MA Experiment 108463 PARAMETER Experiment Name: At_Germinating_Seeds_cDNA_P Parameter: Tissue Value: Germinating Seeds
  misc_feature: MA Experiment ID: 108464 Result: Up-regulated in Transcription
  misc_feature: MA Experiment 108464 PARAMETER Experiment Name: At_Germinating_Seeds_cDNA_P Parameter: Age (day) Value: 4 vs. 0
  misc_feature: MA Experiment 108464 PARAMETER Experiment Name: At_Germinating_Seeds_cDNA_P Parameter: Tissue Value: Germinating Seeds
  misc_feature: MA Experiment ID: 108489 Result: Down-regulated in Transcription
  misc_feature: MA Experiment ID: 108501 Result: Up-regulated in Transcription
  misc_feature: MA Experiment 108501 PARAMETER Experiment Name: At_ap2_floral_buds_cDNA_P Parameter: Plant Line Value: ap2 (Ler.)
  misc_feature: MA Experiment 108501 PARAMETER Experiment Name: At_ap2_floral_buds_cDNA_P Parameter: Tissue Value: Closed Flower
  misc_feature: MA Experiment ID: 108569 Result: Up-regulated in Transcription
  misc_feature: MA Experiment 108569 PARAMETER Experiment Name: At_0.001%_MeJA__cDNA_P Parameter: Timepoint (hr) Value: 6
  misc_feature: MA Experiment 108569 PARAMETER Experiment Name: At_0.001%_MeJA__cDNA_P Parameter: Tissue Value: Aerial
  misc_feature: MA Experiment 108569 PARAMETER Experiment Name: At_0.001%_MeJA__cDNA_P Parameter: Treatment Value: 0.001% MeJA vs. No Treatment
  misc_feature: MA Experiment ID: 108572 Result: Up-regulated in Transcription
  misc_feature: MA Experiment 108572 PARAMETER Experiment Name: At_Drought_cDNA_P Parameter: Timepoint (hr) Value: 1
  misc_feature: MA Experiment 108572 PARAMETER Experiment Name: At_Drought_cDNA_P Parameter: Tissue Value: Aerial
  misc_feature: MA Experiment 108572 PARAMETER Experiment Name: At_Drought_cDNA_P Parameter: Treatment Value: Drought vs. No Drought
  misc_feature: MA Experiment ID: 108594 Result: Down-regulated in Transcription
  misc_feature: MA Experiment 108594 PARAMETER Experiment Name: At_Ler-rhl_Root_cDNA_P Parameter: Plant Line Value: null
  misc_feature: MA Experiment ID: 108595 Result: Down-regulated in Transcription
  misc_feature: MA Experiment 108595 PARAMETER Experiment Name: At_Ler-pi_Ovule_cDNA_P Parameter: Plant Line Value: null
  misc_feature: MA Experiment ID: 20000069 Result: Down-regulated in Transcription
  misc_feature: MA Experiment 20000069 PARAMETER Experiment Name: At_100uM_ABA_Mutants_cDNA_P Parameter: Plant Line Value: CS23
  misc_feature: MA Experiment 20000069 PARAMETER Experiment Name: At_100uM_ABA_Mutants_cDNA_P Parameter: Timepoint (hr) Value: 6
  misc_feature: MA Experiment 20000069 PARAMETER Experiment Name: At_100uM_ABA_Mutants_cDNA_P Parameter: Tissue Value: Aerial
  misc_feature: MA Experiment 20000069 PARAMETER Experiment Name: At_100uM_ABA_Mutants_cDNA_P Parameter: Treatment Value: 100uM ABA vs. No Treatment
  misc_feature: MA Experiment ID: 20000070 Result: Down-regulated in Transcription
  misc_feature: MA Experiment 20000070 PARAMETER Experiment Name: At_100uM_ABA_Mutants_cDNA_P Parameter: Plant Line Value: CS24
  misc_feature: MA Experiment 20000070 PARAMETER Experiment Name: At_100uM_ABA_Mutants_cDNA_P Parameter: Timepoint (hr) Value: 6
  misc_feature: MA Experiment 20000070 PARAMETER Experiment Name: At_100uM_ABA_Mutants_cDNA_P Parameter: Tissue Value: Aerial
  misc_feature: MA Experiment 20000070 PARAMETER Experiment Name: At_100uM_ABA_Mutants_cDNA_P Parameter: Treatment Value: 100uM ABA vs. No Treatment
  misc_feature: MA Experiment ID: 20000071 Result: Down-regulated in Transcription
  misc_feature: MA Experiment 20000071 PARAMETER Experiment Name: At_100uM_ABA_Mutants_cDNA_P Parameter: Plant Line Value: CS8104
  misc_feature: MA Experiment 20000071 PARAMETER Experiment Name: At_100uM_ABA_Mutants_cDNA_P Parameter: Timepoint (hr) Value: 6
  misc_feature: MA Experiment 20000071 PARAMETER Experiment Name: At_100uM_ABA_Mutants_cDNA_P Parameter: Tissue Value: Aerial
  misc_feature: MA Experiment 20000071 PARAMETER Experiment Name: At_100uM_ABA_Mutants_cDNA_P Parameter: Treatment Value: 100uM ABA vs. No Treatment
  misc_feature: MA Experiment ID: 20000086 Result: Down-regulated in Transcription
  misc_feature: MA Experiment 20000086 PARAMETER Experiment Name: At_100uM_ABA_Mutants_cDNA_P Parameter: Plant Line Value: CS22
  misc_feature: MA Experiment 20000086 PARAMETER Experiment Name: At_100uM_ABA_Mutants_cDNA_P Parameter: Timepoint (hr) Value: 6
  misc_feature: MA Experiment 20000086 PARAMETER Experiment Name: At_100uM_ABA_Mutants_cDNA_P Parameter: Tissue Value: Aerial
  misc_feature: MA Experiment 20000086 PARAMETER Experiment Name: At_100uM_ABA_Mutants_cDNA_P Parameter: Treatment Value: 100uM ABA vs. No Treatment
  misc_feature: MA Experiment ID: 20000087 Result: Down-regulated in Transcription
  misc_feature: MA Experiment 20000087 PARAMETER Experiment Name: At_100uM_ABA_Mutants_cDNA_P Parameter: Plant Line Value: WS
  misc_feature: MA Experiment 20000087 PARAMETER Experiment Name: At_100uM_ABA_Mutants_cDNA_P Parameter: Timepoint (hr) Value: 6
  misc_feature: MA Experiment 20000087 PARAMETER Experiment Name: At_100uM_ABA_Mutants_cDNA_P Parameter: Tissue Value: Aerial
  misc_feature: MA Experiment 20000087 PARAMETER Experiment Name: At_100uM_ABA_Mutants_cDNA_P Parameter: Treatment Value: 100uM ABA vs. No Treatment
  misc_feature: MA Experiment ID: 20000089 Result: Down-regulated in Transcription
  misc_feature: MA Experiment ID: 20000090 Result: Down-regulated in Transcription
  misc_feature: MA Experiment ID: 20000117 Result: Down-regulated in Transcription
  misc_feature: MA Experiment 20000117 PARAMETER Experiment Name: At_100uM_ABA_Mutants_cDNA_P Parameter: Plant Line Value: Columbia
  misc_feature: MA Experiment 20000117 PARAMETER Experiment Name: At_100uM_ABA_Mutants_cDNA_P Parameter: Timepoint (hr) Value: 6
  misc_feature: MA Experiment 20000117 PARAMETER Experiment Name: At_100uM_ABA_Mutants_cDNA_P Parameter: Tissue Value: Aerial
  misc_feature: MA Experiment 20000117 PARAMETER Experiment Name: At_100uM_ABA_Mutants_cDNA_P Parameter: Treatment Value: 100uM ABA vs. No Treatment
  misc_feature: MA Experiment ID: 20000184 Result: Up-regulated in Transcription
  misc_feature: MA Experiment 20000184 PARAMETER Experiment Name: At_Shoots__P Parameter: Age (day) Value: 7
  misc_feature: MA Experiment 20000184 PARAMETER Experiment Name: At_Shoots__P Parameter: Tissue Value: Shoots vs. Whole Plant
  misc_feature: MA Experiment ID: 20000185 Result: Up-regulated in Transcription
  misc_feature: MA Experiment 20000185 PARAMETER Experiment Name: At_Roots__P Parameter: Age (day) Value: 7 vs. 21
  misc_feature: MA Experiment 20000185 PARAMETER Experiment Name: At_Roots__P Parameter: Organism Value: A. thaliana
  misc_feature: MA Experiment 20000185 PARAMETER Experiment Name: At_Roots__P Parameter: Tissue Value: Roots vs. Whole Plant
  misc_feature: MA Experiment ID: 20000234 Result: Up-regulated in Transcription
  misc_feature: MA Experiment 20000234 PARAMETER Experiment Name: At_Siliques_P Parameter: Age (day) Value: 21
  misc_feature: MA Experiment 20000234 PARAMETER Experiment Name: At_Siliques_P Parameter: Organism Value: A. thaliana
  misc_feature: MA Experiment 20000234 PARAMETER Experiment Name: At_Siliques_P Parameter: Plant Line Value: WS
  misc_feature: MA Experiment 20000234 PARAMETER Experiment Name: At_Siliques_P Parameter: Tissue Value: Less Than 5mm Siliques vs. Whole Plant
  misc_feature: MA Experiment ID: 20000235 Result: Up-regulated in Transcription
  misc_feature: MA Experiment 20000235 PARAMETER Experiment Name: At_Siliques_P Parameter: Age (day) Value: 21
  misc_feature: MA Experiment 20000235 PARAMETER Experiment Name: At_Siliques_P Parameter: Organism Value: A. thaliana
  misc_feature: MA Experiment 20000235 PARAMETER Experiment Name: At_Siliques_P Parameter: Plant Line Value: WS
  misc_feature: MA Experiment 20000235 PARAMETER Experiment Name: At_Siliques_P Parameter: Tissue Value: 5-10mm Siliques vs. Whole Plant
  misc_feature: MA Experiment ID: 20000264 Result: Up-regulated in Transcription
  misc_feature: MA Experiment 20000264 PARAMETER Experiment Name: At_Open_Flower_P Parameter: Age (day) Value: 21
  misc_feature: MA Experiment 20000264 PARAMETER Experiment Name: At_Open_Flower_P Parameter: Plant Line Value: WS
  misc_feature: MA Experiment 20000264 PARAMETER Experiment Name: At_Open_Flower_P Parameter: Tissue Value: Open Flower vs. Whole Plant
  misc_feature: MA Experiment ID: 20000265 Result: Up-regulated in Transcription
  misc_feature: MA Experiment 20000265 PARAMETER Experiment Name: At_Open_Flower_P Parameter: Age (day) Value: 21
  misc_feature: MA Experiment 20000265 PARAMETER Experiment Name: At_Open_Flower_P Parameter: Plant Line Value: WS
  misc_feature: MA Experiment 20000265 PARAMETER Experiment Name: At_Open_Flower_P Parameter: Tissue Value: Closed Flower vs. Whole Plant
  misc_feature: MA Experiment ID: 20000438 Result: Up-regulated in Transcription
  misc_feature: MA Experiment 20000438 PARAMETER Experiment Name: At_Shoots__P Parameter: Age (day) Value: 14
  misc_feature: MA Experiment 20000438 PARAMETER Experiment Name: At_Shoots__P Parameter: Tissue Value: Shoots vs. Whole Plant
  misc_feature: MA Experiment ID: 20000460 Result: Up-regulated in Transcription
  misc_feature: MA Experiment 20000460 PARAMETER Experiment Name: At_10percent_PEG_P Parameter: Age (day) Value: 12
  misc_feature: MA Experiment 20000460 PARAMETER Experiment Name: At_10percent_PEG_P Parameter: Organism Value: A. thaliana
  misc_feature: MA Experiment 20000460 PARAMETER Experiment Name: At_10percent_PEG_P Parameter: Plant Line Value: WS
  misc_feature: MA Experiment 20000460 PARAMETER Experiment Name: At_10percent_PEG_P Parameter: Timepoint (day) Value: 12
  misc_feature: MA Experiment 20000460 PARAMETER Experiment Name: At_10percent_PEG_P Parameter: Tissue Value: Whole Plant
  misc_feature: MA Experiment 20000460 PARAMETER Experiment Name: At_10percent_PEG_P Parameter: Treatment Value: 10percent PEG vs. No Treatment
  misc_feature: MA Experiment ID: 20000527 Result: Up-regulated in Transcription
  misc_feature: MA Experiment 20000527 PARAMETER Experiment Name: At_10percent_PEG_P Parameter: Age (day) Value: 20
  misc_feature: MA Experiment 20000527 PARAMETER Experiment Name: At_10percent_PEG_P Parameter: Organism Value: A. thaliana
  misc_feature: MA Experiment 20000527 PARAMETER Experiment Name: At_10percent_PEG_P Parameter: Plant Line Value: WS
  misc_feature: MA Experiment 20000527 PARAMETER Experiment Name: At_10percent_PEG_P Parameter: Timepoint (day) Value: 20
  misc_feature: MA Experiment 20000527 PARAMETER Experiment Name: At_10percent_PEG_P Parameter: Tissue Value: Whole Plant
  misc_feature: MA Experiment 20000527 PARAMETER Experiment Name: At_10percent_PEG_P Parameter: Treatment Value: 10percent PEG vs. No Treatment
  misc_feature: MA Experiment ID: 20000574 Result: Down-regulated in Transcription
  misc_feature: MA Experiment 20000574 PARAMETER Experiment Name: At_100uM_ABA_Mutants__P Parameter: Organism Value: A. thaliana
  misc_feature: MA Experiment 20000574 PARAMETER Experiment Name: At_100uM_ABA_Mutants__P Parameter: Plant Line Value: CS23 vs. Ler wt
  misc_feature: MA Experiment 20000574 PARAMETER Experiment Name: At_100uM_ABA_Mutants__P Parameter: Timepoint (hr) Value: N/A
  misc_feature: MA Experiment 20000574 PARAMETER Experiment Name: At_100uM_ABA_Mutants__P Parameter: Tissue Value: Whole Plant
  misc_feature: MA Experiment 20000574 PARAMETER Experiment Name: At_100uM_ABA_Mutants__P Parameter: Treatment Value: None
  misc_feature: MA Experiment ID: 20000794 Result: Up-regulated in Transcription
  misc_feature: MA Experiment 20000794 PARAMETER Experiment Name: At_Petals_P Parameter: Age (day) Value: 23-25 days
  misc_feature: MA Experiment 20000794 PARAMETER Experiment Name: At_Petals_P Parameter: Plant Line Value: WS
  misc_feature: MA Experiment 20000794 PARAMETER Experiment Name: At_Petals_P Parameter: Tissue Value: Petals vs. Whole plant
  misc_feature: MA Experiment ID: 20001248 Result: Down-regulated in Transcription
  misc_feature: MA Experiment 20001248 PARAMETER Experiment Name: At_Far-red-induction_P Parameter: Age (day) Value: 7
  misc_feature: MA Experiment 20001248 PARAMETER Experiment Name: At_Far-red-induction_P Parameter: Light Value: Far-red vs. White
  misc_feature: MA Experiment 20001248 PARAMETER Experiment Name: At_Far-red-induction_P Parameter: Organism Value: A. thaliana
  misc_feature: MA Experiment 20001248 PARAMETER Experiment Name: At_Far-red-induction_P Parameter: Plant Line Value: Columbia
  misc_feature: MA Experiment 20001248 PARAMETER Experiment Name: At_Far-red-induction_P Parameter: Timepoint (hr) Value: 4
  misc_feature: MA Experiment 20001248 PARAMETER Experiment Name: At_Far-red-induction_P Parameter: Tissue Value: Whole Plant
  misc_feature: MA Experiment ID: 20001450 Result: Down-regulated in Transcription
  misc_feature: MA Experiment 20001450 PARAMETER Experiment Name: At_Far-red-induction_P Parameter: Age (day) Value: 7
  misc_feature: MA Experiment 20001450 PARAMETER Experiment Name: At_Far-red-induction_P Parameter: Light Value: Far-red vs. White
  misc_feature: MA Experiment 20001450 PARAMETER Experiment Name: At_Far-red-induction_P Parameter: Organism Value: A. thaliana
  misc_feature: MA Experiment 20001450 PARAMETER Experiment Name: At_Far-red-induction_P Parameter: Plant Line Value: Columbia
  misc_feature: MA Experiment 20001450 PARAMETER Experiment Name: At_Far-red-induction_P Parameter: Timepoint (hr) Value: 8
  misc_feature: MA Experiment 20001450 PARAMETER Experiment Name: At_Far-red-induction_P Parameter: Tissue Value: Whole Plant
  misc_feature: MA Experiment ID: 20001451 Result: Down-regulated in Transcription
  misc_feature: MA Experiment 20001451 PARAMETER Experiment Name: At_Far-red-induction_P Parameter: Age (day) Value: 7
  misc_feature: MA Experiment 20001451 PARAMETER Experiment Name: At_Far-red-induction_P Parameter: Light Value: Far-red vs. White
  misc_feature: MA Experiment 20001451 PARAMETER Experiment Name: At_Far-red-induction_P Parameter: Organism Value: A. thaliana
  misc_feature: MA Experiment 20001451 PARAMETER Experiment Name: At_Far-red-induction_P Parameter: Plant Line Value: Columbia
  misc_feature: MA Experiment 20001451 PARAMETER Experiment Name: At_Far-red-induction_P Parameter: Timepoint (hr) Value: 24
  misc_feature: MA Experiment 20001451 PARAMETER Experiment Name: At_Far-red-induction_P Parameter: Tissue Value: Whole Plant
  misc_feature: MA Experiment ID: 20001503 Result: Up-regulated in Transcription
  misc_feature: MA Experiment 20001503 PARAMETER Experiment Name: At_Far-red-enriched_P Parameter: Age (day) Value: 7
  misc_feature: MA Experiment 20001503 PARAMETER Experiment Name: At_Far-red-enriched_P Parameter: Light Value: Far-red enriched vs. White
  misc_feature: MA Experiment 20001503 PARAMETER Experiment Name: At_Far-red-enriched_P Parameter: Organism Value: A. thaliana
  misc_feature: MA Experiment 20001503 PARAMETER Experiment Name: At_Far-red-enriched_P Parameter: Plant Line Value: Columbia
  misc_feature: MA Experiment 20001503 PARAMETER Experiment Name: At_Far-red-enriched_P Parameter: Timepoint (day) Value: 3
  misc_feature: MA Experiment 20001503 PARAMETER Experiment Name: At_Far-red-enriched_P Parameter: Tissue Value: Whole Plant
  misc_feature: MA Experiment ID: 20001556 Result: Up-regulated in Transcription
  misc_feature: MA Experiment 20001556 PARAMETER Experiment Name: At_Drought_Soil_Dry_P Parameter: Age (day) Value: 26
  misc_feature: MA Experiment 20001556 PARAMETER Experiment Name: At_Drought_Soil_Dry_P Parameter: Organism Value: A. thaliana
  misc_feature: MA Experiment 20001556 PARAMETER Experiment Name: At_Drought_Soil_Dry_P Parameter: Plant Line Value: WS
  misc_feature: MA Experiment 20001556 PARAMETER Experiment Name: At_Drought_Soil_Dry_P Parameter: Post Timepoint (hr) Value: None
  misc_feature: MA Experiment 20001556 PARAMETER Experiment Name: At_Drought_Soil_Dry_P Parameter: Post-Treatment Value: None
  misc_feature: MA Experiment 20001556 PARAMETER Experiment Name: At_Drought_Soil_Dry_P Parameter: Timepoint (day) Value: 12
  misc_feature: MA Experiment 20001556 PARAMETER Experiment Name: At_Drought_Soil_Dry_P Parameter: Treatment Value: Drought vs. No Drought
  misc_feature: MA Experiment ID: 20001558 Result: Up-regulated in Transcription
  misc_feature: MA Experiment 20001558 PARAMETER Experiment Name: At_Drought_Soil_Dry_P Parameter: Age (day) Value: 27
  misc_feature: MA Experiment 20001558 PARAMETER Experiment Name: At_Drought_Soil_Dry_P Parameter: Organism Value: A. thaliana
  misc_feature: MA Experiment 20001558 PARAMETER Experiment Name: At_Drought_Soil_Dry_P Parameter: Plant Line Value: WS
  misc_feature: MA Experiment 20001558 PARAMETER Experiment Name: At_Drought_Soil_Dry_P Parameter: Post Timepoint (hr) Value: 6
  misc_feature: MA Experiment 20001558 PARAMETER Experiment Name: At_Drought_Soil_Dry_P Parameter: Post-Treatment Value: Re-Water vs. No Drought
  misc_feature: MA Experiment 20001558 PARAMETER Experiment Name: At_Drought_Soil_Dry_P Parameter: Timepoint (day) Value: 13
  misc_feature: MA Experiment 20001558 PARAMETER Experiment Name: At_Drought_Soil_Dry_P Parameter: Treatment Value: Drought vs. No Drought
  misc_feature: MA Experiment ID: 20001560 Result: Up-regulated in Transcription
  misc_feature: MA Experiment 20001560 PARAMETER Experiment Name: At_Drought_Soil_Dry_P Parameter: Age (day) Value: 28
  misc_feature: MA Experiment 20001560 PARAMETER Experiment Name: At_Drought_Soil_Dry_P Parameter: Organism Value: A. thaliana
  misc_feature: MA Experiment 20001560 PARAMETER Experiment Name: At_Drought_Soil_Dry_P Parameter: Plant Line Value: WS
  misc_feature: MA Experiment 20001560 PARAMETER Experiment Name: At_Drought_Soil_Dry_P Parameter: Post Timepoint (hr) Value: None
  misc_feature: MA Experiment 20001560 PARAMETER Experiment Name: At_Drought_Soil_Dry_P Parameter: Post-Treatment Value: None
  misc_feature: MA Experiment 20001560 PARAMETER Experiment Name: At_Drought_Soil_Dry_P Parameter: Timepoint (day) Value: 14
  misc_feature: MA Experiment 20001560 PARAMETER Experiment Name: At_Drought_Soil_Dry_P Parameter: Treatment Value: Drought vs. No Drought
  misc_feature: MA Experiment ID: 20001904 Result: Up-regulated in Transcription
  misc_feature: MA Experiment 20001904 PARAMETER Experiment Name: At_Drought_Reproduction_P Parameter: Age (day) Value: 37
  misc_feature: MA Experiment 20001904 PARAMETER Experiment Name: At_Drought_Reproduction_P Parameter: Organism Value: A. thaliana
  misc_feature: MA Experiment 20001904 PARAMETER Experiment Name: At_Drought_Reproduction_P Parameter: Plant Line Value: WS
  misc_feature: MA Experiment 20001904 PARAMETER Experiment Name: At_Drought_Reproduction_P Parameter: Timepoint (day) Value: 7
  misc_feature: MA Experiment 20001904 PARAMETER Experiment Name: At_Drought_Reproduction_P Parameter: Tissue Value: Rosettes
  misc_feature: MA Experiment 20001904 PARAMETER Experiment Name: At_Drought_Reproduction_P Parameter: Treatment Value: Drought vs. No Drought
  misc_feature: MA Experiment ID: 20001905 Result: Up-regulated in Transcription
  misc_feature: MA Experiment 20001905 PARAMETER Experiment Name: At_Drought_Reproduction_P Parameter: Age (day) Value: 40
  misc_feature: MA Experiment 20001905 PARAMETER Experiment Name: At_Drought_Reproduction_P Parameter: Organism Value: A. thaliana
  misc_feature: MA Experiment 20001905 PARAMETER Experiment Name: At_Drought_Reproduction_P Parameter: Plant Line Value: WS
  misc_feature: MA Experiment 20001905 PARAMETER Experiment Name: At_Drought_Reproduction_P Parameter: Timepoint (day) Value: 10
  misc_feature: MA Experiment 20001905 PARAMETER Experiment Name: At_Drought_Reproduction_P Parameter: Tissue Value: Rosettes
  misc_feature: MA Experiment 20001905 PARAMETER Experiment Name: At_Drought_Reproduction_P Parameter: Treatment Value: Drought vs. No Drought
  misc_feature: MA Experiment ID: 20001906 Result: Down-regulated in Transcription
  misc_feature: MA Experiment 20001906 PARAMETER Experiment Name: At_Drought_Reproduction_P Parameter: Age (day) Value: 35
  misc_feature: MA Experiment 20001906 PARAMETER Experiment Name: At_Drought_Reproduction_P Parameter: Organism Value: A. thaliana
  misc_feature: MA Experiment 20001906 PARAMETER Experiment Name: At_Drought_Reproduction_P Parameter: Plant Line Value: WS
  misc_feature: MA Experiment 20001906 PARAMETER Experiment Name: At_Drought_Reproduction_P Parameter: Timepoint (day) Value: 5
  misc_feature: MA Experiment 20001906 PARAMETER Experiment Name: At_Drought_Reproduction_P Parameter: Tissue Value: Siliques
  misc_feature: MA Experiment 20001906 PARAMETER Experiment Name: At_Drought_Reproduction_P Parameter: Treatment Value: Drought vs. No Drought
aaaagggcagtctaactttccttttctaatgattataaatatcctttttccgtaaaaagaaattaaaagaaaatgggttcgacactaaagcatctgcttttgcttctacttttttgattcgtcatgttgattctgctgctatagtcaagtctcttcctggtttagaaggccgtcttcctttcgaactcgaaaccgggtacattggtattggagaggaagaggacatacaattgttctactatttcatcaaatctgagaacaatccaaaagaagaccctcttcttctatggttagatggaggacctggatgttcttctctcggtggccttctttttgagaacggaccggtggctttgaagtctgcggtttacaatggaagtaatccttctttgttctccactacatattcatggacaaagatggcaaacataatatacttggatcagccagttggatctggtttctcttactcaagaactccaattggaaaatctagtgacacaagtgaagttaagaggatccatgagtttcttcaaaagtggctaagcaagcatccacagtttttctccaaccctttttacgtcaccggagattcttactctggtatgattgttccggccctcgttcaagaaatctctaaaggaaattatatatgttgcaaacatcttataaatctacagggttacgtgctcggaaacccgataacatatgctgaacatgagaaaaactatcgtattccattttctcatggaatgtcattaatctctgatgaactctatgagtcactgaagagaaactgcaaaggaaattatgaaaatgtggatccacgtaacacaaaatgtgtgagacttgttgaagaataccataagtgcactgacaaaataaatacgcaacatatattaataccagattgcgataaaaaaggacatggaataacatctcctgattgctattattatctgtattttcttattgaatgttgggccaacaacgagagagttcgtgaagctcttcatgttactaaggggactaaaggacaatggcagcgatgtaattggactattccatacgataacaacatcataagcagcgtaccatatcatatggataacagcatcaatggatatcgatctcttatttacagtggtgatcatgacatcacaatgcctttccaagcaactcaagcctggataaaatctctaaattactccatcgttgatgactggaggccttggatgataaacgatcaaatcgctggatacacgagaacttattccaataagatgacatttgctactgtcaaaggaggtggacacacggcagagtatctaccaaacgagagttccatcatgttccaaaggtggatcagtggccaacctttgtaatagaaggcctcttttagaggcttattgcctgtacgtattacatatattaatattcacgctacgcgcaattcttttgttttgagatgtttacagaaaataggataaaaagtttgtccttg

SEQ ID NO: 22296 - protein, 321 aa, Arabidopsis thaliana
  peptide (1)..(321): Ceres Seq. ID no. 12335093
  misc_feature (1)..(318): Pfam Name: Serine carboxypeptidase Pfam Description: Serine carboxypeptidase
  misc_feature (1)..(321): Homolog of NCBI NO: 8777303 NR Description: serine carboxypeptidase [Arabidopsis thaliana]
  misc_feature (1)..(321): Homolog of NCBI NO: 15219429 NR Description: putative serine carboxypeptidase; protein id:
  misc_feature (1)..(321): Homolog of NCBI NO: 15219433 NR Description: putative serine carboxypeptidase; protein id:
  misc_feature (1)..(321): Homolog of NCBI NO: 15228300 NR Description: putative glucose acyltransferase; protein id:
  misc_feature (1)..(321): Homolog of NCBI NO: 15227769 NR Description: putative serine carboxypeptidase II
  misc_feature (1)..(321): Homolog of NCBI NO: 15227765 NR Description: putative serine carboxypeptidase I; protein id:
  misc_feature (1)..(302): Homolog of NCBI NO: 30681910 NR Description: serine carboxypeptidase -related [Arabidopsis
  misc_feature (1)..(321): Homolog of NCBI NO: 15227773 NR Description: putative serine carboxypeptidase I; protein id:
  misc_feature (1)..(321): Homolog of NCBI NO: 18400137 NR Description: putative serine carboxypeptidase I; protein id:
  misc_feature (1)..(321): Homolog of NCBI NO: 15227772 NR Description: putative serine carboxypeptidase I
MANIIYLDQPVGSGFSYSRTPIGKSSDTSEVKRIHEFLQKWLSKHPQFFSNPFYVTGDSYSGMIVPALVQEISKGNYICCKHLINLQGYVLGNPITYAEHEKNYRIPFSHGMSLISDELYESLKRNCKGNYENVDPRNTKCVRLVEEYHKCTDKINTQHILIPDCDKKGHGITSPDCYYYLYFLIECWANNERVREALHVTKGTKGQWQRCNWTIPYDNNIISSVPYHMDNSINGYRSLIYSGDHDITMPFQATQAWIKSLNYSIVDDWRPWMINDQIAGYTRTYSNKMTFATVKGGGHTAEYLPNESSIMFQRWISGQPL

SEQ ID NO: 22297 - protein, 259 aa, Arabidopsis thaliana
  peptide (1)..(259): Ceres Seq. ID no. 12335094
  misc_feature (1)..(256): Pfam Name: Serine carboxypeptidase Pfam Description: Serine carboxypeptidase
  misc_feature (1)..(259): Homolog of NCBI NO: 8777303 NR Description: serine carboxypeptidase [Arabidopsis thaliana]
  misc_feature (1)..(259): Homolog of NCBI NO: 15219429 NR Description: putative serine carboxypeptidase; protein id:
  misc_feature (1)..(259): Homolog of NCBI NO: 15219433 NR Description: putative serine carboxypeptidase; protein id:
  misc_feature (1)..(259): Homolog of NCBI NO: 15228300 NR Description: putative glucose acyltransferase; protein id:
  misc_feature (1)..(259): Homolog of NCBI NO: 15227769 NR Description: putative serine carboxypeptidase II
  misc_feature (1)..(259): Homolog of NCBI NO: 15227765 NR Description: putative serine carboxypeptidase I; protein id:
  misc_feature (1)..(240): Homolog of NCBI NO: 30681910 NR Description: serine carboxypeptidase -related [Arabidopsis
  misc_feature (1)..(259): Homolog of NCBI NO: 15227773 NR Description: putative serine carboxypeptidase I; protein id:
  misc_feature (1)..(259): Homolog of NCBI NO: 18400137 NR Description: putative serine carboxypeptidase I; protein id:
  misc_feature (1)..(259): Homolog of NCBI NO: 15227772 NR Description: putative serine carboxypeptidase I
MIVPALVQEISKGNYICCKHLINLQGYVLGNPITYAEHEKNYRIPFSHGMSLISDELYESLKRNCKGNYENVDPRNTKCVRLVEEYHKCTDKINTQHILIPDCDKKGHGITSPDCYYYLYFLIECWANNERVREALHVTKGTKGQWQRCNWTIPYDNNIISSVPYHMDNSINGYRSLIYSGDHDITMPFQATQAWIKSLNYSIVDDWRPWMINDQIAGYTRTYSNKMTFATVKGGGHTAEYLPNESSIMFQRWISGQPL

SEQ ID NO: 22298 - protein, 210 aa, Arabidopsis thaliana
  peptide (1)..(210): Ceres Seq. ID no. 12335095
  misc_feature (1)..(207): Pfam Name: Serine carboxypeptidase Pfam Description: Serine carboxypeptidase
  misc_feature (1)..(210): Homolog of NCBI NO: 8777303 NR Description: serine carboxypeptidase [Arabidopsis thaliana]
  misc_feature (1)..(210): Homolog of NCBI NO: 15219429 NR Description: putative serine carboxypeptidase; protein id:
  misc_feature (1)..(210): Homolog of NCBI NO: 15219433 NR Description: putative serine carboxypeptidase; protein id:
  misc_feature (1)..(210): Homolog of NCBI NO: 15228300 NR Description: putative glucose acyltransferase; protein id:
  misc_feature (1)..(210): Homolog of NCBI NO: 15227769 NR Description: putative serine carboxypeptidase II
  misc_feature (1)..(210): Homolog of NCBI NO: 15227765 NR Description: putative serine carboxypeptidase I; protein id:
  misc_feature (1)..(191): Homolog of NCBI NO: 30681910 NR Description: serine carboxypeptidase -related [Arabidopsis
  misc_feature (1)..(210): Homolog of NCBI NO: 15227773 NR Description: putative serine carboxypeptidase I; protein id:
  misc_feature (1)..(210): Homolog of NCBI NO: 18400137 NR Description: putative serine carboxypeptidase I; protein id:
  misc_feature (1)..(210): Homolog of NCBI NO: 15227772 NR Description: putative serine carboxypeptidase I
MSLISDELYESLKRNCKGNYENVDPRNTKCVRLVEEYHKCTDKINTQHILIPDCDKKGHGITSPDCYYYLYFLIECWANNERVREALHVTKGTKGQWQRCNWTIPYDNNIISSVPYHMDNSINGYRSLIYSGDHDITMPFQATQAWIKSLNYSIVDDWRPWMINDQIAGYTRTYSNKMTFATVKGGGHTAEYLPNESSIMFQRWISGQPL

SEQ ID NO: 22299 - DNA, 1314 bp, Arabidopsis thaliana
  misc_feature (1)..(1314): Ceres Seq. ID no. 12483444
  misc_feature: MA Experiment ID: 108461 Result: Up-regulated in Transcription
  misc_feature: MA Experiment 108461 PARAMETER Experiment Name: At_Germinating_Seeds_cDNA_P Parameter: Age (day) Value: 1 vs. 0
  misc_feature: MA Experiment 108461 PARAMETER Experiment Name: At_Germinating_Seeds_cDNA_P Parameter: Tissue Value: Germinating Seeds
  misc_feature: MA Experiment ID: 108462 Result: Up-regulated in Transcription
  misc_feature: MA Experiment 108462 PARAMETER Experiment Name: At_Germinating_Seeds_cDNA_P Parameter: Age (day) Value: 2 vs. 0
  misc_feature: MA Experiment 108462 PARAMETER Experiment Name: At_Germinating_Seeds_cDNA_P Parameter: Tissue Value: Germinating Seeds
  misc_feature: MA Experiment ID: 108463 Result: Up-regulated in Transcription
  misc_feature: MA Experiment 108463 PARAMETER Experiment Name: At_Germinating_Seeds_cDNA_P Parameter: Age (day) Value: 3 vs. 0
  misc_feature: MA Experiment 108463 PARAMETER Experiment Name: At_Germinating_Seeds_cDNA_P Parameter: Tissue Value: Germinating Seeds
  misc_feature: MA Experiment ID: 108464 Result: Up-regulated in Transcription
  misc_feature: MA Experiment 108464 PARAMETER Experiment Name: At_Germinating_Seeds_cDNA_P Parameter: Age (day) Value: 4 vs. 0
  misc_feature: MA Experiment 108464 PARAMETER Experiment Name: At_Germinating_Seeds_cDNA_P Parameter: Tissue Value: Germinating Seeds
  misc_feature: MA Experiment ID: 108488 Result: Up-regulated in Transcription
  misc_feature: MA Experiment ID: 108577 Result: Down-regulated in Transcription
  misc_feature: MA Experiment 108577 PARAMETER Experiment Name: At_42deg_Heat_cDNA_P Parameter: Temperature (deg C) Value: 42 vs. 22
  misc_feature: MA Experiment 108577 PARAMETER Experiment Name: At_42deg_Heat_cDNA_P Parameter: Timepoint (hr) Value: 6
  misc_feature: MA Experiment 108577 PARAMETER Experiment Name: At_42deg_Heat_cDNA_P Parameter: Tissue Value: Aerial
  misc_feature: MA Experiment ID: 108594 Result: Down-regulated in Transcription
  misc_feature: MA Experiment 108594 PARAMETER Experiment Name: At_Ler-rhl_Root_cDNA_P Parameter: Plant Line Value: null
  misc_feature: MA Experiment ID: 108609 Result: Up-regulated in Transcription
  misc_feature: MA Experiment 108609 PARAMETER Experiment Name: At_100uM_ABA_cDNA_P Parameter: Timepoint (hr) Value: 24
  misc_feature: MA Experiment 108609 PARAMETER Experiment Name: At_100uM_ABA_cDNA_P Parameter: Tissue Value: Aerial
  misc_feature: MA Experiment 108609 PARAMETER Experiment Name: At_100uM_ABA_cDNA_P Parameter: Treatment Value: 100uM ABA vs. No Treatment
  misc_feature: MA Experiment ID: 20000070 Result: Up-regulated in Transcription
  misc_feature: MA Experiment 20000070 PARAMETER Experiment Name: At_100uM_ABA_Mutants_cDNA_P Parameter: Plant Line Value: CS24
  misc_feature: MA Experiment 20000070 PARAMETER Experiment Name: At_100uM_ABA_Mutants_cDNA_P Parameter: Timepoint (hr) Value: 6
  misc_feature: MA Experiment 20000070 PARAMETER Experiment Name: At_100uM_ABA_Mutants_cDNA_P Parameter: Tissue Value: Aerial
  misc_feature: MA Experiment 20000070 PARAMETER Experiment Name: At_100uM_ABA_Mutants_cDNA_P Parameter: Treatment Value: 100uM ABA vs. No Treatment
  misc_feature: MA Experiment ID: 20000112 Result: Down-regulated in Transcription
  misc_feature: MA Experiment 20000112 PARAMETER Experiment Name: At_42deg_Heat_cDNA_P Parameter: Temperature (deg C) Value: 42 vs. 22
  misc_feature: MA Experiment 20000112 PARAMETER Experiment Name: At_42deg_Heat_cDNA_P Parameter: Timepoint (hr) Value: 2
  misc_feature: MA Experiment 20000112 PARAMETER Experiment Name: At_42deg_Heat_cDNA_P Parameter: Tissue Value: Aerial
  misc_feature: MA Experiment ID: 20000113 Result: Down-regulated in Transcription
  misc_feature: MA Experiment 20000113 PARAMETER Experiment Name: At_42deg_Heat_cDNA_P Parameter: Temperature (deg C) Value: 42 vs. 22
  misc_feature: MA Experiment 20000113 PARAMETER Experiment Name: At_42deg_Heat_cDNA_P Parameter: Timepoint (hr) Value: 8
  misc_feature: MA Experiment 20000113 PARAMETER Experiment Name: At_42deg_Heat_cDNA_P Parameter: Tissue Value: Aerial
  misc_feature: MA Experiment ID: 20000173 Result: Down-regulated in Transcription
  misc_feature: MA Experiment 20000173 PARAMETER Experiment Name: At_42deg_Heat_P Parameter: Age (day) Value: 14
  misc_feature: MA Experiment 20000173 PARAMETER Experiment Name: At_42deg_Heat_P Parameter: Organism Value: A. thaliana
  misc_feature: MA Experiment 20000173 PARAMETER Experiment Name: At_42deg_Heat_P Parameter: Plant Line Value: WS
  misc_feature: MA Experiment 20000173 PARAMETER Experiment Name: At_42deg_Heat_P Parameter: Temperature (deg C) Value: 42 vs. 22
  misc_feature: MA Experiment 20000173 PARAMETER Experiment Name: At_42deg_Heat_P Parameter: Timepoint (hr) Value: 6
  misc_feature: MA Experiment 20000173 PARAMETER Experiment Name: At_42deg_Heat_P Parameter: Tissue Value: Aerial
  misc_feature: MA Experiment ID: 20000180 Result: Up-regulated in Transcription
  misc_feature: MA Experiment 20000180 PARAMETER Experiment Name: At_Germinating_Seeds_P Parameter: Age (hr) Value: 24 vs. 0
  misc_feature: MA Experiment 20000180 PARAMETER Experiment Name: At_Germinating_Seeds_P Parameter: Tissue Value: Germinating Seeds
  misc_feature: MA Experiment ID: 20000224 Result: Up-regulated in Transcription
  misc_feature: MA Experiment ID: 20000264 Result: Down-regulated in Transcription
  misc_feature: MA Experiment 20000264 PARAMETER Experiment Name: At_Open_Flower_P Parameter: Age (day) Value: 21
  misc_feature: MA Experiment 20000264 PARAMETER Experiment Name: At_Open_Flower_P Parameter: Plant Line Value: WS
  misc_feature: MA Experiment 20000264 PARAMETER Experiment Name: At_Open_Flower_P Parameter: Tissue Value: Open Flower vs. Whole Plant
  misc_feature: MA Experiment ID: 20000265 Result: Down-regulated in Transcription
  misc_feature: MA Experiment 20000265 PARAMETER Experiment Name: At_Open_Flower_P Parameter: Age (day) Value: 21
  misc_feature: MA Experiment 20000265 PARAMETER Experiment Name: At_Open_Flower_P Parameter: Plant Line Value: WS
  misc_feature: MA Experiment 20000265 PARAMETER Experiment Name: At_Open_Flower_P Parameter: Tissue Value: Closed Flower vs. Whole Plant
  misc_feature: MA Experiment ID: 20000286 Result: Down-regulated in Transcription
  misc_feature: MA Experiment 20000286 PARAMETER Experiment Name: At_Open_Flower_P Parameter: Age (day) Value: 21
  misc_feature: MA Experiment 20000286 PARAMETER Experiment Name: At_Open_Flower_P Parameter: Plant Line Value: WS
  misc_feature: MA Experiment 20000286 PARAMETER Experiment Name: At_Open_Flower_P Parameter: Tissue Value: Half Open vs. Whole Plant
  misc_feature: MA Experiment ID: 20000452 Result: Up-regulated in Transcription
  misc_feature: MA Experiment 20000452 PARAMETER Experiment Name: At_CS6879_Shoots-Roots_P Parameter: Age (day) Value: 14
  misc_feature: MA Experiment 20000452 PARAMETER Experiment Name: At_CS6879_Shoots-Roots_P Parameter: Organism Value: A. thaliana
  misc_feature: MA Experiment 20000452 PARAMETER Experiment Name: At_CS6879_Shoots-Roots_P Parameter: Plant Line Value: CS6879 vs. WS
  misc_feature: MA Experiment 20000452 PARAMETER Experiment Name: At_CS6879_Shoots-Roots_P Parameter: Tissue Value: Shoots
  misc_feature: MA Experiment ID: 20000453 Result: Up-regulated in Transcription
  misc_feature: MA Experiment 20000453 PARAMETER Experiment Name: At_100uM_ABA_P Parameter: Age (day) Value: 15
  misc_feature: MA Experiment 20000453 PARAMETER Experiment Name: At_100uM_ABA_P Parameter: Organism Value: A. thaliana
  misc_feature: MA Experiment 20000453 PARAMETER Experiment Name: At_100uM_ABA_P Parameter: Plant Line Value: WS
  misc_feature: MA Experiment 20000453 PARAMETER Experiment Name: At_100uM_ABA_P Parameter: Timepoint (hr) Value: 24
  misc_feature: MA Experiment 20000453 PARAMETER Experiment Name: At_100uM_ABA_P Parameter: Tissue Value: Aerial
  misc_feature: MA Experiment 20000453 PARAMETER Experiment Name: At_100uM_ABA_P Parameter: Treatment Value: 100uM ABA vs. No Treatment
  misc_feature: MA Experiment ID: 20000527 Result: Down-regulated in Transcription
  misc_feature: MA Experiment 20000527 PARAMETER Experiment Name: At_10percent_PEG_P Parameter: Age (day) Value: 20
  misc_feature: MA Experiment 20000527 PARAMETER Experiment Name: At_10percent_PEG_P Parameter: Organism Value: A. thaliana
  misc_feature: MA Experiment 20000527 PARAMETER Experiment Name: At_10percent_PEG_P Parameter: Plant Line Value: WS
  misc_feature: MA Experiment 20000527 PARAMETER Experiment Name: At_10percent_PEG_P Parameter: Timepoint (day) Value: 20
  misc_feature: MA Experiment 20000527 PARAMETER Experiment Name: At_10percent_PEG_P Parameter: Tissue Value: Whole Plant
  misc_feature: MA Experiment 20000527 PARAMETER Experiment Name: At_10percent_PEG_P Parameter: Treatment Value: 10percent PEG vs. No Treatment
  misc_feature: MA Experiment ID: 20000794 Result: Down-regulated in Transcription
  misc_feature: MA Experiment 20000794 PARAMETER Experiment Name: At_Petals_P Parameter: Age (day) Value: 23-25 days
  misc_feature: MA Experiment 20000794 PARAMETER Experiment Name: At_Petals_P Parameter: Plant Line Value: WS
  misc_feature: MA Experiment 20000794 PARAMETER Experiment Name: At_Petals_P Parameter: Tissue Value: Petals vs. Whole plant
  misc_feature: MA Experiment ID: 20001451 Result: Down-regulated in Transcription
  misc_feature: MA Experiment 20001451 PARAMETER Experiment Name: At_Far-red-induction_P Parameter: Age (day) Value: 7
  misc_feature: MA Experiment 20001451 PARAMETER Experiment Name: At_Far-red-induction_P Parameter: Light Value: Far-red vs. White
  misc_feature: MA Experiment 20001451 PARAMETER Experiment Name: At_Far-red-induction_P Parameter: Organism Value: A. thaliana
  misc_feature: MA Experiment 20001451 PARAMETER Experiment Name: At_Far-red-induction_P Parameter: Plant Line Value: Columbia
  misc_feature: MA Experiment 20001451 PARAMETER Experiment Name: At_Far-red-induction_P Parameter: Timepoint (hr) Value: 24
  misc_feature: MA Experiment 20001451 PARAMETER Experiment Name: At_Far-red-induction_P Parameter: Tissue Value: Whole Plant
  misc_feature: MA Experiment ID: 20001557 Result: Down-regulated in Transcription
  misc_feature: MA Experiment 20001557 PARAMETER Experiment Name: At_Drought_Soil_Dry_P Parameter: Age (day) Value: 27
  misc_feature: MA Experiment 20001557 PARAMETER Experiment Name: At_Drought_Soil_Dry_P Parameter: Organism Value: A. thaliana
  misc_feature: MA Experiment 20001557 PARAMETER Experiment Name: At_Drought_Soil_Dry_P Parameter: Plant Line Value: WS
  misc_feature: MA Experiment 20001557 PARAMETER Experiment Name: At_Drought_Soil_Dry_P Parameter: Post Timepoint (hr) Value: 3
  misc_feature: MA Experiment 20001557 PARAMETER Experiment Name: At_Drought_Soil_Dry_P Parameter: Post-Treatment Value: Re-Water vs. No Drought
  misc_feature: MA Experiment 20001557 PARAMETER Experiment Name: At_Drought_Soil_Dry_P Parameter: Timepoint (day) Value: 13
  misc_feature: MA Experiment 20001557 PARAMETER Experiment Name: At_Drought_Soil_Dry_P Parameter: Treatment Value: Drought vs. No Drought
  misc_feature: MA Experiment ID: 20001558 Result: Down-regulated in Transcription
  misc_feature: MA Experiment 20001558 PARAMETER Experiment Name: At_Drought_Soil_Dry_P Parameter: Age (day) Value: 27
  misc_feature: MA Experiment 20001558 PARAMETER Experiment Name: At_Drought_Soil_Dry_P Parameter: Organism Value: A. thaliana
  misc_feature: MA Experiment 20001558 PARAMETER Experiment Name: At_Drought_Soil_Dry_P Parameter: Plant Line Value: WS
  misc_feature: MA Experiment 20001558 PARAMETER Experiment Name: At_Drought_Soil_Dry_P Parameter: Post Timepoint (hr) Value: 6
  misc_feature: MA Experiment 20001558 PARAMETER Experiment Name: At_Drought_Soil_Dry_P Parameter: Post-Treatment Value: Re-Water vs. No Drought
  misc_feature: MA Experiment 20001558 PARAMETER Experiment Name: At_Drought_Soil_Dry_P Parameter: Timepoint (day) Value: 13
  misc_feature: MA Experiment 20001558 PARAMETER Experiment Name: At_Drought_Soil_Dry_P Parameter: Treatment Value: Drought vs. No Drought
  misc_feature: MA Experiment ID: 20001560 Result: Down-regulated in Transcription
  misc_feature: MA Experiment 20001560 PARAMETER Experiment Name: At_Drought_Soil_Dry_P Parameter: Age (day) Value: 28
  misc_feature: MA Experiment 20001560 PARAMETER Experiment Name: At_Drought_Soil_Dry_P Parameter: Organism Value: A. thaliana
  misc_feature: MA Experiment 20001560 PARAMETER Experiment Name: At_Drought_Soil_Dry_P Parameter: Plant Line Value: WS
  misc_feature: MA Experiment 20001560 PARAMETER Experiment Name: At_Drought_Soil_Dry_P Parameter: Post Timepoint (hr) Value: None
  misc_feature: MA Experiment 20001560 PARAMETER Experiment Name: At_Drought_Soil_Dry_P Parameter: Post-Treatment Value: None
  misc_feature: MA Experiment 20001560 PARAMETER Experiment Name: At_Drought_Soil_Dry_P Parameter: Timepoint (day) Value: 14
  misc_feature: MA Experiment 20001560 PARAMETER Experiment Name: At_Drought_Soil_Dry_P Parameter: Treatment Value: Drought vs. No Drought
  misc_feature: MA Experiment ID: 20001904 Result: Down-regulated in Transcription
  misc_feature: MA Experiment 20001904 PARAMETER Experiment Name: At_Drought_Reproduction_P Parameter: Age (day) Value: 37
  misc_feature: MA Experiment 20001904 PARAMETER Experiment Name: At_Drought_Reproduction_P Parameter: Organism Value: A. thaliana
  misc_feature: MA Experiment 20001904 PARAMETER Experiment Name: At_Drought_Reproduction_P Parameter: Plant Line Value: WS
  misc_feature: MA Experiment 20001904 PARAMETER Experiment Name: At_Drought_Reproduction_P Parameter: Timepoint (day) Value: 7
  misc_feature: MA Experiment 20001904 PARAMETER Experiment Name: At_Drought_Reproduction_P Parameter: Tissue Value: Rosettes
  misc_feature: MA Experiment 20001904 PARAMETER Experiment Name: At_Drought_Reproduction_P Parameter: Treatment Value: Drought vs. No Drought
  misc_feature: MA Experiment ID: 20001905 Result: Down-regulated in Transcription
  misc_feature: MA Experiment 20001905 PARAMETER Experiment Name: At_Drought_Reproduction_P Parameter: Age (day) Value: 40
  misc_feature: MA Experiment 20001905 PARAMETER Experiment Name: At_Drought_Reproduction_P Parameter: Organism Value: A. thaliana
  misc_feature: MA Experiment 20001905 PARAMETER Experiment Name: At_Drought_Reproduction_P Parameter: Plant Line Value: WS
  misc_feature: MA Experiment 20001905 PARAMETER Experiment Name: At_Drought_Reproduction_P Parameter: Timepoint (day) Value: 10
  misc_feature: MA Experiment 20001905 PARAMETER Experiment Name: At_Drought_Reproduction_P Parameter: Tissue Value: Rosettes
  misc_feature: MA Experiment 20001905 PARAMETER Experiment Name: At_Drought_Reproduction_P Parameter: Treatment Value: Drought vs. No Drought
aaaactcaagagtggtgtagtgagagaagaaagatagagaaaaaaaatgggaggcaaaggtgtgatgatggtggcgatacttttcctttgggcactctctgcaacatctgaagcagtaacagagactgagccaggtttgatgatgaacttctacaaggacacgtgtcctcaggccgaagacatcatccgtgaacaagtcaaactcctctacaaacgccacaagaacaccgctttctcttggctccgtaacatcttccatgactgcgccgttgagtcatgtgatgcgtcgcttttgctggattcgacaagaagagagctaggagagaaagaacacgacaggagcttcggacttagaaactttaggtacatcgaggagatcaaggaagctctcgagagggagtgtcctggtgttgtctcatgttctgacattctcgtcttgtccgcaagagaaggcatcgaagcagtaggaggaccttatattcctttgaagacaggaaggagagatggacttaaaagcaggacggatatgctcgagtcatatcttcccgaccacaacgagagtatctccgtcgttcttgaaaagttcaaatccatcggtatcgacactcccggcctcgtcgccctcctagggtcacacagcgtgggaagaactcactgtgtcaagctggtccatcgtttgtaccctgaggtggacccgtccttaaacccggaccacgtccctcacatgctacacaagtgtcctgactcgatccctgacccaaaggcggtccagtacgtgcgtaacgaccgtggcacccccatggtgctagacaacaattactaccgtaacatcctagacaacaagggtttgctccttgtggaccatcagctcgcacacgacaaacgaaccagaccaatcgttaagaagatggctaaggaccaggcctacttcttcaaggagttcactagggcaatccagatcttatccgagaacaaccccttgactggctctaagggtgagatcaggaagcaatgtaatctcgcaaacaagaaccattgaagttggaaaaagtgagaaagacaggggctctggtgtgttgagttctctgcttggtacgaaccaagatgaataaaaaatcttttaagttaaatcaaagaaagggtgatgatgaatacatcatggtagtgaccacctccttcttttgtgtgttcagccttaatgctttaattatgatgttagtggctttgagttatttaatctaaatgttggctcttcgttgattttgggtttgtggtggggatgatataatgataatggaaaggatgtatgatatg

SEQ ID NO: 22300 - protein, 330 aa, Arabidopsis thaliana
  peptide (1)..(330): Ceres Seq. ID no. 12483445
  misc_feature (1)..(330): Homolog of NCBI NO: 7433087 NR Description: peroxidase (EC 1.11.1.7) - upland cotton
  misc_feature (8)..(330): Homolog of NCBI NO: 7433096 NR Description: peroxidase (EC 1.11.1.7) prxr1 - Arabidopsis
  misc_feature (1)..(330): Homolog of NCBI NO: 18415810 NR Description: peroxidase, putative
  misc_feature (1)..(330): Homolog of NCBI NO: 1403136 NR Description: peroxidase ATP1a [Arabidopsis thaliana]
MGGKGVMMVAILFLWALSATSEAVTETEPGLMMNFYKDTCPQAEDIIREQVKLLYKRHKNTAFSWLRNIFHDCAVESCDASLLLDSTRRELGEKEHDRSFGLRNFRYIEEIKEALERECPGVVSCSDILVLSAREGIEAVGGPYIPLKTGRRDGLKSRTDMLESYLPDHNESISVVLEKFKSIGIDTPGLVALLGSHSVGRTHCVKLVHRLYPEVDPSLNPDHVPHMLHKCPDSIPDPKAVQYVRNDRGTPMVLDNNYYRNILDNKGLLLVDHQLAHDKRTRPIVKKMAKDQAYFFKEFTRAIQILSENNPLTGSKGEIRKQCNLANKNH

SEQ ID NO: 22301 - protein, 324 aa, Arabidopsis thaliana
  peptide (1)..(324): Ceres Seq. ID no. 12483446
  misc_feature (1)..(324): Homolog of NCBI NO: 7433087 NR Description: peroxidase (EC 1.11.1.7) - upland cotton
  misc_feature (2)..(324): Homolog of NCBI NO: 7433096 NR Description: peroxidase (EC 1.11.1.7) prxr1 - Arabidopsis
  misc_feature (1)..(324): Homolog of NCBI NO: 18415810 NR Description: peroxidase, putative
  misc_feature (1)..(324): Homolog of NCBI NO: 1403136 NR Description: peroxidase ATP1a [Arabidopsis thaliana]
MMVAILFLWALSATSEAVTETEPGLMMNFYKDTCPQAEDIIREQVKLLYKRHKNTAFSWLRNIFHDCAVESCDASLLLDSTRRELGEKEHDRSFGLRNFRYIEEIKEALERECPGVVSCSDILVLSAREGIEAVGGPYIPLKTGRRDGLKSRTDMLESYLPDHNESISVVLEKFKSIGIDTPGLVALLGSHSVGRTHCVKLVHRLYPEVDPSLNPDHVPHMLHKCPDSIPDPKAVQYVRNDRGTPMVLDNNYYRNILDNKGLLLVDHQLAHDKRTRPIVKKMAKDQAYFFKEFTRAIQILSENNPLTGSKGEIRKQCNLANKNH

SEQ ID NO: 22302 - protein, 323 aa, Arabidopsis thaliana
  peptide (1)..(323): Ceres Seq. ID no. 12483447
  misc_feature (1)..(323): Homolog of NCBI NO: 7433087 NR Description: peroxidase (EC 1.11.1.7) - upland cotton
  misc_feature (1)..(323): Homolog of NCBI NO: 7433096 NR Description: peroxidase (EC 1.11.1.7) prxr1 - Arabidopsis
  misc_feature (1)..(323): Homolog of NCBI NO: 18415810 NR Description: peroxidase, putative
  misc_feature (1)..(323): Homolog of NCBI NO: 1403136 NR Description: peroxidase ATP1a [Arabidopsis thaliana]
MVAILFLWALSATSEAVTETEPGLMMNFYKDTCPQAEDIIREQVKLLYKRHKNTAFSWLRNIFHDCAVESCDASLLLDSTRRELGEKEHDRSFGLRNFRYIEEIKEALERECPGVVSCSDILVLSAREGIEAVGGPYIPLKTGRRDGLKSRTDMLESYLPDHNESISVVLEKFKSIGIDTPGLVALLGSHSVGRTHCVKLVHRLYPEVDPSLNPDHVPHMLHKCPDSIPDPKAVQYVRNDRGTPMVLDNNYYRNILDNKGLLLVDHQLAHDKRTRPIVKKMAKDQAYFFKEFTRAIQILSENNPLTGSKGEIRKQCNLANKNH

SEQ ID NO: 22303 - DNA, 686 bp, Arabidopsis thaliana
  misc_feature (1)..(686): Ceres Seq. ID no. 12420878
  misc_feature: MA Experiment ID: 108462 Result: Down-regulated in Transcription
  misc_feature: MA Experiment 108462 PARAMETER Experiment Name: At_Germinating_Seeds_cDNA_P Parameter: Age (day) Value: 2 vs. 0
  misc_feature: MA Experiment 108462 PARAMETER Experiment Name: At_Germinating_Seeds_cDNA_P Parameter: Tissue Value: Germinating Seeds
  misc_feature: MA Experiment ID: 108488 Result: Down-regulated in Transcription
aagcatttccccttttagagaagagagctgtgttggtttttgaggtaaaagaagagacccaatttcgatttggaggatagagacgaagaagaagacagctccgatggctgatcctgaactagaagctattagacagaggagaatgcaagagctcatggctcgacaaggcatgggtaagcagggcaatcagcagaatccagagcaagagaaacagcaggaagatgctaaaagggaagctgatgaacgtaggcaaatgatgcttagtcaagtattgtcttctcaagcccgagagagaattgctcgaattgctctggtgaaacctgagaaagctagaggtgtggaggatgttattttgagggctgctcagatgggacagatagttgagaaggtttctgaggaacggcttataacactgttggaacaaataaacagccaaactaccaagcaaacgaaagtcacgtaccaacggcgccgtggggtggacgacgattaggaaggaagaagaatattatgatgtgctttgtatatctatggagatctcactgttatgttagtgagttcacttaagatctacttaaatgtttctgttcaatatgtttattgtgagtgaatcttgattatcttccaaacacttgggatgagattaaagcaatctgaaactgaagctctacatttttatttttggc

SEQ ID NO: 22304 - protein, 129 aa, Arabidopsis thaliana
  peptide (1)..(129): Ceres Seq. ID no. 12420879
  misc_feature (9)..(122): Pfam Name: Double-stranded DNA-binding domain Pfam Description: Double-stranded DNA-binding domain
  misc_feature (3)..(129): Homolog of NCBI NO: 19114093 NR Description: conserved hypothetical protein
  misc_feature (1)..(129): Homolog of NCBI NO: 30584883 NR Description: Homo sapiens programmed cell death 5 [synthetic
  misc_feature (1)..(129): Homolog of NCBI NO: 4759224 NR Description: programmed cell death 5
  misc_feature (1)..(129): Homolog of NCBI NO: 27731143 NR Description: similar to programmed cell death 5
  misc_feature (1)..(129): Homolog of NCBI NO: 9790259 NR Description: programmed cell death 5 [Mus musculus]
  misc_feature (1)..(129): Homolog of NCBI NO: 28279764 NR Description: Similar to programmed cell death 5 [Danio rerio]
  misc_feature (1)..(129): Homolog of NCBI NO: 32966259 NR Description: apoptosis-related protein [Oryza sativa (indica
  misc_feature (1)..(129): Homolog of NCBI NO: 30690937 NR Description: putative apoptosis-related protein 19
  misc_feature (1)..(129): Homolog of NCBI NO: 21592844 NR Description: unknown [Arabidopsis thaliana]
  misc_feature (1)..(129): Homolog of NCBI NO: 18397268 NR Description: expressed protein
MADPELEAIRQRRMQELMARQGMGKQGNQQNPEQEKQQEDAKREADERRQMMLSQVLSSQARERIARIALVKPEKARGVEDVILRAAQMGQIVEKVSEERLITLLEQINSQTTKQTKVTYQRRRGVDDD

SEQ ID NO: 22305 - protein, 116 aa, Arabidopsis thaliana
  peptide (1)..(116): Ceres Seq. ID no. 12420880
  misc_feature (1)..(109): Pfam Name: Double-stranded DNA-binding domain Pfam Description: Double-stranded DNA-binding domain
  misc_feature (1)..(116): Homolog of NCBI NO: 19114093 NR Description: conserved hypothetical protein
  misc_feature (1)..(116): Homolog of NCBI NO: 30584883 NR Description: Homo sapiens programmed cell death 5 [synthetic
  misc_feature (1)..(116): Homolog of NCBI NO: 4759224 NR Description: programmed cell death 5
  misc_feature (1)..(116): Homolog of NCBI NO: 27731143 NR Description: similar to programmed cell death 5
  misc_feature (1)..(116): Homolog of NCBI NO: 9790259 NR Description: programmed cell death 5 [Mus musculus]
  misc_feature (1)..(116): Homolog of NCBI NO: 28279764 NR Description: Similar to programmed cell death 5 [Danio rerio]
  misc_feature (1)..(116): Homolog of NCBI NO: 32966259 NR Description: apoptosis-related protein [Oryza sativa (indica
  misc_feature (1)..(116): Homolog of NCBI NO: 30690937 NR Description: putative apoptosis-related protein 19
  misc_feature (1)..(116): Homolog of NCBI NO: 21592844 NR Description: unknown [Arabidopsis thaliana]
  misc_feature (1)..(116): Homolog of NCBI NO: 18397268 NR Description: expressed protein
MQELMARQGMGKQGNQQNPEQEKQQEDAKREADERRQMMLSQVLSSQARERIARIALVKPEKARGVEDVILRAAQMGQIVEKVSEERLITLLEQINSQTTKQTKVTYQRRRGVDDD

SEQ ID NO: 22306 - protein, 112 aa, Arabidopsis thaliana
  peptide (1)..(112): Ceres Seq. ID no. 12420881
  misc_feature (1)..(105): Pfam Name: Double-stranded DNA-binding domain Pfam Description: Double-stranded DNA-binding domain
  misc_feature (1)..(112): Homolog of NCBI NO: 19114093 NR Description: conserved hypothetical protein
  misc_feature (1)..(112): Homolog of NCBI NO: 30584883 NR Description: Homo sapiens programmed cell death 5 [synthetic
  misc_feature (1)..(112): Homolog of NCBI NO: 4759224 NR Description: programmed cell death 5
  misc_feature (1)..(112): Homolog of NCBI NO: 27731143 NR Description: similar to programmed cell death 5
  misc_feature (1)..(112): Homolog of NCBI NO: 9790259 NR Description: programmed cell death 5 [Mus musculus]
  misc_feature (1)..(112): Homolog of NCBI NO: 28279764 NR Description: Similar to programmed cell death 5 [Danio rerio]
  misc_feature (1)..(112): Homolog of NCBI NO: 32966259 NR Description: apoptosis-related protein [Oryza sativa (indica
  misc_feature (1)..(112): Homolog of NCBI NO: 30690937 NR Description: putative apoptosis-related protein 19
  misc_feature (1)..(112): Homolog of NCBI NO: 21592844 NR Description: unknown [Arabidopsis thaliana]
  misc_feature (1)..(112): Homolog of NCBI NO: 18397268 NR Description: expressed protein
MARQGMGKQGNQQNPEQEKQQEDAKREADERRQMMLSQVLSSQARERIARIALVKPEKARGVEDVILRAAQMGQIVEKVSEERLITLLEQINSQTTKQTKVTYQRRRGVDDD

SEQ ID NO: 22307 - DNA, 852 bp, Arabidopsis thaliana
  misc_feature (1)..(852): Ceres Seq. ID no. 12334035
  misc_feature: MA Experiment ID: 108434 Result: Down-regulated in Transcription
  misc_feature: MA Experiment 108434 PARAMETER Experiment Name: At_Root_Tips_cDNA_P Parameter: Tissue Value: Root Tips
  misc_feature: MA Experiment ID: 108464 Result: Up-regulated in Transcription
  misc_feature: MA Experiment 108464 PARAMETER Experiment Name: At_Germinating_Seeds_cDNA_P Parameter: Age (day) Value: 4 vs. 0
  misc_feature: MA Experiment 108464 PARAMETER Experiment Name: At_Germinating_Seeds_cDNA_P Parameter: Tissue Value: Germinating Seeds
  misc_feature: MA Experiment ID: 20000112 Result: Up-regulated in Transcription
  misc_feature: MA Experiment 20000112 PARAMETER Experiment Name: At_42deg_Heat_cDNA_P Parameter: Temperature (deg C) Value: 42 vs. 22
  misc_feature: MA Experiment 20000112 PARAMETER Experiment Name: At_42deg_Heat_cDNA_P Parameter: Timepoint (hr) Value: 2
  misc_feature: MA Experiment 20000112 PARAMETER Experiment Name: At_42deg_Heat_cDNA_P Parameter: Tissue Value: Aerial
  misc_feature: MA Experiment ID: 20000180 Result: Up-regulated in Transcription
  misc_feature: MA Experiment 20000180 PARAMETER Experiment Name: At_Germinating_Seeds_P Parameter: Age (hr) Value: 24 vs. 0
  misc_feature: MA Experiment 20000180 PARAMETER Experiment Name: At_Germinating_Seeds_P Parameter: Tissue Value: Germinating Seeds
aaaacaactattttacatagtgattacattcatttcattgttgtttcttaccgcagtaacttttatcttaataaatttgatccaaccatgccaatatttacgggatcgtcctccgattctgaagacgaaagaacgattcataaaacaactaagctcttcactcgtcaacgatctattcactctatatttggaggtggtaaagttgcggatattctgttatggagagagccgaaaatagcagcaacattggtgataggagtgagcatcttatggttcttaatggaagtagtggaatacaatttcataaccctaatttgtcatgcttccatgacctccatgctttttttcttcatttggtctactgcttctgattttctcaattgggaaagaccaataataccagaagttgtactagacgaatcttctttcaaacaattagcaagaagcttccatgttagattcaaccaaatcctcacaaagcttcttgacgttgcttgtggaagagatcctcctctcttttttctcacaacgatctcgctttatatcgtatccatcatcgggacatatttcaactttatgaatcttctcttcatagggtttgtaatcatgcaaaccttaccggttatgtatgagatgtacgaggacgacgtggatacagcggcgggtaagttgatgaggaagatgaagaagctgtacaagaaagtcgatacgaatgttcttagtaaaatcccaagaggaactgtcaaaaacaagaaatttacttaattctgatcattctttacttatagagataatgtgtttgctactgtatttatgcgacctcatcaacccaaattaatatacatatctgct

SEQ ID NO: 22308 - protein, 254 aa, Arabidopsis thaliana
  peptide (1)..(254): Ceres Seq. ID no. 12334036
  misc_feature (34)..(246): Homolog of NCBI NO: 15222616 NR Description: hypothetical protein
  misc_feature (37)..(252): Homolog of NCBI NO: 15236556 NR Description: putative protein
  misc_feature (35)..(252): Homolog of NCBI NO: 30681227 NR Description: expressed protein [Arabidopsis thaliana]
  misc_feature (35)..(252): Homolog of NCBI NO: 18398810 NR Description: expressed protein
  misc_feature (48)..(252): Homolog of NCBI NO: 34904202 NR Description: P0492F05.25 [Oryza sativa (japonica
  misc_feature (37)..(252): Homolog of NCBI NO: 15237093 NR Description: putative protein
  misc_feature (34)..(251): Homolog of NCBI NO: 18406991 NR Description: expressed protein
  misc_feature (35)..(252): Homolog of NCBI NO: 34909318 NR Description: OSJNBb0021A09.5 [Oryza sativa (japonica
  misc_feature (30)..(254): Homolog of NCBI NO: 18401821 NR Description: expressed protein
  misc_feature (30)..(254): Homolog of NCBI NO: 21592845 NR Description: unknown [Arabidopsis thaliana]
KTTILHSDYIHFIVVSYRSNFYLNKFDPTMPIFTGSSSDSEDERTIHKTTKLFTRQRSIHSIFGGGKVADILLWREPKIAATLVIGVSILWFLMEVVEYNFITLICHASMTSMLFFFIWSTASDFLNWERPIIPEVVLDESSFKQLARSFHVRFNQILTKLLDVACGRDPPLFFLTTISLYIVSIIGTYFNFMNLLFIGFVIMQTLPVMYEMYEDDVDTAAGKLMRKMKKLYKKVDTNVLSKIPRGTVKNKKFT

SEQ ID NO: 22309 - protein, 225 aa, Arabidopsis thaliana
  peptide (1)..(225): Ceres Seq. ID no. 12334037
  misc_feature (1)..(225): Homolog of NCBI NO: 18401821 NR Description: expressed protein
  misc_feature (1)..(225): Homolog of NCBI NO: 21592845 NR Description: unknown [Arabidopsis thaliana]
  misc_feature (5)..(217): Homolog of NCBI NO: 15222616 NR Description: hypothetical protein
  misc_feature (8)..(223): Homolog of NCBI NO: 15236556 NR Description: putative protein
  misc_feature (6)..(223): Homolog of NCBI NO: 30681227 NR Description: expressed protein [Arabidopsis thaliana]
  misc_feature (6)..(223): Homolog of NCBI NO: 18398810 NR Description: expressed protein
  misc_feature (19)..(223): Homolog of NCBI NO: 34904202 NR Description: P0492F05.25 [Oryza sativa (japonica
  misc_feature (8)..(223): Homolog of NCBI NO: 15237093 NR Description: putative protein
  misc_feature (5)..(222): Homolog of NCBI NO: 18406991 NR Description: expressed protein
  misc_feature (6)..(223): Homolog of NCBI NO: 34909318 NR Description: OSJNBb0021A09.5 [Oryza sativa (japonica
MPIFTGSSSDSEDERTIHKTTKLFTRQRSIHSIFGGGKVADILLWREPKIAATLVIGVSILWFLMEVVEYNFITLICHASMTSMLFFFIWSTASDFLNWERPIIPEVVLDESSFKQLARSFHVRFNQILTKLLDVACGRDPPLFFLTTISLYIVSIIGTYFNFMNLLFIGFVIMQTLPVMYEMYEDDVDTAAGKLMRKMKKLYKKVDTNVLSKIPRGTVKNKKFT

SEQ ID NO: 22310 - protein, 161 aa, Arabidopsis thaliana
  peptide (1)..(161): Ceres Seq. ID no. 12334038
  misc_feature (1)..(153): Homolog of NCBI NO: 15222616 NR Description: hypothetical protein
  misc_feature (1)..(159): Homolog of NCBI NO: 15236556 NR Description: putative protein
  misc_feature (1)..(159): Homolog of NCBI NO: 30681227 NR Description: expressed protein [Arabidopsis thaliana]
  misc_feature (1)..(159): Homolog of NCBI NO: 18398810 NR Description: expressed protein
  misc_feature (1)..(159): Homolog of NCBI NO: 34904202 NR Description: P0492F05.25 [Oryza sativa (japonica
  misc_feature (1)..(159): Homolog of NCBI NO: 15237093 NR Description: putative protein
  misc_feature (1)..(158): Homolog of NCBI NO: 18406991 NR Description: expressed protein
  misc_feature (1)..(159): Homolog of NCBI NO: 34909318 NR Description: OSJNBb0021A09.5 [Oryza sativa (japonica
  misc_feature (1)..(161): Homolog of NCBI NO: 18401821 NR Description: expressed protein
  misc_feature (1)..(161): Homolog of NCBI NO: 21592845 NR Description: unknown [Arabidopsis thaliana]
MEVVEYNFITLICHASMTSMLFFFIWSTASDFLNWERPIIPEVVLDESSFKQLARSFHVRFNQILTKLLDVACGRDPPLFFLTTISLYIVSIIGTYFNFMNLLFIGFVIMQTLPVMYEMYEDDVDTAAGKLMRKMKKLYKKVDTNVLSKIPRGTVKNKKFT

SEQ ID NO: 22311 - DNA, 938 bp, Arabidopsis thaliana
  misc_feature (1)..(938): Ceres Seq. ID no. 12422723
  misc_feature: MA Experiment ID: 108434 Result: Down-regulated in Transcription
  misc_feature: MA Experiment 108434 PARAMETER Experiment Name: At_Root_Tips_cDNA_P Parameter: Tissue Value: Root Tips
  misc_feature: MA Experiment ID: 108462 Result: Up-regulated in Transcription
  misc_feature: MA Experiment 108462 PARAMETER Experiment Name: At_Germinating_Seeds_cDNA_P Parameter: Age (day) Value: 2 vs. 0
  misc_feature: MA Experiment 108462 PARAMETER Experiment Name: At_Germinating_Seeds_cDNA_P Parameter: Tissue Value: Germinating Seeds
  misc_feature: MA Experiment ID: 108463 Result: Up-regulated in Transcription
  misc_feature: MA Experiment 108463 PARAMETER Experiment Name: At_Germinating_Seeds_cDNA_P Parameter: Age (day) Value: 3 vs. 0
  misc_feature: MA Experiment 108463 PARAMETER Experiment Name: At_Germinating_Seeds_cDNA_P Parameter: Tissue Value: Germinating Seeds
  misc_feature: MA Experiment ID: 108464 Result: Up-regulated in Transcription
  misc_feature: MA Experiment 108464 PARAMETER Experiment Name: At_Germinating_Seeds_cDNA_P Parameter: Age (day) Value: 4 vs. 0
  misc_feature: MA Experiment 108464 PARAMETER Experiment Name: At_Germinating_Seeds_cDNA_P Parameter: Tissue Value: Germinating Seeds
  misc_feature: MA Experiment ID: 108595 Result: Up-regulated in Transcription
  misc_feature: MA Experiment 108595 PARAMETER Experiment Name: At_Ler-pi_Ovule_cDNA_P Parameter: Plant Line Value: null
  misc_feature: MA Experiment ID: 20000069 Result: Up-regulated in Transcription
  misc_feature: MA Experiment 20000069 PARAMETER Experiment Name: At_100uM_ABA_Mutants_cDNA_P Parameter: Plant Line Value: CS23
  misc_feature: MA Experiment 20000069 PARAMETER Experiment Name: At_100uM_ABA_Mutants_cDNA_P Parameter: Timepoint (hr) Value: 6
  misc_feature: MA Experiment 20000069 PARAMETER Experiment Name: At_100uM_ABA_Mutants_cDNA_P Parameter: Tissue Value: Aerial
  misc_feature: MA Experiment 20000069 PARAMETER Experiment Name: At_100uM_ABA_Mutants_cDNA_P Parameter: Treatment Value: 100uM ABA vs. No Treatment
  misc_feature: MA Experiment ID: 20000185 Result: Up-regulated in Transcription
  misc_feature: MA Experiment 20000185 PARAMETER Experiment Name: At_Roots__P Parameter: Age (day) Value: 7 vs. 21
  misc_feature: MA Experiment 20000185 PARAMETER Experiment Name: At_Roots__P Parameter: Organism Value: A. thaliana
  misc_feature: MA Experiment 20000185 PARAMETER Experiment Name: At_Roots__P Parameter: Tissue Value: Roots vs. Whole Plant
  misc_feature: MA Experiment ID: 20000264 Result: Down-regulated in Transcription
  misc_feature: MA Experiment 20000264 PARAMETER Experiment Name: At_Open_Flower_P Parameter: Age (day) Value: 21
  misc_feature: MA Experiment 20000264 PARAMETER Experiment Name: At_Open_Flower_P Parameter: Plant Line Value: WS
  misc_feature: MA Experiment 20000264 PARAMETER Experiment Name: At_Open_Flower_P Parameter: Tissue Value: Open Flower vs. Whole Plant
  misc_feature: MA Experiment ID: 20000265 Result: Down-regulated in Transcription
  misc_feature: MA Experiment 20000265 PARAMETER Experiment Name: At_Open_Flower_P Parameter: Age (day) Value: 21
  misc_feature: MA Experiment 20000265 PARAMETER Experiment Name: At_Open_Flower_P Parameter: Plant Line Value: WS
  misc_feature: MA Experiment 20000265 PARAMETER Experiment Name: At_Open_Flower_P Parameter: Tissue Value: Closed Flower vs. Whole Plant
  misc_feature: MA Experiment ID: 20000438 Result: Down-regulated in Transcription
  misc_feature: MA Experiment 20000438 PARAMETER Experiment Name: At_Shoots__P Parameter: Age (day) Value: 14
  misc_feature: MA Experiment 20000438 PARAMETER Experiment Name: At_Shoots__P Parameter: Tissue Value: Shoots vs. Whole Plant
  misc_feature: MA Experiment ID: 20000794 Result: Down-regulated in Transcription
  misc_feature: MA Experiment 20000794 PARAMETER Experiment Name: At_Petals_P Parameter: Age (day) Value: 23-25 days
  misc_feature: MA Experiment 20000794 PARAMETER Experiment Name: At_Petals_P Parameter: Plant Line Value: WS
  misc_feature: MA Experiment 20000794 PARAMETER Experiment Name: At_Petals_P Parameter: Tissue Value: Petals vs. Whole plant
  misc_feature: MA Experiment ID: 20001768 Result: Up-regulated in Transcription
  misc_feature: MA Experiment 20001768 PARAMETER Experiment Name: At_Far-red-enriched-adult_P Parameter: Age (day) Value: 28
  misc_feature: MA Experiment 20001768 PARAMETER Experiment Name: At_Far-red-enriched-adult_P Parameter: Light Value: Far-red enriched vs. White
  misc_feature: MA Experiment 20001768 PARAMETER Experiment Name: At_Far-red-enriched-adult_P Parameter: Organism Value: A. thaliana
  misc_feature: MA Experiment 20001768 PARAMETER Experiment Name: At_Far-red-enriched-adult_P Parameter: Plant Line Value: Columbia
  misc_feature: MA Experiment 20001768 PARAMETER Experiment Name: At_Far-red-enriched-adult_P Parameter: Timepoint (hr) Value: 1
  misc_feature: MA Experiment 20001768 PARAMETER Experiment Name: At_Far-red-enriched-adult_P Parameter: Tissue Value: Aerial
  misc_feature: MA Experiment ID: 20001911 Result: Up-regulated in Transcription
  misc_feature: MA Experiment 20001911 PARAMETER Experiment Name: At_Drought_Reproduction_P Parameter: Age (day) Value: 40
  misc_feature: MA Experiment 20001911 PARAMETER Experiment Name: At_Drought_Reproduction_P Parameter: Organism Value: A. thaliana
  misc_feature: MA Experiment 20001911 PARAMETER Experiment Name: At_Drought_Reproduction_P Parameter: Plant Line Value: WS
  misc_feature: MA Experiment 20001911 PARAMETER Experiment Name: At_Drought_Reproduction_P Parameter: Timepoint (day) Value: 10
  misc_feature: MA Experiment 20001911 PARAMETER Experiment Name: At_Drought_Reproduction_P Parameter: Tissue Value: Flowers
  misc_feature: MA Experiment 20001911 PARAMETER Experiment Name: At_Drought_Reproduction_P Parameter: Treatment Value: Drought vs. No Drought
atcacaccagattgtagtggatgatcggaaactaagacttcagtcatctgagactttacagtgtttgaggaacgaagattgtgagacacaatggctaaggatgaagccaagggattgctgaaaagtgaagagctctataaatatatactggagactagtgtgtacccacgcgagccagaggttctcagggagcttaggaacattactcataaccaccctcaagctggtatggctactgcaccagacgctggccagttgatggggatgctgctgaatctggtaaatgcaagaaagactatcgaggttggggttttcactggatactctcttctcctcactgctcttacgctaccagaagatggcaaggttatcgccattgacatgaatagagactcgtatgaaataggattgccggttataaagaaagctggtgttgaacacaaaattgatttcaaagagtctgaagctcttccagccctcgacgagcttttaaacaataaagtgaatgagggtggattcgacttcgcatttgtggatgcagacaagctgaattattggaactatcatgagaggcttattagattgatcaaggttggtgggatcatagtgtatgataacactctctggggaggatcagttgctgaaccggactcgtccacgcccgagtggaggatagaagtcaagaaagcaaccctcgagctgaacaagaaactctcggctgatcagcgtgtgcagatctcgcaagctgcgcttggcgatggtatcactatttgcaggaggttatattgagcgagtattgttgttctttgtgatctttagggtcatatgattgtgagccctttatattgagctattgtgatgcaagagtgttattgttctatgtgatattttggttcctgtgtgaatgtgaaccttttctatcaagtttgtggatttct

SEQ ID NO: 22312 - protein, 232 aa, Arabidopsis thaliana
  peptide (1)..(232): Ceres Seq. ID no. 12422724
  misc_feature (7)..(232): Homolog of NCBI NO: 30580387 NR Description: Caffeoyl-CoA O-methyltransferase
  misc_feature (7)..(231): Homolog of NCBI NO: 30580333 NR Description: Caffeoyl-CoA O-methyltransferase 1
  misc_feature (7)..(231): Homolog of NCBI NO: 30580332 NR Description: Caffeoyl-CoA O-methyltransferase
  misc_feature (7)..(231): Homolog of NCBI NO: 30580327 NR Description: Caffeoyl-CoA O-methyltransferase 3
  misc_feature (7)..(231): Homolog of NCBI NO: 3023436 NR Description: Caffeoyl-CoA O-methyltransferase
  misc_feature (7)..(231): Homolog of NCBI NO: 15235213 NR Description: caffeoyl-CoA 3-O-methyltransferase
  misc_feature (8)..(232): Homolog of NCBI NO: 37720881 NR Description: O-methyltransferase [Mesembryanthemum
  misc_feature (1)..(232): Homolog of NCBI NO: 7448239 NR Description: caffeoyl-CoA O-methyltransferase (EC 2.1.1.104)
  misc_feature (1)..(232): Homolog of NCBI NO: 21592850 NR Description: caffeoyl-CoA O-methyltransferase-like protein
  misc_feature (1)..(232): Homolog of NCBI NO: 18416703 NR Description: caffeoyl-CoA 3-O-methyltransferase, putative
MAKDEAKGLLKSEELYKYILETSVYPREPEVLRELRNITHNHPQAGMATAPDAGQLMGMLLNLVNARKTIEVGVFTGYSLLLTALTLPEDGKVIAIDMNRDSYEIGLPVIKKAGVEHKIDFKESEALPALDELLNNKVNEGGFDFAFVDADKLNYWNYHERLIRLIKVGGIIVYDNTLWGGSVAEPDSSTPEWRIEVKKATLELNKKLSADQRVQISQAALGDGITICRRLY

SEQ ID NO: 22313 - protein, 186 aa, Arabidopsis thaliana
  peptide (1)..(186): Ceres Seq. ID no. 12422725
  misc_feature (1)..(186): Homolog of NCBI NO: 30580387 NR Description: Caffeoyl-CoA O-methyltransferase
  misc_feature (1)..(185): Homolog of NCBI NO: 30580333 NR Description: Caffeoyl-CoA O-methyltransferase 1
  misc_feature (1)..(185): Homolog of NCBI NO: 30580332 NR Description: Caffeoyl-CoA O-methyltransferase
  misc_feature (1)..(185): Homolog of NCBI NO: 30580327 NR Description: Caffeoyl-CoA O-methyltransferase 3
  misc_feature (1)..(185): Homolog of NCBI NO: 3023436 NR Description: Caffeoyl-CoA O-methyltransferase
  misc_feature (1)..(185): Homolog of NCBI NO: 15235213 NR Description: caffeoyl-CoA 3-O-methyltransferase
  misc_feature (1)..(186): Homolog of NCBI NO: 37720881 NR Description: O-methyltransferase [Mesembryanthemum
  misc_feature (1)..(186): Homolog of NCBI NO: 7448239 NR Description: caffeoyl-CoA O-methyltransferase (EC 2.1.1.104)
  misc_feature (1)..(186): Homolog of NCBI NO: 21592850 NR Description: caffeoyl-CoA O-methyltransferase-like protein
  misc_feature (1)..(186): Homolog of NCBI NO: 18416703 NR Description: caffeoyl-CoA 3-O-methyltransferase, putative
MATAPDAGQLMGMLLNLVNARKTIEVGVFTGYSLLLTALTLPEDGKVIAIDMNRDSYEIGLPVIKKAGVEHKIDFKESEALPALDELLNNKVNEGGFDFAFVDADKLNYWNYHERLIRLIKVGGIIVYDNTLWGGSVAEPDSSTPEWRIEVKKATLELNKKLSADQRVQISQAALGDGITICRRLY

SEQ ID NO: 22314 - protein, 176 aa, Arabidopsis thaliana
  peptide (1)..(176): Ceres Seq. ID no. 12422726
  misc_feature (1)..(176): Homolog of NCBI NO: 30580387 NR Description: Caffeoyl-CoA O-methyltransferase
  misc_feature (1)..(175): Homolog of NCBI NO: 30580333 NR Description: Caffeoyl-CoA O-methyltransferase 1
  misc_feature (1)..(175): Homolog of NCBI NO: 30580332 NR Description: Caffeoyl-CoA O-methyltransferase
  misc_feature (1)..(175): Homolog of NCBI NO: 30580327 NR Description: Caffeoyl-CoA O-methyltransferase 3
  misc_feature (1)..(175): Homolog of NCBI NO: 3023436 NR Description: Caffeoyl-CoA O-methyltransferase
  misc_feature (1)..(175): Homolog of NCBI NO: 15235213 NR Description: caffeoyl-CoA 3-O-methyltransferase
  misc_feature (1)..(176): Homolog of NCBI NO: 37720881 NR Description: O-methyltransferase [Mesembryanthemum
  misc_feature (1)..(176): Homolog of NCBI NO: 7448239 NR Description: caffeoyl-CoA O-methyltransferase (EC 2.1.1.104)
  misc_feature (1)..(176): Homolog of NCBI NO: 21592850 NR Description: caffeoyl-CoA O-methyltransferase-like protein
  misc_feature (1)..(176): Homolog of NCBI NO: 18416703 NR Description: caffeoyl-CoA 3-O-methyltransferase, putative
MGMLLNLVNARKTIEVGVFTGYSLLLTALTLPEDGKVIAIDMNRDSYEIGLPVIKKAGVEHKIDFKESEALPALDELLNNKVNEGGFDFAFVDADKLNYWNYHERLIRLIKVGGIIVYDNTLWGGSVAEPDSSTPEWRIEVKKATLELNKKLSADQRVQISQAALGDGITICRRLY

SEQ ID NO: 22315 - DNA, 1120 bp, Arabidopsis thaliana
  misc_feature (1)..(1120): Ceres Seq. ID no. 12322828
  misc_feature: MA Experiment ID: 108434 Result: Down-regulated in Transcription
  misc_feature: MA Experiment 108434 PARAMETER Experiment Name: At_Root_Tips_cDNA_P Parameter: Tissue Value: Root Tips
  misc_feature: MA Experiment ID: 108462 Result: Up-regulated in Transcription
  misc_feature: MA Experiment 108462 PARAMETER Experiment Name: At_Germinating_Seeds_cDNA_P Parameter: Age (day) Value: 2 vs. 0
  misc_feature: MA Experiment 108462 PARAMETER Experiment Name: At_Germinating_Seeds_cDNA_P Parameter: Tissue Value: Germinating Seeds
  misc_feature: MA Experiment ID: 108463 Result: Up-regulated in Transcription
  misc_feature: MA Experiment 108463 PARAMETER Experiment Name: At_Germinating_Seeds_cDNA_P Parameter: Age (day) Value: 3 vs. 0
  misc_feature: MA Experiment 108463 PARAMETER Experiment Name: At_Germinating_Seeds_cDNA_P Parameter: Tissue Value: Germinating Seeds
  misc_feature: MA Experiment ID: 108464 Result: Up-regulated in Transcription
  misc_feature: MA Experiment 108464 PARAMETER Experiment Name: At_Germinating_Seeds_cDNA_P Parameter: Age (day) Value: 4 vs. 0
  misc_feature: MA Experiment 108464 PARAMETER Experiment Name: At_Germinating_Seeds_cDNA_P Parameter: Tissue Value: Germinating Seeds
  misc_feature: MA Experiment ID: 108501 Result: Down-regulated in Transcription
  misc_feature: MA Experiment 108501 PARAMETER Experiment Name: At_ap2_floral_buds_cDNA_P Parameter: Plant Line Value: ap2 (Ler.)
  misc_feature: MA Experiment 108501 PARAMETER Experiment Name: At_ap2_floral_buds_cDNA_P Parameter: Tissue Value: Closed Flower
  misc_feature: MA Experiment ID: 108572 Result: Up-regulated in Transcription
  misc_feature: MA Experiment 108572 PARAMETER Experiment Name: At_Drought_cDNA_P Parameter: Timepoint (hr) Value: 1
  misc_feature: MA Experiment 108572 PARAMETER Experiment Name: At_Drought_cDNA_P Parameter: Tissue Value: Aerial
  misc_feature: MA Experiment 108572 PARAMETER Experiment Name: At_Drought_cDNA_P Parameter: Treatment Value: Drought vs. No Drought
  misc_feature: MA Experiment ID: 108573 Result: Up-regulated in Transcription
  misc_feature: MA Experiment 108573 PARAMETER Experiment Name: At_Drought_cDNA_P Parameter: Timepoint (hr) Value: 6
  misc_feature: MA Experiment 108573 PARAMETER Experiment Name: At_Drought_cDNA_P Parameter: Tissue Value: Aerial
  misc_feature: MA Experiment 108573 PARAMETER Experiment Name: At_Drought_cDNA_P Parameter: Treatment Value: Drought vs. No Drought
  misc_feature: MA Experiment ID: 108576 Result: Up-regulated in Transcription
  misc_feature: MA Experiment 108576 PARAMETER Experiment Name: At_42deg_Heat_cDNA_P Parameter: Temperature (deg C) Value: 42 vs. 22
  misc_feature: MA Experiment 108576 PARAMETER Experiment Name: At_42deg_Heat_cDNA_P Parameter: Timepoint (hr) Value: 1
  misc_feature: MA Experiment 108576 PARAMETER Experiment Name: At_42deg_Heat_cDNA_P Parameter: Tissue Value: Aerial
  misc_feature: MA Experiment ID: 108577 Result: Up-regulated in Transcription
  misc_feature: MA Experiment 108577 PARAMETER Experiment Name: At_42deg_Heat_cDNA_P Parameter: Temperature (deg C) Value: 42 vs. 22
  misc_feature: MA Experiment 108577 PARAMETER Experiment Name: At_42deg_Heat_cDNA_P Parameter: Timepoint (hr) Value: 6
  misc_feature: MA Experiment 108577 PARAMETER Experiment Name: At_42deg_Heat_cDNA_P Parameter: Tissue Value: Aerial
  misc_feature: MA Experiment ID: 108585 Result: Up-regulated in Transcription
  misc_feature: MA Experiment 108585 PARAMETER Experiment Name: At_5mM_NaNP_cDNA_P Parameter: Timepoint (hr) Value: 6
  misc_feature: MA Experiment 108585 PARAMETER Experiment Name: At_5mM_NaNP_cDNA_P Parameter: Tissue Value: Aerial
  misc_feature: MA Experiment 108585 PARAMETER Experiment Name: At_5mM_NaNP_cDNA_P Parameter: Treatment Value: null
  misc_feature: MA Experiment ID: 20000090 Result: Down-regulated in Transcription
  misc_feature: MA Experiment ID: 20000185 Result: Up-regulated in Transcription
  misc_feature: MA Experiment 20000185 PARAMETER Experiment Name: At_Roots__P Parameter: Age (day) Value: 7 vs. 21
  misc_feature: MA Experiment 20000185 PARAMETER Experiment Name: At_Roots__P Parameter: Organism Value: A. thaliana
  misc_feature: MA Experiment 20000185 PARAMETER Experiment Name: At_Roots__P Parameter: Tissue Value: Roots vs. Whole Plant
  misc_feature: MA Experiment ID: 20000224 Result: Down-regulated in Transcription
  misc_feature: MA Experiment ID: 20000227 Result: Up-regulated in Transcription
  misc_feature: MA Experiment 20000227 PARAMETER Experiment Name: At_Root-Tips-vs-Tops_P Parameter: Tissue Value: Root Tips vs. Root Tops
  misc_feature: MA Experiment ID: 20000437 Result: Down-regulated in Transcription
  misc_feature: MA Experiment 20000437 PARAMETER Experiment Name: At_Drought_P Parameter: Age (day) Value: 8
  misc_feature: MA Experiment 20000437 PARAMETER Experiment Name: At_Drought_P Parameter: Organism Value: A. thaliana
  misc_feature: MA Experiment 20000437 PARAMETER Experiment Name: At_Drought_P Parameter: Plant Line Value: WS
  misc_feature: MA Experiment 20000437 PARAMETER Experiment Name: At_Drought_P Parameter: Timepoint (hr) Value: 24
  misc_feature: MA Experiment 20000437 PARAMETER Experiment Name: At_Drought_P Parameter: Tissue Value: Whole Plant
  misc_feature: MA Experiment 20000437 PARAMETER Experiment Name: At_Drought_P Parameter: Treatment Value: Drought vs. No Drought
  misc_feature: MA Experiment ID: 20000438 Result: Down-regulated in Transcription
  misc_feature: MA Experiment 20000438 PARAMETER Experiment Name: At_Shoots__P Parameter: Age (day) Value: 14
  misc_feature: MA Experiment 20000438 PARAMETER Experiment Name: At_Shoots__P Parameter: Tissue Value: Shoots vs. Whole Plant
  misc_feature: MA Experiment ID: 20000439 Result: Up-regulated in Transcription
  misc_feature: MA Experiment 20000439 PARAMETER Experiment Name: At_Roots__P Parameter: Age (day) Value: 14 vs. 21
  misc_feature: MA Experiment 20000439 PARAMETER Experiment Name: At_Roots__P Parameter: Organism Value: A. thaliana
  misc_feature: MA Experiment 20000439 PARAMETER Experiment Name: At_Roots__P Parameter: Tissue Value: Roots vs. Whole Plant
  misc_feature: MA Experiment ID: 20000451 Result: Down-regulated in Transcription
  misc_feature: MA Experiment 20000451 PARAMETER Experiment Name: At_CS6879_Shoots-Roots_P Parameter: Age (day) Value: 14
  misc_feature: MA Experiment 20000451 PARAMETER Experiment Name: At_CS6879_Shoots-Roots_P Parameter: Organism Value: A. thaliana
  misc_feature: MA Experiment 20000451 PARAMETER Experiment Name: At_CS6879_Shoots-Roots_P Parameter: Plant Line Value: CS6879 vs. WS
  misc_feature: MA Experiment 20000451 PARAMETER Experiment Name: At_CS6879_Shoots-Roots_P Parameter: Tissue Value: Roots
  misc_feature: MA Experiment ID: 20001556 Result: Down-regulated in Transcription
  misc_feature: MA Experiment 20001556 PARAMETER Experiment Name: At_Drought_Soil_Dry_P Parameter: Age (day) Value: 26
  misc_feature: MA Experiment 20001556 PARAMETER Experiment Name: At_Drought_Soil_Dry_P Parameter: Organism Value: A. thaliana
  misc_feature: MA Experiment 20001556 PARAMETER Experiment Name: At_Drought_Soil_Dry_P Parameter: Plant Line Value: WS
  misc_feature: MA Experiment 20001556 PARAMETER Experiment Name: At_Drought_Soil_Dry_P Parameter: Post Timepoint (hr) Value: None
  misc_feature: MA Experiment 20001556 PARAMETER Experiment Name: At_Drought_Soil_Dry_P Parameter: Post-Treatment Value: None
  misc_feature: MA Experiment 20001556 PARAMETER Experiment Name: At_Drought_Soil_Dry_P Parameter: Timepoint (day) Value: 12
  misc_feature: MA Experiment 20001556 PARAMETER Experiment Name: At_Drought_Soil_Dry_P Parameter: Treatment Value: Drought vs. No Drought
  misc_feature: MA Experiment ID: 20001911 Result: Down-regulated in Transcription
  misc_feature: MA Experiment 20001911 PARAMETER Experiment Name: At_Drought_Reproduction_P Parameter: Age (day) Value: 40
  misc_feature: MA Experiment 20001911 PARAMETER Experiment Name: At_Drought_Reproduction_P Parameter: Organism Value: A. thaliana
  misc_feature: MA Experiment 20001911 PARAMETER Experiment Name: At_Drought_Reproduction_P Parameter: Plant Line Value: WS
  misc_feature: MA Experiment 20001911 PARAMETER Experiment Name: At_Drought_Reproduction_P Parameter: Timepoint (day) Value: 10
  misc_feature: MA Experiment 20001911 PARAMETER Experiment Name: At_Drought_Reproduction_P Parameter: Tissue Value: Flowers
  misc_feature: MA Experiment 20001911 PARAMETER Experiment Name: At_Drought_Reproduction_P Parameter: Treatment Value: Drought vs. No Drought
atacaaatctgaaaaaacattaaaactcatctctctcatcatctttggccatggcaaaagacttggatgtgaacgagagtggaccaccggcggcgagagactacaaggatccgcctcccgcaccatttttcgacatggaggagcttaggaaatggccgctttatagagcggtcatagctgagtttgtagcaacacttctgttcctctacgtctcaatcctgactgtaatcggctacaaagctcaaaccgatgcaaccgccggaggagtggattgtggcggcgtaggaatattgggtattgcgtgggctttcggtggaatgatctttgttctcgtttactgtaccgccggtatctccggtggtcatataaatccggctgtgacggtgggactattcctggctcgtaaagtgtcattggtgcggacagtgttatacattgtggctcagtgccttggtgccatctgcggttgcggtttcgtcaaagcattccaaagttcttactacaccagatatggaggtggagccaacgagctagccgatggctacaacaaaggtaccggactcggtgccgagatcattggaacttttgtccttgtatacaccgtcttctcggcaaccgatcccaagcgaaatgctcgtgactctcacgtgccagttttggctccacttcccattggctttgccgtcttcatggttcatttagccaccattcccatcaccggaaccggtatcaacccggctcgtagctttggagctgccgttatttacaacaacgaaaaggcctgggacgaccaatggattttttgggttggaccgatgatcggagcagcagcagcagcgttttaccatcagtttattttaagagcggctgcgattaaagctcttggctcatttggctcctttggctcctttaggagctttgcttaatatacatttattttaaattaaaccacaagttataaatctttgatcaaaattaaaaggatgattacaaatgaattaagtggaagttacatgtgatcttctttttatatgtttctgtttttttgttctctctttcatttcatggaatttcccattcgtgtaattgtaaatgtggttttaattaatgttgctttaag

SEQ ID NO: 22316 - protein, 291 aa, Arabidopsis thaliana
  peptide (1)..(291): Ceres Seq. ID no. 12322829
  misc_feature (31)..(266): Pfam Name: Major intrinsic protein Pfam Description: Major intrinsic protein
  misc_feature (1)..(283): Homolog of NCBI NO: 3551133 NR Description: Plasma membrane aquaporin (PAQ2) [Raphanus
  misc_feature (1)..(283): Homolog of NCBI NO: 7209562 NR Description: Plasma membrane aquaporin 2c [Raphanus sativus]
  misc_feature (1)..(283): Homolog of NCBI NO: 28395418 NR Description: plasma intrinsic protein 2,1 [Juglans regia]
  misc_feature (1)..(283): Homolog of NCBI NO: 5081423 NR Description: plasma membrane intrinsic protein 2 [Brassica
  misc_feature (1)..(283): Homolog of NCBI NO: 8071620 NR Description: putative aquaporin PIP2-1 [Vitis berlandieri x
  misc_feature (1)..(283): Homolog of NCBI NO: 28395420 NR Description: plasma intrinsic protein 2,2 [Juglans regia]
  misc_feature (1)..(283): Homolog of NCBI NO: 21554356 NR Description: aquaporin (plasma membrane intrinsic protein 2B)
  misc_feature (1)..(283): Homolog of NCBI NO: 7441275 NR Description: mipC protein - common ice plant
  misc_feature (1)..(283): Homolog of NCBI NO: 15228095 NR Description: aquaporin (plasma membrane intrinsic protein 2B)
  misc_feature (1)..(291): Homolog of NCBI NO: 15239397 NR Description: mipC protein - like (aquaporin)
MAKDLDVNESGPPAARDYKDPPPAPFFDMEELRKWPLYRAVIAEFVATLLFLYVSILTVIGYKAQTDATAGGVDCGGVGILGIAWAFGGMIFVLVYCTAGISGGHINPAVTVGLFLARKVSLVRTVLYIVAQCLGAICGCGFVKAFQSSYYTRYGGGANELADGYNKGTGLGAEIIGTFVLVYTVFSATDPKRNARDSHVPVLAPLPIGFAVFMVHLATIPITGTGINPARSFGAAVIYNNEKAWDDQWIFWVGPMIGAAAAAFYHQFILRAAAIKALGSFGSFGSFRSFA

SEQ ID NO: 22317 - protein, 263 aa, Arabidopsis thaliana
  peptide (1)..(263): Ceres Seq. ID no. 12322830
  misc_feature (3)..(238): Pfam Name: Major intrinsic protein Pfam Description: Major intrinsic protein
  misc_feature (1)..(255): Homolog of NCBI NO: 3551133 NR Description: Plasma membrane aquaporin (PAQ2) [Raphanus
  misc_feature (1)..(255): Homolog of NCBI NO: 7209562 NR Description: Plasma membrane aquaporin 2c [Raphanus sativus]
  misc_feature (1)..(255): Homolog of NCBI NO: 28395418 NR Description: plasma intrinsic protein 2,1 [Juglans regia]
  misc_feature (1)..(255): Homolog of NCBI NO: 5081423 NR Description: plasma membrane intrinsic protein 2 [Brassica
  misc_feature (1)..(255): Homolog of NCBI NO: 8071620 NR Description: putative aquaporin PIP2-1 [Vitis berlandieri x
  misc_feature (1)..(255): Homolog of NCBI NO: 28395420 NR Description: plasma intrinsic protein 2,2 [Juglans regia]
  misc_feature (1)..(255): Homolog of NCBI NO: 21554356 NR Description: aquaporin (plasma membrane intrinsic protein 2B)
  misc_feature (1)..(255): Homolog of NCBI NO: 7441275 NR Description: mipC protein - common ice plant
  misc_feature (1)..(255): Homolog of NCBI NO: 15228095 NR Description: aquaporin (plasma membrane intrinsic protein 2B)
  misc_feature (1)..(263): Homolog of NCBI NO: 15239397 NR Description: mipC protein - like (aquaporin)
MEELRKWPLYRAVIAEFVATLLFLYVSILTVIGYKAQTDATAGGVDCGGVGILGIAWAFGGMIFVLVYCTAGISGGHINPAVTVGLFLARKVSLVRTVLYIVAQCLGAICGCGFVKAFQSSYYTRYGGGANELADGYNKGTGLGAEIIGTFVLVYTVFSATDPKRNARDSHVPVLAPLPIGFAVFMVHLATIPITGTGINPARSFGAAVIYNNEKAWDDQWIFWVGPMIGAAAAAFYHQFILRAAAIKALGSFGSFGSFRSFA

SEQ ID NO: 22318 - protein, 202 aa, Arabidopsis thaliana
  peptide (1)..(202): Ceres Seq. ID no. 12322831
  misc_feature (1)..(177): Pfam Name: Major intrinsic protein Pfam Description: Major intrinsic protein
  misc_feature (1)..(194): Homolog of NCBI NO: 8071620 NR Description: putative aquaporin PIP2-1 [Vitis berlandieri x
  misc_feature (1)..(194): Homolog of NCBI NO: 28395420 NR Description: plasma intrinsic protein 2,2 [Juglans regia]
  misc_feature (1)..(194): Homolog of NCBI NO: 21554356 NR Description: aquaporin (plasma membrane intrinsic protein 2B)
  misc_feature (1)..(194): Homolog of NCBI NO: 3551133 NR Description: Plasma membrane aquaporin (PAQ2) [Raphanus
  misc_feature (1)..(194): Homolog of NCBI NO: 28395418 NR Description: plasma intrinsic protein 2,1 [Juglans regia]
  misc_feature (1)..(194): Homolog of NCBI NO: 5081423 NR Description: plasma membrane intrinsic protein 2 [Brassica
  misc_feature (1)..(194): Homolog of NCBI NO: 7209562 NR Description: Plasma membrane aquaporin 2c [Raphanus sativus]
  misc_feature (1)..(194): Homolog of NCBI NO: 7441275 NR Description: mipC protein - common ice plant
  misc_feature (1)..(194): Homolog of NCBI NO: 15228095 NR Description: aquaporin (plasma membrane intrinsic protein 2B)
  misc_feature (1)..(202): Homolog of NCBI NO: 15239397 NR Description: mipC protein - like (aquaporin)
MIFVLVYCTAGISGGHINPAVTVGLFLARKVSLVRTVLYIVAQCLGAICGCGFVKAFQSSYYTRYGGGANELADGYNKGTGLGAEIIGTFVLVYTVFSATDPKRNARDSHVPVLAPLPIGFAVFMVHLATIPITGTGINPARSFGAAVIYNNEKAWDDQWIFWVGPMIGAAAAAFYHQFILRAAAIKALGSFGSFGSFRSFA

SEQ ID NO: 22319 - DNA, 1142 bp, Arabidopsis thaliana
  misc_feature (1)..(1142): Ceres Seq. ID no. 12322489
  misc_feature: MA Experiment ID: 20000088 Result: Down-regulated in Transcription
  misc_feature: MA Experiment 20000088 PARAMETER Experiment Name: At_100uM_ABA_Mutants_cDNA_P Parameter: Plant Line Value: Landsberg
  misc_feature: MA Experiment 20000088 PARAMETER Experiment Name: At_100uM_ABA_Mutants_cDNA_P Parameter: Timepoint (hr) Value: 6
  misc_feature: MA Experiment 20000088 PARAMETER Experiment Name: At_100uM_ABA_Mutants_cDNA_P Parameter: Tissue Value: Aerial
  misc_feature: MA Experiment 20000088 PARAMETER Experiment Name: At_100uM_ABA_Mutants_cDNA_P Parameter: Treatment Value: 100uM ABA vs. No Treatment
acacacaccaatcttatcataactcaccaaccaatcaactaaccatggattccgagatcgccgtcgactgctctccattgctcaaaatctacaagagtggccgcatcgagcgactcatgggtgaagccaccgtcccaccttcttccgaaccacaaaacggagtcgtttccaaggacgttgtttattctgccgacaacaacctatccgtccgtatttacctcccggagaaagccgccgccgagaccgactcgaaactccctctcctcgtttacttccacggtggaggattcatcattgagacagctttctctccaacttaccacactttcctcacgacgtctgtctctgcgtcgaactgtgtagcggtctctgttgattaccgtcgtgcaccggagcatccgatctccgtcccgttcgatgattcttggacagctctcaaatgggtattcacccatatcactggatctggtcaagatgattggttaaacaaacatgctgacttcagcagagtgttcctctccggagacagtgcaggagcaaacatcgtgcatcacatggcgatgagagctgcgaaagagaaactcagtcctggtttgaacgatacaggaatctctggaatcatcttgcttcatccttacttctggtcgaaaacaccaatcgacgagaaggatacgaaagatgaaacgttgaggatgaagatagaggcgttttggatgatggcaagtcctaatagcaaagatggaacagatgatccgttgctcaacgtggtgcaatcagagtcggtggatttgtctgggttgggttgtggtaaggttttggtaatggtggctgagaaagatgcgttggtgaggcagggttggggttacgcggctaagcttgagaagtctggttggaaaggagaggttgaagtggtggagagtgaaggagaagatcatgtttttcatttgttgaaacctgaatgtgataatgctattgaagtcatgcataaattctcagggtttattaagggagggaactagctttgtgctctctagagatattggaataatttggtactacatattttagttgcgtctctcagtttctgtaatgtttcagtgattggcttttcgcccaaagcaacacaataaaaattgaagacg

SEQ ID NO: 22320 - protein, 338 aa, Arabidopsis thaliana
  peptide (1)..(338): Ceres Seq. ID no. 12322490
  misc_feature (71)..(127): Pfam Name: Carboxylesterase Pfam Description: Carboxylesterase
  misc_feature (15)..(334): Homolog of NCBI NO: 15222791 NR Description: hypothetical protein; protein id: At1g49640.1
  misc_feature (17)..(336): Homolog of NCBI NO: 21537287 NR Description: putative esterase [Arabidopsis thaliana]
  misc_feature (17)..(336): Homolog of NCBI NO: 18402731 NR Description: expressed protein
  misc_feature (15)..(336): Homolog of NCBI NO: 15222795 NR Description: unknown protein; protein id: At1g49660.1
  misc_feature (15)..(335): Homolog of NCBI NO: 15221975 NR Description: hypothetical protein; protein id: At1g19190.1
  misc_feature (19)..(334): Homolog of NCBI NO: 28393060 NR Description: putative esterase [Arabidopsis thaliana]
  misc_feature (15)..(334): Homolog of NCBI NO: 15227669 NR Description: putative esterase; protein id: At2g03550.1
  misc_feature (15)..(336): Homolog of NCBI NO: 15228426 NR Description: putative protein; protein id: At3g48700.1
  misc_feature (15)..(338): Homolog of NCBI NO: 15228425 NR Description: putative protein
  misc_feature (15)..(338): Homolog of NCBI NO: 18086341 NR Description: AT3g48690/T8P19_200 [Arabidopsis thaliana]
THQSYHNSPTNQLTMDSEIAVDCSPLLKIYKSGRIERLMGEATVPPSSEPQNGVVSKDVVYSADNNLSVRIYLPEKAAAETDSKLPLLVYFHGGGFIIETAFSPTYHTFLTTSVSASNCVAVSVDYRRAPEHPISVPFDDSWTALKWVFTHITGSGQDDWLNKHADFSRVFLSGDSAGANIVHHMAMRAAKEKLSPGLNDTGISGIILLHPYFWSKTPIDEKDTKDETLRMKIEAFWMMASPNSKDGTDDPLLNVVQSESVDLSGLGCGKVLVMVAEKDALVRQGWGYAAKLEKSGWKGEVEVVESEGEDHVFHLLKPECDNAIEVMHKFSGFIKGGN

SEQ ID NO: 22321 - protein, 324 aa, Arabidopsis thaliana
  peptide (1)..(324): Ceres Seq. ID no. 12322491
  misc_feature (57)..(113): Pfam Name: Carboxylesterase Pfam Description: Carboxylesterase
  misc_feature (1)..(320): Homolog of NCBI NO: 15222791 NR Description: hypothetical protein; protein id: At1g49640.1
  misc_feature (3)..(322): Homolog of NCBI NO: 21537287 NR Description: putative esterase [Arabidopsis thaliana]
  misc_feature (3)..(322): Homolog of NCBI NO: 18402731 NR Description: expressed protein
  misc_feature (1)..(322): Homolog of NCBI NO: 15222795 NR Description: unknown protein; protein id: At1g49660.1
  misc_feature (1)..(321): Homolog of NCBI NO: 15221975 NR Description: hypothetical protein; protein id: At1g19190.1
  misc_feature (5)..(320): Homolog of NCBI NO: 28393060 NR Description: putative esterase [Arabidopsis thaliana]
  misc_feature (1)..(320): Homolog of NCBI NO: 15227669 NR Description: putative esterase; protein id: At2g03550.1
  misc_feature (1)..(322): Homolog of NCBI NO: 15228426 NR Description: putative protein; protein id: At3g48700.1
  misc_feature (1)..(324): Homolog of NCBI NO: 15228425 NR Description: putative protein
  misc_feature (1)..(324): Homolog of NCBI NO: 18086341 NR Description: AT3g48690/T8P19_200 [Arabidopsis thaliana]
MDSEIAVDCSPLLKIYKSGRIERLMGEATVPPSSEPQNGVVSKDVVYSADNNLSVRIYLPEKAAAETDSKLPLLVYFHGGGFIIETAFSPTYHTFLTTSVSASNCVAVSVDYRRAPEHPISVPFDDSWTALKWVFTHITGSGQDDWLNKHADFSRVFLSGDSAGANIVHHMAMRAAKEKLSPGLNDTGISGIILLHPYFWSKTPIDEKDTKDETLRMKIEAFWMMASPNSKDGTDDPLLNVVQSESVDLSGLGCGKVLVMVAEKDALVRQGWGYAAKLEKSGWKGEVEVVESEGEDHVFHLLKPECDNAIEVMHKFSGFIKGGN

SEQ ID NO: 22322 - protein, 300 aa, Arabidopsis thaliana
  peptide (1)..(300): Ceres Seq. ID no. 12322492
  misc_feature (33)..(89): Pfam Name: Carboxylesterase Pfam Description: Carboxylesterase
  misc_feature (1)..(296): Homolog of NCBI NO: 15222791 NR Description: hypothetical protein; protein id: At1g49640.1
  misc_feature (1)..(298): Homolog of NCBI NO: 21537287 NR Description: putative esterase [Arabidopsis thaliana]
  misc_feature (1)..(298): Homolog of NCBI NO: 18402731 NR Description: expressed protein
  misc_feature (1)..(298): Homolog of NCBI NO: 15222795 NR Description: unknown protein; protein id: At1g49660.1
  misc_feature (1)..(297): Homolog of NCBI NO: 15221975 NR Description: hypothetical protein; protein id: At1g19190.1
  misc_feature (1)..(296): Homolog of NCBI NO: 28393060 NR Description: putative esterase [Arabidopsis thaliana]
  misc_feature (1)..(296): Homolog of NCBI NO: 15227669 NR Description: putative esterase; protein id: At2g03550.1
  misc_feature (1)..(298): Homolog of NCBI NO: 15228426 NR Description: putative protein; protein id: At3g48700.1
  misc_feature (1)..(300): Homolog of NCBI NO: 15228425 NR Description: putative protein
  misc_feature (1)..(300): Homolog of NCBI NO: 18086341 NR Description: AT3g48690/T8P19_200 [Arabidopsis thaliana]
MGEATVPPSSEPQNGVVSKDVVYSADNNLSVRIYLPEKAAAETDSKLPLLVYFHGGGFIIETAFSPTYHTFLTTSVSASNCVAVSVDYRRAPEHPISVPFDDSWTALKWVFTHITGSGQDDWLNKHADFSRVFLSGDSAGANIVHHMAMRAAKEKLSPGLNDTGISGIILLHPYFWSKTPIDEKDTKDETLRMKIEAFWMMASPNSKDGTDDPLLNVVQSESVDLSGLGCGKVLVMVAEKDALVRQGWGYAAKLEKSGWKGEVEVVESEGEDHVFHLLKPECDNAIEVMHKFSGFIKGGN

SEQ ID NO: 22323 - DNA, 1113 bp, Arabidopsis thaliana
  misc_feature (1)..(1113): Ceres Seq. ID no. 12327403
  misc_feature: MA Experiment ID: 108434 Result: Up-regulated in Transcription
  misc_feature: MA Experiment 108434 PARAMETER Experiment Name: At_Root_Tips_cDNA_P Parameter: Tissue Value: Root Tips
  misc_feature: MA Experiment ID: 108461 Result: Up-regulated in Transcription
  misc_feature: MA Experiment 108461 PARAMETER Experiment Name: At_Germinating_Seeds_cDNA_P Parameter: Age (day) Value: 1 vs. 0
  misc_feature: MA Experiment 108461 PARAMETER Experiment Name: At_Germinating_Seeds_cDNA_P Parameter: Tissue Value: Germinating Seeds
  misc_feature: MA Experiment ID: 108574 Result: Up-regulated in Transcription
  misc_feature: MA Experiment 108574 PARAMETER Experiment Name: At_Wounding__cDNA_P Parameter: Timepoint (hr) Value: 1
  misc_feature: MA Experiment 108574 PARAMETER Experiment Name: At_Wounding__cDNA_P Parameter: Tissue Value: Aerial
  misc_feature: MA Experiment 108574 PARAMETER Experiment Name: At_Wounding__cDNA_P Parameter: Treatment Value: Wounding vs. No Wounding
  misc_feature: MA Experiment ID: 108579 Result: Up-regulated in Transcription
  misc_feature: MA Experiment 108579 PARAMETER Experiment Name: At_4deg_Cold_cDNA_P Parameter: Temperature (deg C) Value: 4 vs. 22
  misc_feature: MA Experiment 108579 PARAMETER Experiment Name: At_4deg_Cold_cDNA_P Parameter: Timepoint (hr) Value: 6
  misc_feature: MA Experiment 108579 PARAMETER Experiment Name: At_4deg_Cold_cDNA_P Parameter: Tissue Value: Aerial
  misc_feature: MA Experiment ID: 108585 Result: Up-regulated in Transcription
  misc_feature: MA Experiment 108585 PARAMETER Experiment Name: At_5mM_NaNP_cDNA_P Parameter: Timepoint (hr) Value: 6
  misc_feature: MA Experiment 108585 PARAMETER Experiment Name: At_5mM_NaNP_cDNA_P Parameter: Tissue Value: Aerial
  misc_feature: MA Experiment 108585 PARAMETER Experiment Name: At_5mM_NaNP_cDNA_P Parameter: Treatment Value: null
  misc_feature: MA Experiment ID: 108595 Result: Up-regulated in Transcription
  misc_feature: MA Experiment 108595 PARAMETER Experiment Name: At_Ler-pi_Ovule_cDNA_P Parameter: Plant Line Value: null
  misc_feature: MA Experiment ID: 108668 Result: Down-regulated in Transcription
  misc_feature: MA Experiment 108668 PARAMETER Experiment Name: At_2mM_SA_cDNA_P Parameter: Plant Line Value: WS
  misc_feature: MA Experiment 108668 PARAMETER Experiment Name: At_2mM_SA_cDNA_P Parameter: Timepoint (hr) Value: 6
  misc_feature: MA Experiment 108668 PARAMETER Experiment Name: At_2mM_SA_cDNA_P Parameter: Treatment Value: 2mM SA vs. No Treatment
  misc_feature: MA Experiment ID: 20000111 Result: Up-regulated in Transcription
  misc_feature: MA Experiment 20000111 PARAMETER Experiment Name: At_42deg_Heat_cDNA_P Parameter: Temperature (deg C) Value: 42 vs. 22
  misc_feature: MA Experiment 20000111 PARAMETER Experiment Name: At_42deg_Heat_cDNA_P Parameter: Timepoint (hr) Value: 6
  misc_feature: MA Experiment 20000111 PARAMETER Experiment Name: At_42deg_Heat_cDNA_P Parameter: Tissue Value: Aerial
  misc_feature: MA Experiment ID: 20000112 Result: Up-regulated in Transcription
  misc_feature: MA Experiment 20000112 PARAMETER Experiment Name: At_42deg_Heat_cDNA_P Parameter: Temperature (deg C) Value: 42 vs. 22
  misc_feature: MA Experiment 20000112 PARAMETER Experiment Name: At_42deg_Heat_cDNA_P Parameter: Timepoint (hr) Value: 2
  misc_feature: MA Experiment 20000112 PARAMETER Experiment Name: At_42deg_Heat_cDNA_P Parameter: Tissue Value: Aerial
  misc_feature: MA Experiment ID: 20000113 Result: Up-regulated in Transcription
  misc_feature: MA Experiment 20000113 PARAMETER Experiment Name: At_42deg_Heat_cDNA_P Parameter: Temperature (deg C) Value: 42 vs. 22
  misc_feature: MA Experiment 20000113 PARAMETER Experiment Name: At_42deg_Heat_cDNA_P Parameter: Timepoint (hr) Value: 8
  misc_feature: MA Experiment 20000113 PARAMETER Experiment Name: At_42deg_Heat_cDNA_P Parameter: Tissue Value: Aerial
  misc_feature: MA Experiment ID: 20000173 Result: Up-regulated in Transcription
  misc_feature: MA Experiment 20000173 PARAMETER Experiment Name: At_42deg_Heat_P Parameter: Age (day) Value: 14
  misc_feature: MA Experiment 20000173 PARAMETER Experiment Name: At_42deg_Heat_P Parameter: Organism Value: A. thaliana
  misc_feature: MA Experiment 20000173 PARAMETER Experiment Name: At_42deg_Heat_P Parameter: Plant Line Value: WS
  misc_feature: MA Experiment 20000173 PARAMETER Experiment Name: At_42deg_Heat_P Parameter: Temperature (deg C) Value: 42 vs. 22
  misc_feature: MA Experiment 20000173 PARAMETER Experiment Name: At_42deg_Heat_P Parameter: Timepoint (hr) Value: 6
  misc_feature: MA Experiment 20000173 PARAMETER Experiment Name: At_42deg_Heat_P Parameter: Tissue Value: Aerial
  misc_feature: MA Experiment ID: 20000182 Result: Down-regulated in Transcription
  misc_feature: MA Experiment 20000182 PARAMETER Experiment Name: At_2mM_SA_P Parameter: Age (day) Value: 14
  misc_feature: MA Experiment 20000182 PARAMETER Experiment Name: At_2mM_SA_P Parameter: Organism Value: A. thaliana
  misc_feature: MA Experiment 20000182 PARAMETER Experiment Name: At_2mM_SA_P Parameter: Plant Line Value: WS
  misc_feature: MA Experiment 20000182 PARAMETER Experiment Name: At_2mM_SA_P Parameter: Timepoint (hr) Value: 6
  misc_feature: MA Experiment 20000182 PARAMETER Experiment Name: At_2mM_SA_P Parameter: Tissue Value: Aerial
  misc_feature: MA Experiment 20000182 PARAMETER Experiment Name: At_2mM_SA_P Parameter: Treatment Value: 2mM SA vs. No Treatment
  misc_feature: MA Experiment ID: 20000224 Result: Down-regulated in Transcription
  misc_feature: MA Experiment ID: 20000227 Result: Up-regulated in Transcription
  misc_feature: MA Experiment 20000227 PARAMETER Experiment Name: At_Root-Tips-vs-Tops_P Parameter: Tissue Value: Root Tips vs. Root Tops
  misc_feature: MA Experiment ID: 20000234 Result: Up-regulated in Transcription
  misc_feature: MA Experiment 20000234 PARAMETER Experiment Name: At_Siliques_P Parameter: Age (day) Value: 21
  misc_feature: MA Experiment 20000234 PARAMETER Experiment Name: At_Siliques_P Parameter: Organism Value: A. thaliana
  misc_feature: MA Experiment 20000234 PARAMETER Experiment Name: At_Siliques_P Parameter: Plant Line Value: WS
  misc_feature: MA Experiment 20000234 PARAMETER Experiment Name: At_Siliques_P Parameter: Tissue Value: Less Than 5mm Siliques vs. Whole Plant
  misc_feature: MA Experiment ID: 20000264 Result: Up-regulated in Transcription
  misc_feature: MA Experiment 20000264 PARAMETER Experiment Name: At_Open_Flower_P Parameter: Age (day) Value: 21
  misc_feature: MA Experiment 20000264 PARAMETER Experiment Name: At_Open_Flower_P Parameter: Plant Line Value: WS
  misc_feature: MA Experiment 20000264 PARAMETER Experiment Name: At_Open_Flower_P Parameter: Tissue Value: Open Flower vs. Whole Plant
  misc_feature: MA Experiment ID: 20000265 Result: Up-regulated in Transcription
  misc_feature: MA Experiment 20000265 PARAMETER Experiment Name: At_Open_Flower_P Parameter: Age (day) Value: 21
  misc_feature: MA Experiment 20000265 PARAMETER Experiment Name: At_Open_Flower_P Parameter: Plant Line Value: WS
  misc_feature: MA Experiment 20000265 PARAMETER Experiment Name: At_Open_Flower_P Parameter: Tissue Value: Closed Flower vs. Whole Plant
  misc_feature: MA Experiment ID: 20000441 Result: Down-regulated in Transcription
  misc_feature: MA Experiment 20000441 PARAMETER Experiment Name: At_1uM_BR-BRZ__P Parameter: Tissue Value: Shoot Apices
  misc_feature: MA Experiment 20000441 PARAMETER Experiment Name: At_1uM_BR-BRZ__P Parameter: Treatment Value: 1uM BR vs. No Treatment
  misc_feature: MA Experiment ID: 20000443 Result: Down-regulated in Transcription
  misc_feature: MA Experiment 20000443 PARAMETER Experiment Name: At_1uM_BR-BRZ__P Parameter: Tissue Value: Shoot Apices
  misc_feature: MA Experiment 20000443 PARAMETER Experiment Name: At_1uM_BR-BRZ__P Parameter: Treatment Value: 1uM BRZ vs. No Treatment
  misc_feature: MA Experiment ID: 20000495 Result: Down-regulated in Transcription
  misc_feature: MA Experiment 20000495 PARAMETER Experiment Name: At_Guard_Cells_P Parameter: Harvest Date Value: 8/2/2002
  misc_feature: MA Experiment 20000495 PARAMETER Experiment Name: At_Guard_Cells_P Parameter: Organism Value: A. thaliana
  misc_feature: MA Experiment 20000495 PARAMETER Experiment Name: At_Guard_Cells_P Parameter: Tissue Value: Guard Cells vs. Leaves
  misc_feature: MA Experiment ID: 20001451 Result: Down-regulated in Transcription
  misc_feature: MA Experiment 20001451 PARAMETER Experiment Name: At_Far-red-induction_P Parameter: Age (day) Value: 7
  misc_feature: MA Experiment 20001451 PARAMETER Experiment Name: At_Far-red-induction_P Parameter: Light Value: Far-red vs. White
  misc_feature: MA Experiment 20001451 PARAMETER Experiment Name: At_Far-red-induction_P Parameter: Organism Value: A. thaliana
  misc_feature: MA Experiment 20001451 PARAMETER Experiment Name: At_Far-red-induction_P Parameter: Plant Line Value: Columbia
  misc_feature: MA Experiment 20001451 PARAMETER Experiment Name: At_Far-red-induction_P Parameter: Timepoint (hr) Value: 24
  misc_feature: MA Experiment 20001451 PARAMETER Experiment Name: At_Far-red-induction_P Parameter: Tissue Value: Whole Plant
  misc_feature: MA Experiment ID: 20001557 Result: Up-regulated in Transcription
  misc_feature: MA Experiment 20001557 PARAMETER Experiment Name: At_Drought_Soil_Dry_P Parameter: Age (day) Value: 27
  misc_feature: MA Experiment 20001557 PARAMETER Experiment Name: At_Drought_Soil_Dry_P Parameter: Organism Value: A. thaliana
  misc_feature: MA Experiment 20001557 PARAMETER Experiment Name: At_Drought_Soil_Dry_P Parameter: Plant Line Value: WS
  misc_feature: MA Experiment 20001557 PARAMETER Experiment Name: At_Drought_Soil_Dry_P Parameter: Post Timepoint (hr) Value: 3
  misc_feature: MA Experiment 20001557 PARAMETER Experiment Name: At_Drought_Soil_Dry_P Parameter: Post-Treatment Value: Re-Water vs. No Drought
  misc_feature: MA Experiment 20001557 PARAMETER Experiment Name: At_Drought_Soil_Dry_P Parameter: Timepoint (day) Value: 13
  misc_feature: MA Experiment 20001557 PARAMETER Experiment Name: At_Drought_Soil_Dry_P Parameter: Treatment Value: Drought vs. No Drought
  misc_feature: MA Experiment ID: 20001558 Result: Up-regulated in Transcription
  misc_feature: MA Experiment 20001558 PARAMETER Experiment Name: At_Drought_Soil_Dry_P Parameter: Age (day) Value: 27
  misc_feature: MA Experiment 20001558 PARAMETER Experiment Name: At_Drought_Soil_Dry_P Parameter: Organism Value: A. thaliana
  misc_feature: MA Experiment 20001558 PARAMETER Experiment Name: At_Drought_Soil_Dry_P Parameter: Plant Line Value: WS
  misc_feature: MA Experiment 20001558 PARAMETER Experiment Name: At_Drought_Soil_Dry_P Parameter: Post Timepoint (hr) Value: 6
  misc_feature: MA Experiment 20001558 PARAMETER Experiment Name: At_Drought_Soil_Dry_P Parameter: Post-Treatment Value: Re-Water vs. No Drought
  misc_feature: MA Experiment 20001558 PARAMETER Experiment Name: At_Drought_Soil_Dry_P Parameter: Timepoint (day) Value: 13
  misc_feature: MA Experiment 20001558 PARAMETER Experiment Name: At_Drought_Soil_Dry_P Parameter: Treatment Value: Drought vs. No Drought
  misc_feature: MA Experiment ID: 20001560 Result: Up-regulated in Transcription
  misc_feature: MA Experiment 20001560 PARAMETER Experiment Name: At_Drought_Soil_Dry_P Parameter: Age (day) Value: 28
  misc_feature: MA Experiment 20001560 PARAMETER Experiment Name: At_Drought_Soil_Dry_P Parameter: Organism Value: A. thaliana
  misc_feature: MA Experiment 20001560 PARAMETER Experiment Name: At_Drought_Soil_Dry_P Parameter: Plant Line Value: WS
  misc_feature: MA Experiment 20001560 PARAMETER Experiment Name: At_Drought_Soil_Dry_P Parameter: Post Timepoint (hr) Value: None
  misc_feature: MA Experiment 20001560 PARAMETER Experiment Name: At_Drought_Soil_Dry_P Parameter: Post-Treatment Value: None
  misc_feature: MA Experiment 20001560 PARAMETER Experiment Name: At_Drought_Soil_Dry_P Parameter: Timepoint (day) Value: 14
  misc_feature: MA Experiment 20001560 PARAMETER Experiment Name: At_Drought_Soil_Dry_P Parameter: Treatment Value: Drought vs. No Drought
  misc_feature: MA Experiment ID: 20001904 Result: Up-regulated in Transcription
  misc_feature: MA Experiment 20001904 PARAMETER Experiment Name: At_Drought_Reproduction_P Parameter: Age (day) Value: 37
  misc_feature: MA Experiment 20001904 PARAMETER Experiment Name: At_Drought_Reproduction_P Parameter: Organism Value: A. thaliana
  misc_feature: MA Experiment 20001904 PARAMETER Experiment Name: At_Drought_Reproduction_P Parameter: Plant Line Value: WS
  misc_feature: MA Experiment 20001904 PARAMETER Experiment Name: At_Drought_Reproduction_P Parameter: Timepoint (day) Value: 7
  misc_feature: MA Experiment 20001904 PARAMETER Experiment Name: At_Drought_Reproduction_P Parameter: Tissue Value: Rosettes
  misc_feature: MA Experiment 20001904 PARAMETER Experiment Name: At_Drought_Reproduction_P Parameter: Treatment Value: Drought vs. No Drought
  misc_feature: MA Experiment ID: 20001905 Result: Up-regulated in Transcription
  misc_feature: MA Experiment 20001905 PARAMETER Experiment Name: At_Drought_Reproduction_P Parameter: Age (day) Value: 40
  misc_feature: MA Experiment 20001905 PARAMETER Experiment Name: At_Drought_Reproduction_P Parameter: Organism Value: A. thaliana
  misc_feature: MA Experiment 20001905 PARAMETER Experiment Name: At_Drought_Reproduction_P Parameter: Plant Line Value: WS
  misc_feature: MA Experiment 20001905 PARAMETER Experiment Name: At_Drought_Reproduction_P Parameter: Timepoint (day) Value: 10
  misc_feature: MA Experiment 20001905 PARAMETER Experiment Name: At_Drought_Reproduction_P Parameter: Tissue Value: Rosettes
  misc_feature: MA Experiment 20001905 PARAMETER Experiment Name: At_Drought_Reproduction_P Parameter: Treatment Value: Drought vs. No Drought
accacaaaaccctttctcctccaatttcgtcgcacacaggaaaacaaaatgcttctcaaagctgcttctactttctctctattgaacattcatggagagaagaaagacatctctcctctcttctcctcctcctcctccatttcgtctccggtttcttctggaaaatccggcaatctctctttccctcttcgtgcttccaagagttcaaccactaccacaagcacgttgagcggcgttgtgttcgagcctttcgaagaggttaagaaagagatggatctagttccatctggtcaacagctttctcttgctcgtcatttgtactcccctgagtgcgaagccgccgtcaatgagcagatcaatgttgagtataacgtgtcgtatgtgtatcacgctttgtatgcatatttcgatcgtgacaacgttgccctcaagggtctcgccaagtttttcaaggaatcgagtgtggaagaacgagagcacgctgagctgttgatggagtatcagaacaaacgtggtgggagggtcaagttacagcccatggtgttgcctcagtctgagtttgatcatcctgagaaaggagatgctctctatgctatggagttggctctttcattggagaaactagtcaatgaaaagctcctaaacctgcacagtgtggcttccaagaacgatgatgtccagttggcagattttattgagagtgtgtttctgaacgaacaggtggaagccattaagaaaatctcagaatatgtttctcaacttaggagacttggcaaaggacatggaacatggcatttcgatcaggagcttcttggtgctgctgcttaatctgagttttagctgtaatctcgcagtttggttaacttttgagttattttgagtatgagatgtaacttttaaggtagatttgatcaatatcgattctgttgtgagagaaaacaagctattacgctccttggggttaactttctttgtgttttcagtattatggttttgtccacttcgtaatatcactttcctttagaacatttcaaatcagcagttgttttgaggtgtaatgtaatggtcactgatattttctattacccctgcatgaaagtagtatgttttacc

SEQ ID NO: 22324 - protein, 275 aa, Arabidopsis thaliana
  peptide (1)..(275): Ceres Seq. ID no. 12327404
  misc_feature (112)..(257): Pfam Name: Ferritin-like domain Pfam Description: Ferritin-like domain
  misc_feature (17)..(271): Homolog of NCBI NO: 15225679 NR Description: putative ferritin
  misc_feature (17)..(275): Homolog of NCBI NO: 15228818 NR Description: putative protein
TTKPFLLQFRRTQENKMLLKAASTFSLLNIHGEKKDISPLFSSSSSISSPVSSGKSGNLSFPLRASKSSTTTTSTLSGVVFEPFEEVKKEMDLVPSGQQLSLARHLYSPECEAAVNEQINVEYNVSYVYHALYAYFDRDNVALKGLAKFFKESSVEEREHAELLMEYQNKRGGRVKLQPMVLPQSEFDHPEKGDALYAMELALSLEKLVNEKLLNLHSVASKNDDVQLADFIESVFLNEQVEAIKKISEYVSQLRRLGKGHGTWHFDQELLGAAA

SEQ ID NO: 22325 - protein, 259 aa, Arabidopsis thaliana
  peptide (1)..(259): Ceres Seq. ID no. 12327405
  misc_feature (96)..(241): Pfam Name: Ferritin-like domain Pfam Description: Ferritin-like domain
  misc_feature (1)..(255): Homolog of NCBI NO: 15225679 NR Description: putative ferritin
  misc_feature (1)..(259): Homolog of NCBI NO: 15228818 NR Description: putative protein
MLLKAASTFSLLNIHGEKKDISPLFSSSSSISSPVSSGKSGNLSFPLRASKSSTTTTSTLSGVVFEPFEEVKKEMDLVPSGQQLSLARHLYSPECEAAVNEQINVEYNVSYVYHALYAYFDRDNVALKGLAKFFKESSVEEREHAELLMEYQNKRGGRVKLQPMVLPQSEFDHPEKGDALYAMELALSLEKLVNEKLLNLHSVASKNDDVQLADFIESVFLNEQVEAIKKISEYVSQLRRLGKGHGTWHFDQELLGAAA

SEQ ID NO: 22326 - protein, 185 aa, Arabidopsis thaliana
  peptide (1)..(185): Ceres Seq. ID no. 12327406
  misc_feature (22)..(167): Pfam Name: Ferritin-like domain Pfam Description: Ferritin-like domain
  misc_feature (1)..(181): Homolog of NCBI NO: 15225679 NR Description: putative ferritin
  misc_feature (1)..(185): Homolog of NCBI NO: 15228818 NR Description: putative protein
MDLVPSGQQLSLARHLYSPECEAAVNEQINVEYNVSYVYHALYAYFDRDNVALKGLAKFFKESSVEEREHAELLMEYQNKRGGRVKLQPMVLPQSEFDHPEKGDALYAMELALSLEKLVNEKLLNLHSVASKNDDVQLADFIESVFLNEQVEAIKKISEYVSQLRRLGKGHGTWHFDQELLGAAA

SEQ ID NO: 22327 - DNA, 1140 bp, Arabidopsis thaliana
  misc_feature (1)..(1140): Ceres Seq. ID no. 13487399
  misc_feature: MA Experiment ID: 108434 Result: Up-regulated in Transcription
  misc_feature: MA Experiment 108434 PARAMETER Experiment Name: At_Root_Tips_cDNA_P Parameter: Tissue Value: Root Tips
  misc_feature: MA Experiment ID: 108595 Result: Down-regulated in Transcription
  misc_feature: MA Experiment 108595 PARAMETER Experiment Name: At_Ler-pi_Ovule_cDNA_P Parameter: Plant Line Value: null
  misc_feature: MA Experiment ID: 20000185 Result: Down-regulated in Transcription
  misc_feature: MA Experiment 20000185 PARAMETER Experiment Name: At_Roots__P Parameter: Age (day) Value: 7 vs. 21
  misc_feature: MA Experiment 20000185 PARAMETER Experiment Name: At_Roots__P Parameter: Organism Value: A. thaliana
  misc_feature: MA Experiment 20000185 PARAMETER Experiment Name: At_Roots__P Parameter: Tissue Value: Roots vs. Whole Plant
  misc_feature: MA Experiment ID: 20000439 Result: Down-regulated in Transcription
  misc_feature: MA Experiment 20000439 PARAMETER Experiment Name: At_Roots__P Parameter: Age (day) Value: 14 vs. 21
  misc_feature: MA Experiment 20000439 PARAMETER Experiment Name: At_Roots__P Parameter: Organism Value: A. thaliana
  misc_feature: MA Experiment 20000439 PARAMETER Experiment Name: At_Roots__P Parameter: Tissue Value: Roots vs. Whole Plant
  misc_feature: MA Experiment ID: 20001905 Result: Down-regulated in Transcription
  misc_feature: MA Experiment 20001905 PARAMETER Experiment Name: At_Drought_Reproduction_P Parameter: Age (day) Value: 40
  misc_feature: MA Experiment 20001905 PARAMETER Experiment Name: At_Drought_Reproduction_P Parameter: Organism Value: A. thaliana
  misc_feature: MA Experiment 20001905 PARAMETER Experiment Name: At_Drought_Reproduction_P Parameter: Plant Line Value: WS
  misc_feature: MA Experiment 20001905 PARAMETER Experiment Name: At_Drought_Reproduction_P Parameter: Timepoint (day) Value: 10
  misc_feature: MA Experiment 20001905 PARAMETER Experiment Name: At_Drought_Reproduction_P Parameter: Tissue Value: Rosettes
  misc_feature: MA Experiment 20001905 PARAMETER Experiment Name: At_Drought_Reproduction_P Parameter: Treatment Value: Drought vs. No Drought
gtgtcactgttgctgttgccttggttgggttcggtttaaagttcgtggccaaacagtaaccttgagtcttgccgtcctctgtcatctatccacgcctgaacccgaaaaactctgaaagctgagctctggtaatggcgggtttagcaatttcacctcctctcggtctttccttctcttctcgaactcgaaaccctaaacccacttcctttctatctcacaatcaaaggaatcctataagacgtatagtttctgctctacagagtccatatggagattctctgaaagctggactttctagtaatgtttctggatccccaataaagattgacaacaaggctccaagatttggagtgatagaggcgaaaaagggaaaccccccagtaatgccttcagtgatgacccctggaggacctttagacctctcttctgtgttattccgtaaccgcataatcttcatcgggcaaccaattaacgcacaggttgctcagcgagtcatatctcagcttgtaacccttgcatctattgatgataaatccgacatcctgatgtacttgaattgtcccggtggcagtacttactccgtcctagcaatttatgactgtatgtcttggataaagcctaaagttggaacagtggcgtttggagtagctgcaagccaaggagcacttcttcttgctggaggtgaaaaaggaatgcgctatgcaatgccaaatactcgtgtcatgatacatcaaccacaaactggatgcggaggacatgtagaggacgtgaggagacaggtcaatgaagccatcgaagcccgacaaaaaattgacaggatgtatgcagctttcactggacaacctctggagaaagtgcagcaatacactgaaagagatcgtttcttatcagcatctgaggcgcttgagttcgggctcattgatggtctattggaaacagaatactgaagcagcatacaggacaatgcacaacaacagctcattgcaatgttcaaagcttccattttcatttgaatatgaacggttgtaactgatatttgtgcataaatcagtttggttttcttggttttattgtctactaaacagaatgagaaaactaaactgtttatttttttactgaaaaatctgaaagttgtgttcc

SEQ ID NO: 22328 - protein, 271 aa, Arabidopsis thaliana
  peptide (1)..(271): Ceres Seq. ID no. 13487400
  misc_feature (91)..(270): Pfam Name: Clp protease Pfam Description: Clp protease
  misc_feature (67)..(270): Homolog of NCBI NO: 17231175 NR Description: ATP-dependent Clp protease proteolytic subunit
  misc_feature (96)..(270): Homolog of NCBI NO: 16080507 NR Description: ATP-dependent Clp protease proteolytic subunit
  misc_feature (96)..(268): Homolog of NCBI NO: 1705929 NR Description: ATP-dependent Clp protease proteolytic subunit 1
  misc_feature (65)..(267): Homolog of NCBI NO: 16332068 NR Description: ATP-dependent Clp protease proteolytic subunit
  misc_feature (1)..(271): Homolog of NCBI NO: 28209486 NR Description: putative clp-like energy-dependent protease
  misc_feature (13)..(248): Homolog of NCBI NO: 9968665 NR Description: putative ATP-dependent clp serine protease
  misc_feature (24)..(271): Homolog of NCBI NO: 7435703 NR Description: endopeptidase Clp (EC 3.4.21.92) chain P
  misc_feature (1)..(271): Homolog of NCBI NO: 2921510 NR Description: clp-like energy-dependent protease [Fritillaria
  misc_feature (1)..(271): Homolog of NCBI NO: 2827888 NR Description: ATP-dependent Clp protease proteolytic subunit
  misc_feature (1)..(271): Homolog of NCBI NO: 18391311 NR Description: ATP-dependent Clp protease proteolytic subunit
MAGLAISPPLGLSFSSRTRNPKPTSFLSHNQRNPIRRIVSALQSPYGDSLKAGLSSNVSGSPIKIDNKAPRFGVIEAKKGNPPVMPSVMTPGGPLDLSSVLFRNRIIFIGQPINAQVAQRVISQLVTLASIDDKSDILMYLNCPGGSTYSVLAIYDCMSWIKPKVGTVAFGVAASQGALLLAGGEKGMRYAMPNTRVMIHQPQTGCGGHVEDVRRQVNEAIEARQKIDRMYAAFTGQPLEKVQQYTERDRFLSASEALEFGLIDGLLETEY

SEQ ID NO: 22329 - protein, 187 aa, Arabidopsis thaliana
  peptide (1)..(187): Ceres Seq. ID no. 13487401
  misc_feature (7)..(186): Pfam Name: Clp protease Pfam Description: Clp protease
  misc_feature (1)..(186): Homolog of NCBI NO: 17231175 NR Description: ATP-dependent Clp protease proteolytic subunit
  misc_feature (12)..(186): Homolog of NCBI NO: 16080507 NR Description: ATP-dependent Clp protease proteolytic subunit
  misc_feature (12)..(184): Homolog of NCBI NO: 1705929 NR Description: ATP-dependent Clp protease proteolytic subunit 1
  misc_feature (1)..(183): Homolog of NCBI NO: 16332068 NR Description: ATP-dependent Clp protease proteolytic subunit
  misc_feature (1)..(187): Homolog of NCBI NO: 28209486 NR Description: putative clp-like energy-dependent protease
  misc_feature (1)..(164): Homolog of NCBI NO: 9968665 NR Description: putative ATP-dependent clp serine protease
  misc_feature (1)..(187): Homolog of NCBI NO: 7435703 NR Description: endopeptidase Clp (EC 3.4.21.92) chain P
  misc_feature (1)..(187): Homolog of NCBI NO: 2921510 NR Description: clp-like energy-dependent protease [Fritillaria
  misc_feature (1)..(187): Homolog of NCBI NO: 2827888 NR Description: ATP-dependent Clp protease proteolytic subunit
  misc_feature (1)..(187): Homolog of NCBI NO: 18391311 NR Description: ATP-dependent Clp protease proteolytic subunit
MPSVMTPGGPLDLSSVLFRNRIIFIGQPINAQVAQRVISQLVTLASIDDKSDILMYLNCPGGSTYSVLAIYDCMSWIKPKVGTVAFGVAASQGALLLAGGEKGMRYAMPNTRVMIHQPQTGCGGHVEDVRRQVNEAIEARQKIDRMYAAFTGQPLEKVQQYTERDRFLSASEALEFGLIDGLLETEY

SEQ ID NO: 22330 - protein, 183 aa, Arabidopsis thaliana
  peptide (1)..(183): Ceres Seq. ID no. 13487402
  misc_feature (3)..(182): Pfam Name: Clp protease Pfam Description: Clp protease
  misc_feature (1)..(182): Homolog of NCBI NO: 17231175 NR Description: ATP-dependent Clp protease proteolytic subunit
  misc_feature (8)..(182): Homolog of NCBI NO: 16080507 NR Description: ATP-dependent Clp protease proteolytic subunit
  misc_feature (8)..(180): Homolog of NCBI NO: 1705929 NR Description: ATP-dependent Clp protease proteolytic subunit 1
  misc_feature (1)..(179): Homolog of NCBI NO: 16332068 NR Description: ATP-dependent Clp protease proteolytic subunit
  misc_feature (1)..(183): Homolog of NCBI NO: 28209486 NR Description: putative clp-like energy-dependent protease
  misc_feature (1)..(160): Homolog of NCBI NO: 9968665 NR Description: putative ATP-dependent clp serine protease
  misc_feature (1)..(183): Homolog of NCBI NO: 7435703 NR Description: endopeptidase Clp (EC 3.4.21.92) chain P
  misc_feature (1)..(183): Homolog of NCBI NO: 2921510 NR Description: clp-like energy-dependent protease [Fritillaria
  misc_feature (1)..(183): Homolog of NCBI NO: 2827888 NR Description: ATP-dependent Clp protease proteolytic subunit
  misc_feature (1)..(183): Homolog of NCBI NO: 18391311 NR Description: ATP-dependent Clp protease proteolytic subunit
MTPGGPLDLSSVLFRNRIIFIGQPINAQVAQRVISQLVTLASIDDKSDILMYLNCPGGSTYSVLAIYDCMSWIKPKVGTVAFGVAASQGALLLAGGEKGMRYAMPNTRVMIHQPQTGCGGHVEDVRRQVNEAIEARQKIDRMYAAFTGQPLEKVQQYTERDRFLSASEALEFGLIDGLLETEY

SEQ ID NO: 22331 - DNA, 1748 bp, Arabidopsis thaliana
  misc_feature (1)..(1748): Ceres Seq. ID no. 12334606
  misc_feature: MA Experiment ID: 108434 Result: Down-regulated in Transcription
  misc_feature: MA Experiment 108434 PARAMETER Experiment Name: At_Root_Tips_cDNA_P Parameter: Tissue Value: Root Tips
  misc_feature: MA Experiment ID: 108488 Result: Down-regulated in Transcription
  misc_feature: MA Experiment ID: 108573 Result: Up-regulated in Transcription
  misc_feature: MA Experiment 108573 PARAMETER Experiment Name: At_Drought_cDNA_P Parameter: Timepoint (hr) Value: 6
  misc_feature: MA Experiment 108573 PARAMETER Experiment Name: At_Drought_cDNA_P Parameter: Tissue Value: Aerial
  misc_feature: MA Experiment 108573 PARAMETER Experiment Name: At_Drought_cDNA_P Parameter: Treatment Value: Drought vs. No Drought
  misc_feature: MA Experiment ID: 108585 Result: Up-regulated in Transcription
  misc_feature: MA Experiment 108585 PARAMETER Experiment Name: At_5mM_NaNP_cDNA_P Parameter: Timepoint (hr) Value: 6
  misc_feature: MA Experiment 108585 PARAMETER Experiment Name: At_5mM_NaNP_cDNA_P Parameter: Tissue Value: Aerial
  misc_feature: MA Experiment 108585 PARAMETER Experiment Name: At_5mM_NaNP_cDNA_P Parameter: Treatment Value: null
  misc_feature: MA Experiment ID: 20000071 Result: Up-regulated in Transcription
  misc_feature: MA Experiment 20000071 PARAMETER Experiment Name: At_100uM_ABA_Mutants_cDNA_P Parameter: Plant Line Value: CS8104
  misc_feature: MA Experiment 20000071 PARAMETER Experiment Name: At_100uM_ABA_Mutants_cDNA_P Parameter: Timepoint (hr) Value: 6
  misc_feature: MA Experiment 20000071 PARAMETER Experiment Name: At_100uM_ABA_Mutants_cDNA_P Parameter: Tissue Value: Aerial
  misc_feature: MA Experiment 20000071 PARAMETER Experiment Name: At_100uM_ABA_Mutants_cDNA_P Parameter: Treatment Value: 100uM ABA vs. No Treatment
  misc_feature: MA Experiment ID: 20000224 Result: Down-regulated in Transcription
  misc_feature: MA Experiment ID: 20000234 Result: Down-regulated in Transcription
  misc_feature: MA Experiment 20000234 PARAMETER Experiment Name: At_Siliques_P Parameter: Age (day) Value: 21
  misc_feature: MA Experiment 20000234 PARAMETER Experiment Name: At_Siliques_P Parameter: Organism Value: A. thaliana
  misc_feature: MA Experiment 20000234 PARAMETER Experiment Name: At_Siliques_P Parameter: Plant Line Value: WS
  misc_feature: MA Experiment 20000234 PARAMETER Experiment Name: At_Siliques_P Parameter: Tissue Value: Less Than 5mm Siliques vs. Whole Plant
  misc_feature: MA Experiment ID: 20000235 Result: Down-regulated in Transcription
  misc_feature: MA Experiment 20000235 PARAMETER Experiment Name: At_Siliques_P Parameter: Age (day) Value: 21
  misc_feature: MA Experiment 20000235 PARAMETER Experiment Name: At_Siliques_P Parameter: Organism Value: A. thaliana
  misc_feature: MA Experiment 20000235 PARAMETER Experiment Name: At_Siliques_P Parameter: Plant Line Value: WS
  misc_feature: MA Experiment 20000235 PARAMETER Experiment Name: At_Siliques_P Parameter: Tissue Value: 5-10mm Siliques vs. Whole Plant
  misc_feature: MA Experiment ID: 20000438 Result: Down-regulated in Transcription
  misc_feature: MA Experiment 20000438 PARAMETER Experiment Name: At_Shoots__P Parameter: Age (day) Value: 14
  misc_feature: MA Experiment 20000438 PARAMETER Experiment Name: At_Shoots__P Parameter: Tissue Value: Shoots vs. Whole Plant
  misc_feature: MA Experiment ID: 20000794 Result: Up-regulated in Transcription
  misc_feature: MA Experiment 20000794 PARAMETER Experiment Name: At_Petals_P Parameter: Age (day) Value: 23-25 days
  misc_feature: MA Experiment 20000794 PARAMETER Experiment Name: At_Petals_P Parameter: Plant Line Value: WS
  misc_feature: MA Experiment 20000794 PARAMETER Experiment Name: At_Petals_P Parameter: Tissue Value: Petals vs. Whole plant
  misc_feature: MA Experiment ID: 20001558 Result: Down-regulated in Transcription
  misc_feature: MA Experiment 20001558 PARAMETER Experiment Name: At_Drought_Soil_Dry_P Parameter: Age (day) Value: 27
  misc_feature: MA Experiment 20001558 PARAMETER Experiment Name: At_Drought_Soil_Dry_P Parameter: Organism Value: A. thaliana
  misc_feature: MA Experiment 20001558 PARAMETER Experiment Name: At_Drought_Soil_Dry_P Parameter: Plant Line Value: WS
  misc_feature: MA Experiment 20001558 PARAMETER Experiment Name: At_Drought_Soil_Dry_P Parameter: Post Timepoint (hr) Value: 6
  misc_feature: MA Experiment 20001558 PARAMETER Experiment Name: At_Drought_Soil_Dry_P Parameter: Post-Treatment Value: Re-Water vs. No Drought
  misc_feature: MA Experiment 20001558 PARAMETER Experiment Name: At_Drought_Soil_Dry_P Parameter: Timepoint (day) Value: 13
  misc_feature: MA Experiment 20001558 PARAMETER Experiment Name: At_Drought_Soil_Dry_P Parameter: Treatment Value: Drought vs. No Drought
  misc_feature: MA Experiment ID: 20001560 Result: Down-regulated in Transcription
  misc_feature: MA Experiment 20001560 PARAMETER Experiment Name: At_Drought_Soil_Dry_P Parameter: Age (day) Value: 28
  misc_feature: MA Experiment 20001560 PARAMETER Experiment Name: At_Drought_Soil_Dry_P Parameter: Organism Value: A. thaliana
  misc_feature: MA Experiment 20001560 PARAMETER Experiment Name: At_Drought_Soil_Dry_P Parameter: Plant Line Value: WS
  misc_feature: MA Experiment 20001560 PARAMETER Experiment Name: At_Drought_Soil_Dry_P Parameter: Post Timepoint (hr) Value: None
  misc_feature: MA Experiment 20001560 PARAMETER Experiment Name: At_Drought_Soil_Dry_P Parameter: Post-Treatment Value: None
  misc_feature: MA Experiment 20001560 PARAMETER Experiment Name: At_Drought_Soil_Dry_P Parameter: Timepoint (day) Value: 14
  misc_feature: MA Experiment 20001560 PARAMETER Experiment Name: At_Drought_Soil_Dry_P Parameter: Treatment Value: Drought vs. No Drought
atagagatattttcatagagatggtctcgaagctaacaagttgacaaatttcttcgttataagagagatagatgagttgcaggagagtgctgaagtcgatacaagccttggcggctcatagtttactcttctgtttcacgcttttattggtgcttaaactcgatcacaccgtctcttcctcatggtggatggtgtttttcccgctgtgggcttttcatgcagttgttgcaaggggcagattctctcttcctgctcctgttgctccacgtaaccgtcattgggctccttgccatgctgttgtcgcgacaccgttacttgtagcatttgaattactcctctgtatatacctcgagagttcttatgctcgttggccaccagctgtcagtttgaagattgctttcttaccattgttggcttttgaattaacaatactggtagacaatttgagaatgtgtcgagcattgatgccaggagacgacgacagcataactgatgatgcaatatgggaggcacttcctcatttctgggttgcaatttccatggtgttcacgttggctgctacgttctttaccctcctaaagctttctggcgacgtagttgctcttggatggtgggatctattcataaattttggaattgccgagtgctttgcttttcttgtttgcacaaaatggtccaatccagtaatccatagaagctcacgtgcccgagaaaccgggtcatcttctaccagtatcagatatcttgactggaacagcggccttgtggttgctccagaagaggatagacaccaagatagatggtgcggtttgcaagatattggtggtcatatgttaaaaattcccgttattttatttcaagttgtcctttgcatgtatttagaggggactcctgaaagagctaaggatatatcgatcccagtactgttttctccactattcctattgcaaggcctcggtgttctctttgctgcttctaaactcctagagaagatcgtcctcttactccgcggggaagctggtccgggattgtattttagattttcatcaagtgcccatgattgcttgggattcttgcaccatggttccaggctattaggttggtggtcaattgacgaaggaagccgggaggaacaagctcgactgtactttgatcaagaatctggttacaatacattcagtggtcatccgcctgagatagtcaagaaaatgccaaaggaagatcttgcagaagaggtgtggagacttcaagcagcacttggtgaacaaacagaaatcacaaaattcagccagcaggaatatgaaagactgcaaaatgagaaagtgctgtgtagggtttgctttgaaaaagatatcagtttggtactgcttccatgtagacaccgtgttctctgcagaacctgtgcagacaagtgtacaacatgtccaatatgtcgtatagacattgaaaaacgactatctgtatacgacgtatgactgtgttaactttggcccatgatcaagagtaggatttgtggttgatgctccagacaaacattccagtttaccaaccatactgtttcccaaacttctgatgtttttgctgaatctttttgtttgtctgaatcagcagctagtataaaaaaaagtataggtgtatacgtgtatgtatttttctgtaggaaacctcattcaaactttagctgtaacatacaaagtttgtataatatccatctcttttttgtataaatcacaaactaagttatgctt

SEQ ID NO: 22332 - protein, 467 aa, Arabidopsis thaliana
  peptide (1)..(467): Ceres Seq. ID no. 12334607
  misc_feature (420)..(454): Pfam Name: Zinc finger, C3HC4 type (RING finger) Pfam Description: Zinc finger, C3HC4 type (RING finger)
  misc_feature (1)..(467): Homolog of NCBI NO: 22330616 NR Description: unknown protein
  misc_feature (222)..(467): Homolog of NCBI NO: 12324138 NR Description: hypothetical protein; 29936-28688 [Arabidopsis
  misc_feature (270)..(340): Homolog of NCBI NO: 25373333 NR Description: unknown protein F2P9.18 [imported] - Arabidopsis
  misc_feature (1)..(467): Homolog of NCBI NO: 18409134 NR Description: expressed protein
  misc_feature (40)..(149): Homolog of NCBI NO: 6714286 NR Description: F15H18.5 [Arabidopsis thaliana]
  misc_feature (150)..(467): Homolog of NCBI NO: 6714286 NR Description: F15H18.5 [Arabidopsis thaliana]
  misc_feature (8)..(467): Homolog of NCBI NO: 13937305 NR Description: unknown protein [Oryza sativa]
  misc_feature (1)..(236): Homolog of NCBI NO: 25373333 NR Description: unknown protein F2P9.18 [imported] - Arabidopsis
  misc_feature (351)..(415): Homolog of NCBI NO: 25373333 NR Description: unknown protein F2P9.18 [imported] - Arabidopsis
  misc_feature (1)..(467): Homolog of NCBI NO: 18394611 NR Description: expressed protein
MSCRRVLKSIQALAAHSLLFCFTLLLVLKLDHTVSSSWWMVFFPLWAFHAVVARGRFSLPAPVAPRNRHWAPCHAVVATPLLVAFELLLCIYLESSYARWPPAVSLKIAFLPLLAFELTILVDNLRMCRALMPGDDDSITDDAIWEALPHFWVAISMVFTLAATFFTLLKLSGDVVALGWWDLFINFGIAECFAFLVCTKWSNPVIHRSSRARETGSSSTSIRYLDWNSGLVVAPEEDRHQDRWCGLQDIGGHMLKIPVILFQVVLCMYLEGTPERAKDISIPVLFSPLFLLQGLGVLFAASKLLEKIVLLLRGEAGPGLYFRFSSSAHDCLGFLHHGSRLLGWWSIDEGSREEQARLYFDQESGYNTFSGHPPEIVKKMPKEDLAEEVWRLQAALGEQTEITKFSQQEYERLQNEKVLCRVCFEKDISLVLLPCRHRVLCRTCADKCTTCPICRIDIEKRLSVYDV

SEQ ID NO: 22333 - protein, 428 aa, Arabidopsis thaliana
  peptide (1)..(428): Ceres Seq. ID no. 12334608
  misc_feature (381)..(415): Pfam Name: Zinc finger, C3HC4 type (RING finger) Pfam Description: Zinc finger, C3HC4 type (RING finger)
  misc_feature (183)..(428): Homolog of NCBI NO: 12324138 NR Description: hypothetical protein; 29936-28688 [Arabidopsis
  misc_feature (312)..(376): Homolog of NCBI NO: 25373333 NR Description: unknown protein F2P9.18 [imported] - Arabidopsis
  misc_feature (231)..(301): Homolog of NCBI NO: 25373333 NR Description: unknown protein F2P9.18 [imported] - Arabidopsis
  misc_feature (1)..(197): Homolog of NCBI NO: 25373333 NR Description: unknown protein F2P9.18 [imported] - Arabidopsis
  misc_feature (1)..(428): Homolog of NCBI NO: 18409134 NR Description: expressed protein
  misc_feature (1)..(428): Homolog of NCBI NO: 13937305 NR Description: unknown protein [Oryza sativa]
  misc_feature (1)..(110): Homolog of NCBI NO: 6714286 NR Description: F15H18.5 [Arabidopsis thaliana]
  misc_feature (111)..(428): Homolog of NCBI NO: 6714286 NR Description: F15H18.5 [Arabidopsis thaliana]
  misc_feature (1)..(428): Homolog of NCBI NO: 22330616 NR Description: unknown protein
  misc_feature (1)..(428): Homolog of NCBI NO: 18394611 NR Description: expressed protein
MVFFPLWAFHAVVARGRFSLPAPVAPRNRHWAPCHAVVATPLLVAFELLLCIYLESSYARWPPAVSLKIAFLPLLAFELTILVDNLRMCRALMPGDDDSITDDAIWEALPHFWVAISMVFTLAATFFTLLKLSGDVVALGWWDLFINFGIAECFAFLVCTKWSNPVIHRSSRARETGSSSTSIRYLDWNSGLVVAPEEDRHQDRWCGLQDIGGHMLKIPVILFQVVLCMYLEGTPERAKDISIPVLFSPLFLLQGLGVLFAASKLLEKIVLLLRGEAGPGLYFRFSSSAHDCLGFLHHGSRLLGWWSIDEGSREEQARLYFDQESGYNTFSGHPPEIVKKMPKEDLAEEVWRLQAALGEQTEITKFSQQEYERLQNEKVLCRVCFEKDISLVLLPCRHRVLCRTCADKCTTCPICRIDIEKRLSVYDV

SEQ ID NO: 22334 - protein, 341 aa, Arabidopsis thaliana
  peptide (1)..(341): Ceres Seq. ID no. 12334609
  misc_feature (294)..(328): Pfam Name: Zinc finger, C3HC4 type (RING finger) Pfam Description: Zinc finger, C3HC4 type (RING finger)
  misc_feature (96)..(341): Homolog of NCBI NO: 12324138 NR Description: hypothetical protein; 29936-28688 [Arabidopsis
  misc_feature (225)..(289): Homolog of NCBI NO: 25373333 NR Description: unknown protein F2P9.18 [imported] - Arabidopsis
  misc_feature (144)..(214): Homolog of NCBI NO: 25373333 NR Description: unknown protein F2P9.18 [imported] - Arabidopsis
  misc_feature (1)..(110): Homolog of NCBI NO: 25373333 NR Description: unknown protein F2P9.18 [imported] - Arabidopsis
  misc_feature (1)..(341): Homolog of NCBI NO: 18409134 NR Description: expressed protein
  misc_feature (1)..(341): Homolog of NCBI NO: 13937305 NR Description: unknown protein [Oryza sativa]
  misc_feature (1)..(23): Homolog of NCBI NO: 6714286 NR Description: F15H18.5 [Arabidopsis thaliana]
  misc_feature (24)..(341): Homolog of NCBI NO: 6714286 NR Description: F15H18.5 [Arabidopsis thaliana]
  misc_feature (1)..(341): Homolog of NCBI NO: 22330616 NR Description: unknown protein
  misc_feature (1)..(341): Homolog of NCBI NO: 18394611 NR Description: expressed protein
MCRALMPGDDDSITDDAIWEALPHFWVAISMVFTLAATFFTLLKLSGDVVALGWWDLFINFGIAECFAFLVCTKWSNPVIHRSSRARETGSSSTSIRYLDWNSGLVVAPEEDRHQDRWCGLQDIGGHMLKIPVILFQVVLCMYLEGTPERAKDISIPVLFSPLFLLQGLGVLFAASKLLEKIVLLLRGEAGPGLYFRFSSSAHDCLGFLHHGSRLLGWWSIDEGSREEQARLYFDQESGYNTFSGHPPEIVKKMPKEDLAEEVWRLQAALGEQTEITKFSQQEYERLQNEKVLCRVCFEKDISLVLLPCRHRVLCRTCADKCTTCPICRIDIEKRLSVYDV

SEQ ID NO: 22335 - DNA, 1350 bp, Arabidopsis thaliana
  misc_feature (1)..(1350): Ceres Seq. ID no. 13621940
  misc_feature: MA Experiment ID: 20000451 Result: Down-regulated in Transcription
  misc_feature: MA Experiment 20000451 PARAMETER Experiment Name: At_CS6879_Shoots-Roots_P Parameter: Age (day) Value: 14
  misc_feature: MA Experiment 20000451 PARAMETER Experiment Name: At_CS6879_Shoots-Roots_P Parameter: Organism Value: A. thaliana
  misc_feature: MA Experiment 20000451 PARAMETER Experiment Name: At_CS6879_Shoots-Roots_P Parameter: Plant Line Value: CS6879 vs. WS
  misc_feature: MA Experiment 20000451 PARAMETER Experiment Name: At_CS6879_Shoots-Roots_P Parameter: Tissue Value: Roots
  misc_feature: MA Experiment ID: 20001905 Result: Down-regulated in Transcription
  misc_feature: MA Experiment 20001905 PARAMETER Experiment Name: At_Drought_Reproduction_P Parameter: Age (day) Value: 40
  misc_feature: MA Experiment 20001905 PARAMETER Experiment Name: At_Drought_Reproduction_P Parameter: Organism Value: A. thaliana
  misc_feature: MA Experiment 20001905 PARAMETER Experiment Name: At_Drought_Reproduction_P Parameter: Plant Line Value: WS
  misc_feature: MA Experiment 20001905 PARAMETER Experiment Name: At_Drought_Reproduction_P Parameter: Timepoint (day) Value: 10
  misc_feature: MA Experiment 20001905 PARAMETER Experiment Name: At_Drought_Reproduction_P Parameter: Tissue Value: Rosettes
  misc_feature: MA Experiment 20001905 PARAMETER Experiment Name: At_Drought_Reproduction_P Parameter: Treatment Value: Drought vs. No Drought
aagaccacactactctctctatctctctctatctctctatctctctcatttcttcctgcgtcaatggcgactcaaggtcaggttatcacttgcaaagctgcggtggcttacgagccgaacaagcctctggtcatcgaagatgtgcaagtggctccacctcaagctggtgaggttcggatcaagatcctctacactgctctttgtcacaccgacgcttacacttggagcggcaaggatcctgaaggtctctttccttgtattctaggtcatgaggctgctgggattgttgagagtgttggtgaaggagtaactgaagttcaagctggagatcatgttatcccttgttatcaagctgagtgtcgtgaatgcaagttttgcaaatctgggaagactaacctttgtggcaaggtgagatctgctactggtgttgggattatgatgaatgaccgtaagtcgaggttctcggttaatgggaaacccatttatcacttcatgggtacttccacgtttagtcagtatactgttgttcatgatgttagcgtcgccaaaattgatcctactgctcctttggataaagtttgccttcttggatgtggtgttcccactggccttggagcagtttggaatactgcaaaagtagaaccagggtcaaatgttgccattttcggtcttggcactgttggacttgctgttgccgagggtgcgaaaacagctggtgcttcaaggatcattggcattgacatcgatagcaagaagtatgaaactgcaaagaagtttggtgttaacgaatttgtgaacccaaaggatcacgacaagccaattcaggaagtgattgtcgatctcactgatggcggtgttgactacagctttgagtgcatcgggaatgtctccgtgatgagagctgcattggagtgctgtcacaagggatggggaacttcggtcatagttggtgttgcagcatcaggacaagagatatcaactcgtccgttccaactcgtgactggccgtgtgtggaaaggaacagcttttggtggtttcaagagtcgaacccaagtgccttggcttgtagaaaagtacatgaacaaggagataaaagtggatgaatacataacacacaacttgaccttgggagaaatcaataaggctttcgatctattgcacgaaggtacttgccttcgttgtgtcctcgataccagcaaatgactatatgggtcctctctgctttaatctatgtgttcttgtgactttcgtcttttatcggtattgacatttcctaagagcaacagactactctactcttgtgtgtctcgtttctatcttatgcttcaataaaatatcaattaagaccgc

SEQ ID NO: 22336 - protein, 400 aa, Arabidopsis thaliana
  peptide (1)..(400): Ceres Seq. ID no. 13621941
  misc_feature (23)..(396): Homolog of NCBI NO: 5902740 NR Description: ALCOHOL DEHYDROGENASE CLASS III H CHAIN
  misc_feature (22)..(396): Homolog of NCBI NO: 25283011 NR Description: alcohol dehydrogenase (EC 1.1.1.1) 3 - zebra fish
  misc_feature (22)..(396): Homolog of NCBI NO: 18858257 NR Description: alcohol dehydrogenase 5 [Danio rerio]
  misc_feature (22)..(396): Homolog of NCBI NO: 5902742 NR Description: ALCOHOL DEHYDROGENASE CLASS III
  misc_feature (23)..(396): Homolog of NCBI NO: 3121727 NR Description: ALCOHOL DEHYDROGENASE CLASS III
  misc_feature (24)..(396): Homolog of NCBI NO: 6225010 NR Description: ALCOHOL DEHYDROGENASE CLASS III
  misc_feature (23)..(400): Homolog of NCBI NO: 3023271 NR Description: ALCOHOL DEHYDROGENASE CLASS III
  misc_feature (22)..(400): Homolog of NCBI NO: 1498024 NR Description: glutathione-dependent formaldehyde dehydrogenase
  misc_feature (22)..(400): Homolog of NCBI NO: 2129562 NR Description: alcohol dehydrogenase (EC 1.1.1.1) class III -
  misc_feature (22)..(400): Homolog of NCBI NO: 15240054 NR Description: alcohol dehydrogenase class III
KTTLLSLSLSISLSLSFLPASMATQGQVITCKAAVAYEPNKPLVIEDVQVAPPQAGEVRIKILYTALCHTDAYTWSGKDPEGLFPCILGHEAAGIVESVGEGVTEVQAGDHVIPCYQAECRECKFCKSGKTNLCGKVRSATGVGIMMNDRKSRFSVNGKPIYHFMGTSTFSQYTVVHDVSVAKIDPTAPLDKVCLLGCGVPTGLGAVWNTAKVEPGSNVAIFGLGTVGLAVAEGAKTAGASRIIGIDIDSKKYETAKKFGVNEFVNPKDHDKPIQEVIVDLTDGGVDYSFECIGNVSVMRAALECCHKGWGTSVIVGVAASGQEISTRPFQLVTGRVWKGTAFGGFKSRTQVPWLVEKYMNKEIKVDEYITHNLTLGEINKAFDLLHEGTCLRCVLDTSK

SEQ ID NO: 22337 - protein, 379 aa, Arabidopsis thaliana
  peptide (1)..(379): Ceres Seq. ID no. 13621942
  misc_feature (2)..(375): Homolog of NCBI NO: 5902740 NR Description: ALCOHOL DEHYDROGENASE CLASS III H CHAIN
  misc_feature (1)..(375): Homolog of NCBI NO: 25283011 NR Description: alcohol dehydrogenase (EC 1.1.1.1) 3 - zebra fish
  misc_feature (1)..(375): Homolog of NCBI NO: 18858257 NR Description: alcohol dehydrogenase 5 [Danio rerio]
  misc_feature (1)..(375): Homolog of NCBI NO: 5902742 NR Description: ALCOHOL DEHYDROGENASE CLASS III
  misc_feature (2)..(375): Homolog of NCBI NO: 3121727 NR Description: ALCOHOL DEHYDROGENASE CLASS III
  misc_feature (3)..(375): Homolog of NCBI NO: 6225010 NR Description: ALCOHOL DEHYDROGENASE CLASS III
  misc_feature (2)..(379): Homolog of NCBI NO: 3023271 NR Description: ALCOHOL DEHYDROGENASE CLASS III
  misc_feature (1)..(379): Homolog of NCBI NO: 1498024 NR Description: glutathione-dependent formaldehyde dehydrogenase
  misc_feature (1)..(379): Homolog of NCBI NO: 2129562 NR Description: alcohol dehydrogenase (EC 1.1.1.1) class III -
  misc_feature (1)..(379): Homolog of NCBI NO: 15240054 NR Description: alcohol dehydrogenase class III
MATQGQVITCKAAVAYEPNKPLVIEDVQVAPPQAGEVRIKILYTALCHTDAYTWSGKDPEGLFPCILGHEAAGIVESVGEGVTEVQAGDHVIPCYQAECRECKFCKSGKTNLCGKVRSATGVGIMMNDRKSRFSVNGKPIYHFMGTSTFSQYTVVHDVSVAKIDPTAPLDKVCLLGCGVPTGLGAVWNTAKVEPGSNVAIFGLGTVGLAVAEGAKTAGASRIIGIDIDSKKYETAKKFGVNEFVNPKDHDKPIQEVIVDLTDGGVDYSFECIGNVSVMRAALECCHKGWGTSVIVGVAASGQEISTRPFQLVTGRVWKGTAFGGFKSRTQVPWLVEKYMNKEIKVDEYITHNLTLGEINKAFDLLHEGTCLRCVLDTSK

SEQ ID NO: 22338 - protein, 255 aa, Arabidopsis thaliana
  peptide (1)..(255): Ceres Seq. ID no. 13621943
  misc_feature (1)..(251): Homolog of NCBI NO: 5902740 NR Description: ALCOHOL DEHYDROGENASE CLASS III H CHAIN
  misc_feature (1)..(251): Homolog of NCBI NO: 25283011 NR Description: alcohol dehydrogenase (EC 1.1.1.1) 3 - zebra fish
  misc_feature (1)..(251): Homolog of NCBI NO: 18858257 NR Description: alcohol dehydrogenase 5 [Danio rerio]
  misc_feature (1)..(251): Homolog of NCBI NO: 5902742 NR Description: ALCOHOL DEHYDROGENASE CLASS III
  misc_feature (1)..(251): Homolog of NCBI NO: 3121727 NR Description: ALCOHOL DEHYDROGENASE CLASS III
  misc_feature (1)..(251): Homolog of NCBI NO: 6225010 NR Description: ALCOHOL DEHYDROGENASE CLASS III
  misc_feature (1)..(255): Homolog of NCBI NO: 3023271 NR Description: ALCOHOL DEHYDROGENASE CLASS III
  misc_feature (1)..(255): Homolog of NCBI NO: 1498024 NR Description: glutathione-dependent formaldehyde dehydrogenase
  misc_feature (1)..(255): Homolog of NCBI NO: 2129562 NR Description: alcohol dehydrogenase (EC 1.1.1.1) class III -
  misc_feature (1)..(255): Homolog of NCBI NO: 15240054 NR Description: alcohol dehydrogenase class III
MMNDRKSRFSVNGKPIYHFMGTSTFSQYTVVHDVSVAKIDPTAPLDKVCLLGCGVPTGLGAVWNTAKVEPGSNVAIFGLGTVGLAVAEGAKTAGASRIIGIDIDSKKYETAKKFGVNEFVNPKDHDKPIQEVIVDLTDGGVDYSFECIGNVSVMRAALECCHKGWGTSVIVGVAASGQEISTRPFQLVTGRVWKGTAFGGFKSRTQVPWLVEKYMNKEIKVDEYITHNLTLGEINKAFDLLHEGTCLRCVLDTSK

SEQ ID NO: 22339 - DNA, 1213 bp, Arabidopsis thaliana
  misc_feature (1)..(1213): Ceres Seq. ID no. 12371532
  misc_feature: MA Experiment ID: 108573 Result: Up-regulated in Transcription
  misc_feature: MA Experiment 108573 PARAMETER Experiment Name: At_Drought_cDNA_P Parameter: Timepoint (hr) Value: 6
  misc_feature: MA Experiment 108573 PARAMETER Experiment Name: At_Drought_cDNA_P Parameter: Tissue Value: Aerial
  misc_feature: MA Experiment 108573 PARAMETER Experiment Name: At_Drought_cDNA_P Parameter: Treatment Value: Drought vs. No Drought
  misc_feature: MA Experiment ID: 108595 Result: Down-regulated in Transcription
  misc_feature: MA Experiment 108595 PARAMETER Experiment Name: At_Ler-pi_Ovule_cDNA_P Parameter: Plant Line Value: null
aagaaacagccaacggatttagggatcttaccgttctgcgattcgccgaacagagtttgaagctttttttagagacttcaatggtgagccaaggaatggtatctcttacaaagtctctatgcactatgactccaagagtccgtctcaagaatccgaatatgttgcagaaactaaagactggatcttgtaatttccgttttagaaatctccgtgtcttatgcacaacaaaactgtctcagtgggaaccgtcacctttcattcatgcttctgcggaagaagctgctgatttagtattggacaaaacagcgaatgtgttcgaatctattatatccgagagtgcagaggaagagagagtagatatgtcagcgcaacaacgaactaattctcaagttcaggtgcttaaatggccaatatggcttttgggtccatctgttctcctcacaagcggtatggcgcctactttatggcttccgttgtcatcggtttttctcggttccaacgtggttagtctactttctttgatcggtctagattgcattttcaatcttggagcaacccttttccttttaatggctgattcttgcgcacgtcctaaagacccatcacagtcctgcaacagcaaaccaccatttagctacaagttctggaacatgttttcactcataaccgggtttttagtcccaatgttacttctcttcggatcccaatctggccttctcgcttctctccagccccagattcctttcctctcgtccgctgttatcctcttcccgtacttcattctccttgctgttcagacattaatagagatcctcacatggcactggcaatcaccggtctggctagtcacaccagttgtctacgaggcttaccgaatcttgcaactgatgagagggttgacacttagtgcagaggtcaacgcaccggtttgggtggttcatatgcttcgtgggcttgtctcttggtgggtattgatcttgggaatgcaactcatgagagttgcttggtttgctggttttgcatctagaacaacaacaggtcagcaaccacaatctgcttctaagtaaagacagataaatgtttcttcgtttagtttttaaagtcatgtcaaagatttgtaactctttcttcactgtatagcttttattattcgtgggttggtgataaggattaaaaaaaaacacatattctttatgatcatattcgctctttt

SEQ ID NO: 22340 - protein, 354 aa, Arabidopsis thaliana
  peptide (1)..(354): Ceres Seq. ID no. 12371533
  misc_feature (69)..(300): Homolog of NCBI NO: 25405928 NR Description: protein T1N15.7 [imported] - Arabidopsis thaliana
  misc_feature (69)..(300): Homolog of NCBI NO: 15221197 NR Description: unknown protein; protein id: At1g48460.1
  misc_feature (137)..(301): Homolog of NCBI NO: 34910348 NR Description: P0684B02.8 [Oryza sativa (japonica
  misc_feature (66)..(345): Homolog of NCBI NO: 38605903 NR Description: OSJNBb0020O11.15 [Oryza sativa (japonica
  misc_feature (190)..(354): Homolog of NCBI NO: 30695238 NR Description: expressed protein [Arabidopsis thaliana]
  misc_feature (120)..(354): Homolog of NCBI NO: 30695235 NR Description: expressed protein [Arabidopsis thaliana]
  misc_feature (27)..(354): Homolog of NCBI NO: 11281196 NR Description: hypothetical protein T8B10.250 - Arabidopsis
ETANGFRDLTVLRFAEQSLKLFLETSMVSQGMVSLTKSLCTMTPRVRLKNPNMLQKLKTGSCNFRFRNLRVLCTTKLSQWEPSPFIHASAEEAADLVLDKTANVFESIISESAEEERVDMSAQQRTNSQVQVLKWPIWLLGPSVLLTSGMAPTLWLPLSSVFLGSNVVSLLSLIGLDCIFNLGATLFLLMADSCARPKDPSQSCNSKPPFSYKFWNMFSLITGFLVPMLLLFGSQSGLLASLQPQIPFLSSAVILFPYFILLAVQTLIEILTWHWQSPVWLVTPVVYEAYRILQLMRGLTLSAEVNAPVWVVHMLRGLVSWWVLILGMQLMRVAWFAGFASRTTTGQQPQSASK

SEQ ID NO: 22341 - protein, 328 aa, Arabidopsis thaliana
  peptide (1)..(328): Ceres Seq. ID no. 12371534
  misc_feature (43)..(274): Homolog of NCBI NO: 25405928 NR Description: protein T1N15.7 [imported] - Arabidopsis thaliana
  misc_feature (43)..(274): Homolog of NCBI NO: 15221197 NR Description: unknown protein; protein id: At1g48460.1
  misc_feature (111)..(275): Homolog of NCBI NO: 34910348 NR Description: P0684B02.8 [Oryza sativa (japonica
  misc_feature (40)..(319): Homolog of NCBI NO: 38605903 NR Description: OSJNBb0020O11.15 [Oryza sativa (japonica
  misc_feature (164)..(328): Homolog of NCBI NO: 30695238 NR Description: expressed protein [Arabidopsis thaliana]
  misc_feature (94)..(328): Homolog of NCBI NO: 30695235 NR Description: expressed protein [Arabidopsis thaliana]
  misc_feature (1)..(328): Homolog of NCBI NO: 11281196 NR Description: hypothetical protein T8B10.250 - Arabidopsis
MVSQGMVSLTKSLCTMTPRVRLKNPNMLQKLKTGSCNFRFRNLRVLCTTKLSQWEPSPFIHASAEEAADLVLDKTANVFESIISESAEEERVDMSAQQRTNSQVQVLKWPIWLLGPSVLLTSGMAPTLWLPLSSVFLGSNVVSLLSLIGLDCIFNLGATLFLLMADSCARPKDPSQSCNSKPPFSYKFWNMFSLITGFLVPMLLLFGSQSGLLASLQPQIPFLSSAVILFPYFILLAVQTLIEILTWHWQSPVWLVTPVVYEAYRILQLMRGLTLSAEVNAPVWVVHMLRGLVSWWVLILGMQLMRVAWFAGFASRTTTGQQPQSASK

SEQ ID NO: 22342 - protein, 323 aa, Arabidopsis thaliana
  peptide (1)..(323): Ceres Seq. ID no. 12371535
  misc_feature (38)..(269): Homolog of NCBI NO: 25405928 NR Description: protein T1N15.7 [imported] - Arabidopsis thaliana
  misc_feature (38)..(269): Homolog of NCBI NO: 15221197 NR Description: unknown protein; protein id: At1g48460.1
  misc_feature (106)..(270): Homolog of NCBI NO: 34910348 NR Description: P0684B02.8 [Oryza sativa (japonica
  misc_feature (35)..(314): Homolog of NCBI NO: 38605903 NR Description: OSJNBb0020O11.15 [Oryza sativa (japonica
  misc_feature (159)..(323): Homolog of NCBI NO: 30695238 NR Description: expressed protein [Arabidopsis thaliana]
  misc_feature (89)..(323): Homolog of NCBI NO: 30695235 NR Description: expressed protein [Arabidopsis thaliana]
  misc_feature (1)..(323): Homolog of NCBI NO: 11281196 NR Description: hypothetical protein T8B10.250 - Arabidopsis
MVSLTKSLCTMTPRVRLKNPNMLQKLKTGSCNFRFRNLRVLCTTKLSQWEPSPFIHASAEEAADLVLDKTANVFESIISESAEEERVDMSAQQRTNSQVQVLKWPIWLLGPSVLLTSGMAPTLWLPLSSVFLGSNVVSLLSLIGLDCIFNLGATLFLLMADSCARPKDPSQSCNSKPPFSYKFWNMFSLITGFLVPMLLLFGSQSGLLASLQPQIPFLSSAVILFPYFILLAVQTLIEILTWHWQSPVWLVTPVVYEAYRILQLMRGLTLSAEVNAPVWVVHMLRGLVSWWVLILGMQLMRVAWFAGFASRTTTGQQPQSASK

SEQ ID NO: 22343 - DNA, 1078 bp, Arabidopsis thaliana
  misc_feature (1)..(1078): Ceres Seq. ID no. 12372181
  misc_feature: MA Experiment ID: 108434 Result: Down-regulated in Transcription
  misc_feature: MA Experiment 108434 PARAMETER Experiment Name: At_Root_Tips_cDNA_P Parameter: Tissue Value: Root Tips
  misc_feature: MA Experiment ID: 108461 Result: Up-regulated in Transcription
  misc_feature: MA Experiment 108461 PARAMETER Experiment Name: At_Germinating_Seeds_cDNA_P Parameter: Age (day) Value: 1 vs. 0
  misc_feature: MA Experiment 108461 PARAMETER Experiment Name: At_Germinating_Seeds_cDNA_P Parameter: Tissue Value: Germinating Seeds
  misc_feature: MA Experiment ID: 108462 Result: Up-regulated in Transcription
  misc_feature: MA Experiment 108462 PARAMETER Experiment Name: At_Germinating_Seeds_cDNA_P Parameter: Age (day) Value: 2 vs. 0
  misc_feature: MA Experiment 108462 PARAMETER Experiment Name: At_Germinating_Seeds_cDNA_P Parameter: Tissue Value: Germinating Seeds
  misc_feature: MA Experiment ID: 108463 Result: Up-regulated in Transcription
  misc_feature: MA Experiment 108463 PARAMETER Experiment Name: At_Germinating_Seeds_cDNA_P Parameter: Age (day) Value: 3 vs. 0
  misc_feature: MA Experiment 108463 PARAMETER Experiment Name: At_Germinating_Seeds_cDNA_P Parameter: Tissue Value: Germinating Seeds
  misc_feature: MA Experiment ID: 108464 Result: Up-regulated in Transcription
  misc_feature: MA Experiment 108464 PARAMETER Experiment Name: At_Germinating_Seeds_cDNA_P Parameter: Age (day) Value: 4 vs. 0
  misc_feature: MA Experiment 108464 PARAMETER Experiment Name: At_Germinating_Seeds_cDNA_P Parameter: Tissue Value: Germinating Seeds
  misc_feature: MA Experiment ID: 108473 Result: Down-regulated in Transcription
  misc_feature: MA Experiment 108473 PARAMETER Experiment Name: At_Drought_Flowers_cDNA_P Parameter: Timepoint (hr) Value: 7 d
  misc_feature: MA Experiment 108473 PARAMETER Experiment Name: At_Drought_Flowers_cDNA_P Parameter: Tissue Value: Flower
  misc_feature: MA Experiment 108473 PARAMETER Experiment Name: At_Drought_Flowers_cDNA_P Parameter: Treatment Value: Drought vs. No Drought
  misc_feature: MA Experiment ID: 108488 Result: Down-regulated in Transcription
  misc_feature: MA Experiment ID: 108501 Result: Down-regulated in Transcription
  misc_feature: MA Experiment 108501 PARAMETER Experiment Name: At_ap2_floral_buds_cDNA_P Parameter: Plant Line Value: ap2 (Ler.)
  misc_feature: MA Experiment 108501 PARAMETER Experiment Name: At_ap2_floral_buds_cDNA_P Parameter: Tissue Value: Closed Flower
  misc_feature: MA Experiment ID: 108605 Result: Up-regulated in Transcription
  misc_feature: MA Experiment 108605 PARAMETER Experiment Name: At_100uM_ABA_cDNA_P Parameter: Timepoint (hr) Value: 6
  misc_feature: MA Experiment 108605 PARAMETER Experiment Name: At_100uM_ABA_cDNA_P Parameter: Tissue Value: Aerial
  misc_feature: MA Experiment 108605 PARAMETER Experiment Name: At_100uM_ABA_cDNA_P Parameter: Treatment Value: 100uM ABA vs. No Treatment
  misc_feature: MA Experiment ID: 108607 Result: Up-regulated in Transcription
  misc_feature: MA Experiment 108607 PARAMETER Experiment Name: At_100uM_ABA_cDNA_P Parameter: Timepoint (hr) Value: 4
  misc_feature: MA Experiment 108607 PARAMETER Experiment Name: At_100uM_ABA_cDNA_P Parameter: Tissue Value: Aerial
  misc_feature: MA Experiment 108607 PARAMETER Experiment Name: At_100uM_ABA_cDNA_P Parameter: Treatment Value: 100uM ABA vs. No Treatment
  misc_feature: MA Experiment ID: 108609 Result: Up-regulated in Transcription
  misc_feature: MA Experiment 108609 PARAMETER Experiment Name: At_100uM_ABA_cDNA_P Parameter: Timepoint (hr) Value: 24
  misc_feature: MA Experiment 108609 PARAMETER Experiment Name: At_100uM_ABA_cDNA_P Parameter: Tissue Value: Aerial
  misc_feature: MA Experiment 108609 PARAMETER Experiment Name: At_100uM_ABA_cDNA_P Parameter: Treatment Value: 100uM ABA vs. No Treatment
  misc_feature: MA Experiment ID: 20000069 Result: Up-regulated in Transcription
  misc_feature: MA Experiment 20000069 PARAMETER Experiment Name: At_100uM_ABA_Mutants_cDNA_P Parameter: Plant Line Value: CS23
  misc_feature: MA Experiment 20000069 PARAMETER Experiment Name: At_100uM_ABA_Mutants_cDNA_P Parameter: Timepoint (hr) Value: 6
  misc_feature: MA Experiment 20000069 PARAMETER Experiment Name: At_100uM_ABA_Mutants_cDNA_P Parameter: Tissue Value: Aerial
  misc_feature: MA Experiment 20000069 PARAMETER Experiment Name: At_100uM_ABA_Mutants_cDNA_P Parameter: Treatment Value: 100uM ABA vs. No Treatment
  misc_feature: MA Experiment ID: 20000070 Result: Up-regulated in Transcription
  misc_feature: MA Experiment 20000070 PARAMETER Experiment Name: At_100uM_ABA_Mutants_cDNA_P Parameter: Plant Line Value: CS24
  misc_feature: MA Experiment 20000070 PARAMETER Experiment Name: At_100uM_ABA_Mutants_cDNA_P Parameter: Timepoint (hr) Value: 6
  misc_feature: MA Experiment 20000070 PARAMETER Experiment Name: At_100uM_ABA_Mutants_cDNA_P Parameter: Tissue Value: Aerial
  misc_feature: MA Experiment 20000070 PARAMETER Experiment Name: At_100uM_ABA_Mutants_cDNA_P Parameter: Treatment Value: 100uM ABA vs. No Treatment
  misc_feature: MA Experiment ID: 20000071 Result: Up-regulated in Transcription
  misc_feature: MA Experiment 20000071 PARAMETER Experiment Name: At_100uM_ABA_Mutants_cDNA_P Parameter: Plant Line Value: CS8104
  misc_feature: MA Experiment 20000071 PARAMETER Experiment Name: At_100uM_ABA_Mutants_cDNA_P Parameter: Timepoint (hr) Value: 6
  misc_feature: MA Experiment 20000071 PARAMETER Experiment Name: At_100uM_ABA_Mutants_cDNA_P Parameter: Tissue Value: Aerial
  misc_feature: MA Experiment 20000071 PARAMETER Experiment Name: At_100uM_ABA_Mutants_cDNA_P Parameter: Treatment Value: 100uM ABA vs. No Treatment
  misc_feature: MA Experiment ID: 20000086 Result: Up-regulated in Transcription
  misc_feature: MA Experiment 20000086 PARAMETER Experiment Name: At_100uM_ABA_Mutants_cDNA_P Parameter: Plant Line Value: CS22
  misc_feature: MA Experiment 20000086 PARAMETER Experiment Name: At_100uM_ABA_Mutants_cDNA_P Parameter: Timepoint (hr) Value: 6
  misc_feature: MA Experiment 20000086 PARAMETER Experiment Name: At_100uM_ABA_Mutants_cDNA_P Parameter: Tissue Value: Aerial
  misc_feature: MA Experiment 20000086 PARAMETER Experiment Name: At_100uM_ABA_Mutants_cDNA_P Parameter: Treatment Value: 100uM ABA vs. No Treatment
  misc_feature: MA Experiment ID: 20000088 Result: Up-regulated in Transcription
  misc_feature: MA Experiment 20000088 PARAMETER Experiment Name: At_100uM_ABA_Mutants_cDNA_P Parameter: Plant Line Value: Landsberg
  misc_feature: MA Experiment 20000088 PARAMETER Experiment Name: At_100uM_ABA_Mutants_cDNA_P Parameter: Timepoint (hr) Value: 6
  misc_feature: MA Experiment 20000088 PARAMETER Experiment Name: At_100uM_ABA_Mutants_cDNA_P Parameter: Tissue Value: Aerial
  misc_feature: MA Experiment 20000088 PARAMETER Experiment Name: At_100uM_ABA_Mutants_cDNA_P Parameter: Treatment Value: 100uM ABA vs. No Treatment
  misc_feature: MA Experiment ID: 20000117 Result: Up-regulated in Transcription
  misc_feature: MA Experiment 20000117 PARAMETER Experiment Name: At_100uM_ABA_Mutants_cDNA_P Parameter: Plant Line Value: Columbia
  misc_feature: MA Experiment 20000117 PARAMETER Experiment Name: At_100uM_ABA_Mutants_cDNA_P Parameter: Timepoint (hr) Value: 6
  misc_feature: MA Experiment 20000117 PARAMETER Experiment Name: At_100uM_ABA_Mutants_cDNA_P Parameter: Tissue Value: Aerial
  misc_feature: MA Experiment 20000117 PARAMETER Experiment Name: At_100uM_ABA_Mutants_cDNA_P Parameter: Treatment Value: 100uM ABA vs. No Treatment
  misc_feature: MA Experiment ID: 20000169 Result: Up-regulated in Transcription
  misc_feature: MA Experiment 20000169 PARAMETER Experiment Name: At_100uM_ABA_P Parameter: Age (day) Value: 14
  misc_feature: MA Experiment 20000169 PARAMETER Experiment Name: At_100uM_ABA_P Parameter: Organism Value: A. thaliana
  misc_feature: MA Experiment 20000169 PARAMETER Experiment Name: At_100uM_ABA_P Parameter: Plant Line Value: WS
  misc_feature: MA Experiment 20000169 PARAMETER Experiment Name: At_100uM_ABA_P Parameter: Timepoint (hr) Value: 6
  misc_feature: MA Experiment 20000169 PARAMETER Experiment Name: At_100uM_ABA_P Parameter: Tissue Value: Aerial
  misc_feature: MA Experiment 20000169 PARAMETER Experiment Name: At_100uM_ABA_P Parameter: Treatment Value: 100uM ABA vs. No Treatment
  misc_feature: MA Experiment ID: 20000179 Result: Up-regulated in Transcription
  misc_feature: MA Experiment 20000179 PARAMETER Experiment Name: At_Germinating_Seeds_P Parameter: Age (hr) Value: 6 vs. 0
  misc_feature: MA Experiment 20000179 PARAMETER Experiment Name: At_Germinating_Seeds_P Parameter: Tissue Value: Germinating Seeds
  misc_feature: MA Experiment ID: 20000180 Result: Up-regulated in Transcription
  misc_feature: MA Experiment 20000180 PARAMETER Experiment Name: At_Germinating_Seeds_P Parameter: Age (hr) Value: 24 vs. 0
  misc_feature: MA Experiment 20000180 PARAMETER Experiment Name: At_Germinating_Seeds_P Parameter: Tissue Value: Germinating Seeds
  misc_feature: MA Experiment ID: 20000184 Result: Down-regulated in Transcription
  misc_feature: MA Experiment 20000184 PARAMETER Experiment Name: At_Shoots__P Parameter: Age (day) Value: 7
  misc_feature: MA Experiment 20000184 PARAMETER Experiment Name: At_Shoots__P Parameter: Tissue Value: Shoots vs. Whole Plant
  misc_feature: MA Experiment ID: 20000185 Result: Down-regulated in Transcription
  misc_feature: MA Experiment 20000185 PARAMETER Experiment Name: At_Roots__P Parameter: Age (day) Value: 7 vs. 21
  misc_feature: MA Experiment 20000185 PARAMETER Experiment Name: At_Roots__P Parameter: Organism Value: A. thaliana
  misc_feature: MA Experiment 20000185 PARAMETER Experiment Name: At_Roots__P Parameter: Tissue Value: Roots vs. Whole Plant
  misc_feature: MA Experiment ID: 20000224 Result: Down-regulated in Transcription
  misc_feature: MA Experiment ID: 20000234 Result: Down-regulated in Transcription
  misc_feature: MA Experiment 20000234 PARAMETER Experiment Name: At_Siliques_P Parameter: Age (day) Value: 21
  misc_feature: MA Experiment 20000234 PARAMETER Experiment Name: At_Siliques_P Parameter: Organism Value: A. thaliana
  misc_feature: MA Experiment 20000234 PARAMETER Experiment Name: At_Siliques_P Parameter: Plant Line Value: WS
  misc_feature: MA Experiment 20000234 PARAMETER Experiment Name: At_Siliques_P Parameter: Tissue Value: Less Than 5mm Siliques vs. Whole Plant
  misc_feature: MA Experiment ID: 20000235 Result: Down-regulated in Transcription
  misc_feature: MA Experiment 20000235 PARAMETER Experiment Name: At_Siliques_P Parameter: Age (day) Value: 21
  misc_feature: MA Experiment 20000235 PARAMETER Experiment Name: At_Siliques_P Parameter: Organism Value: A. thaliana
  misc_feature: MA Experiment 20000235 PARAMETER Experiment Name: At_Siliques_P Parameter: Plant Line Value: WS
  misc_feature: MA Experiment 20000235 PARAMETER Experiment Name: At_Siliques_P Parameter: Tissue Value: 5-10mm Siliques vs. Whole Plant
  misc_feature: MA Experiment ID: 20000264 Result: Up-regulated in Transcription
  misc_feature: MA Experiment 20000264 PARAMETER Experiment Name: At_Open_Flower_P Parameter: Age (day) Value: 21
  misc_feature: MA Experiment 20000264 PARAMETER Experiment Name: At_Open_Flower_P Parameter: Plant Line Value: WS
  misc_feature: MA Experiment 20000264 PARAMETER Experiment Name: At_Open_Flower_P Parameter: Tissue Value: Open Flower vs. Whole Plant
  misc_feature: MA Experiment ID: 20000265 Result: Down-regulated in Transcription
  misc_feature: MA Experiment 20000265 PARAMETER Experiment Name: At_Open_Flower_P Parameter: Age (day) Value: 21
  misc_feature: MA Experiment 20000265 PARAMETER Experiment Name: At_Open_Flower_P Parameter: Plant Line Value: WS
  misc_feature: MA Experiment 20000265 PARAMETER Experiment Name: At_Open_Flower_P Parameter: Tissue Value: Closed Flower vs. Whole Plant
  misc_feature: MA Experiment ID: 20000268 Result: Down-regulated in Transcription
  misc_feature: MA Experiment 20000268 PARAMETER Experiment Name: At_100mM_NaCl__P Parameter: Age (day) Value: 14
  misc_feature: MA Experiment 20000268 PARAMETER Experiment Name: At_100mM_NaCl__P Parameter: Organism Value: A. thaliana
  misc_feature: MA Experiment 20000268 PARAMETER Experiment Name: At_100mM_NaCl__P Parameter: Plant Line Value: WS
  misc_feature: MA Experiment 20000268 PARAMETER Experiment Name: At_100mM_NaCl__P Parameter: Timepoint (hr) Value: 6
  misc_feature: MA Experiment 20000268 PARAMETER Experiment Name: At_100mM_NaCl__P Parameter: Tissue Value: Whole Plant
  misc_feature: MA Experiment 20000268 PARAMETER Experiment Name: At_100mM_NaCl__P Parameter: Treatment Value: 100mM NaCl vs. No Treatment
  misc_feature: MA Experiment ID: 20000286 Result: Down-regulated in Transcription
  misc_feature: MA Experiment 20000286 PARAMETER Experiment Name: At_Open_Flower_P Parameter: Age (day) Value: 21
  misc_feature: MA Experiment 20000286 PARAMETER Experiment Name: At_Open_Flower_P Parameter: Plant Line Value: WS
  misc_feature: MA Experiment 20000286 PARAMETER Experiment Name: At_Open_Flower_P Parameter: Tissue Value: Half Open vs. Whole Plant
  misc_feature: MA Experiment ID: 20000436 Result: Down-regulated in Transcription
  misc_feature: MA Experiment 20000436 PARAMETER Experiment Name: At_Drought_P Parameter: Age (day) Value: 7
  misc_feature: MA Experiment 20000436 PARAMETER Experiment Name: At_Drought_P Parameter: Organism Value: A. thaliana
  misc_feature: MA Experiment 20000436 PARAMETER Experiment Name: At_Drought_P Parameter: Plant Line Value: WS
  misc_feature: MA Experiment 20000436 PARAMETER Experiment Name: At_Drought_P Parameter: Timepoint (hr) Value: 12
  misc_feature: MA Experiment 20000436 PARAMETER Experiment Name: At_Drought_P Parameter: Tissue Value: Whole Plant
  misc_feature: MA Experiment 20000436 PARAMETER Experiment Name: At_Drought_P Parameter: Treatment Value: Drought vs. No Drought
  misc_feature: MA Experiment ID: 20000437 Result: Down-regulated in Transcription
  misc_feature: MA Experiment 20000437 PARAMETER Experiment Name: At_Drought_P Parameter: Age (day) Value: 8
  misc_feature: MA Experiment 20000437 PARAMETER Experiment Name: At_Drought_P Parameter: Organism Value: A. thaliana
  misc_feature: MA Experiment 20000437 PARAMETER Experiment Name: At_Drought_P Parameter: Plant Line Value: WS
  misc_feature: MA Experiment 20000437 PARAMETER Experiment Name: At_Drought_P Parameter: Timepoint (hr) Value: 24
  misc_feature: MA Experiment 20000437 PARAMETER Experiment Name: At_Drought_P Parameter: Tissue Value: Whole Plant
  misc_feature: MA Experiment 20000437 PARAMETER Experiment Name: At_Drought_P Parameter: Treatment Value: Drought vs. No Drought
  misc_feature: MA Experiment ID: 20000438 Result: Down-regulated in Transcription
  misc_feature: MA Experiment 20000438 PARAMETER Experiment Name: At_Shoots__P Parameter: Age (day) Value: 14
  misc_feature: MA Experiment 20000438 PARAMETER Experiment Name: At_Shoots__P Parameter: Tissue Value: Shoots vs. Whole Plant
  misc_feature: MA Experiment ID: 20000441 Result: Up-regulated in Transcription
  misc_feature: MA Experiment 20000441 PARAMETER Experiment Name: At_1uM_BR-BRZ__P Parameter: Tissue Value: Shoot Apices
  misc_feature: MA Experiment 20000441 PARAMETER Experiment Name: At_1uM_BR-BRZ__P Parameter: Treatment Value: 1uM BR vs. No Treatment
  misc_feature: MA Experiment ID: 20000443 Result: Up-regulated in Transcription
  misc_feature: MA Experiment 20000443 PARAMETER Experiment Name: At_1uM_BR-BRZ__P Parameter: Tissue Value: Shoot Apices
  misc_feature: MA Experiment 20000443 PARAMETER Experiment Name: At_1uM_BR-BRZ__P Parameter: Treatment Value: 1uM BRZ vs. No Treatment
  misc_feature: MA Experiment ID: 20000453 Result: Up-regulated in Transcription
  misc_feature: MA Experiment 20000453 PARAMETER Experiment Name: At_100uM_ABA_P Parameter: Age (day) Value: 15
  misc_feature: MA Experiment 20000453 PARAMETER Experiment Name: At_100uM_ABA_P Parameter: Organism Value: A. thaliana
  misc_feature: MA Experiment 20000453 PARAMETER Experiment Name: At_100uM_ABA_P Parameter: Plant Line Value: WS
  misc_feature: MA Experiment 20000453 PARAMETER Experiment Name: At_100uM_ABA_P Parameter: Timepoint (hr) Value: 24
  misc_feature: MA Experiment 20000453 PARAMETER Experiment Name: At_100uM_ABA_P Parameter: Tissue Value: Aerial
  misc_feature: MA Experiment 20000453 PARAMETER Experiment Name: At_100uM_ABA_P Parameter: Treatment Value: 100uM ABA vs. No Treatment
  misc_feature: MA Experiment ID: 20000495 Result: Down-regulated in Transcription
  misc_feature: MA Experiment 20000495 PARAMETER Experiment Name: At_Guard_Cells_P Parameter: Harvest Date Value: 8/2/2002
  misc_feature: MA Experiment 20000495 PARAMETER Experiment Name: At_Guard_Cells_P Parameter: Organism Value: A. thaliana
  misc_feature: MA Experiment 20000495 PARAMETER Experiment Name: At_Guard_Cells_P Parameter: Tissue Value: Guard Cells vs. Leaves
  misc_feature: MA Experiment ID: 20000573 Result: Up-regulated in Transcription
  misc_feature: MA Experiment 20000573 PARAMETER Experiment Name: At_100uM_ABA_Mutants__P Parameter: Organism Value: A. thaliana
  misc_feature: MA Experiment 20000573 PARAMETER Experiment Name: At_100uM_ABA_Mutants__P Parameter: Plant Line Value: CS22 vs. Ler wt
  misc_feature: MA Experiment 20000573 PARAMETER Experiment Name: At_100uM_ABA_Mutants__P Parameter: Timepoint (hr) Value: N/A
  misc_feature: MA Experiment 20000573 PARAMETER Experiment Name: At_100uM_ABA_Mutants__P Parameter: Tissue Value: Whole Plant
  misc_feature: MA Experiment 20000573 PARAMETER Experiment Name: At_100uM_ABA_Mutants__P Parameter: Treatment Value: None
  misc_feature: MA Experiment ID: 20000574 Result: Up-regulated in Transcription
  misc_feature: MA Experiment 20000574 PARAMETER Experiment Name: At_100uM_ABA_Mutants__P Parameter: Organism Value: A. thaliana
  misc_feature: MA Experiment 20000574 PARAMETER Experiment Name: At_100uM_ABA_Mutants__P Parameter: Plant Line Value: CS23 vs. Ler wt
  misc_feature: MA Experiment 20000574 PARAMETER Experiment Name: At_100uM_ABA_Mutants__P Parameter: Timepoint (hr) Value: N/A
  misc_feature: MA Experiment 20000574 PARAMETER Experiment Name: At_100uM_ABA_Mutants__P Parameter: Tissue Value: Whole Plant
  misc_feature: MA Experiment 20000574 PARAMETER Experiment Name: At_100uM_ABA_Mutants__P Parameter: Treatment Value: None
  misc_feature: MA Experiment ID: 20000794 Result: Up-regulated in Transcription
  misc_feature: MA Experiment 20000794 PARAMETER Experiment Name: At_Petals_P Parameter: Age (day) Value: 23-25 days
  misc_feature: MA Experiment 20000794 PARAMETER Experiment Name: At_Petals_P Parameter: Plant Line Value: WS
  misc_feature: MA Experiment 20000794 PARAMETER Experiment Name: At_Petals_P Parameter: Tissue Value: Petals vs. Whole plant
  misc_feature: MA Experiment ID: 20001248 Result: Up-regulated in Transcription
  misc_feature: MA Experiment 20001248 PARAMETER Experiment Name: At_Far-red-induction_P Parameter: Age (day) Value: 7
  misc_feature: MA Experiment 20001248 PARAMETER Experiment Name: At_Far-red-induction_P Parameter: Light Value: Far-red vs. White
  misc_feature: MA Experiment 20001248 PARAMETER Experiment Name: At_Far-red-induction_P Parameter: Organism Value: A. thaliana
  misc_feature: MA Experiment 20001248 PARAMETER Experiment Name: At_Far-red-induction_P Parameter: Plant Line Value: Columbia
  misc_feature: MA Experiment 20001248 PARAMETER Experiment Name: At_Far-red-induction_P Parameter: Timepoint (hr) Value: 4
  misc_feature: MA Experiment 20001248 PARAMETER Experiment Name: At_Far-red-induction_P Parameter: Tissue Value: Whole Plant
  misc_feature: MA Experiment ID: 20001450 Result: Up-regulated in Transcription
  misc_feature: MA Experiment 20001450 PARAMETER Experiment Name: At_Far-red-induction_P Parameter: Age (day) Value: 7
  misc_feature: MA Experiment 20001450 PARAMETER Experiment Name: At_Far-red-induction_P Parameter: Light Value: Far-red vs. White
  misc_feature: MA Experiment 20001450 PARAMETER Experiment Name: At_Far-red-induction_P Parameter: Organism Value: A. thaliana
  misc_feature: MA Experiment 20001450 PARAMETER Experiment Name: At_Far-red-induction_P Parameter: Plant Line Value: Columbia
  misc_feature: MA Experiment 20001450 PARAMETER Experiment Name: At_Far-red-induction_P Parameter: Timepoint (hr) Value: 8
  misc_feature: MA Experiment 20001450 PARAMETER Experiment Name: At_Far-red-induction_P Parameter: Tissue Value: Whole Plant
  misc_feature: MA Experiment ID: 20001451 Result: Up-regulated in Transcription
  misc_feature: MA Experiment 20001451 PARAMETER Experiment Name: At_Far-red-induction_P Parameter: Age (day) Value: 7
  misc_feature: MA Experiment 20001451 PARAMETER Experiment Name: At_Far-red-induction_P Parameter: Light Value: Far-red vs. White
  misc_feature: MA Experiment 20001451 PARAMETER Experiment Name: At_Far-red-induction_P Parameter: Organism Value: A. thaliana
  misc_feature: MA Experiment 20001451 PARAMETER Experiment Name: At_Far-red-induction_P Parameter: Plant Line Value: Columbia
  misc_feature: MA Experiment 20001451 PARAMETER Experiment Name: At_Far-red-induction_P Parameter: Timepoint (hr) Value: 24
  misc_feature: MA Experiment 20001451 PARAMETER Experiment Name: At_Far-red-induction_P Parameter: Tissue Value: Whole Plant
  misc_feature: MA Experiment ID: 20001554 Result: Down-regulated in Transcription
  misc_feature: MA Experiment 20001554 PARAMETER Experiment Name: At_Drought_Soil_Dry_P Parameter: Age (day) Value: 21
  misc_feature: MA Experiment 20001554 PARAMETER Experiment Name: At_Drought_Soil_Dry_P Parameter: Organism Value: A. thaliana
  misc_feature: MA Experiment 20001554 PARAMETER Experiment Name: At_Drought_Soil_Dry_P Parameter: Plant Line Value: WS
  misc_feature: MA Experiment 20001554 PARAMETER Experiment Name: At_Drought_Soil_Dry_P Parameter: Post Timepoint (hr) Value: None
  misc_feature: MA Experiment 20001554 PARAMETER Experiment Name: At_Drought_Soil_Dry_P Parameter: Post-Treatment Value: None
  misc_feature: MA Experiment 20001554 PARAMETER Experiment Name: At_Drought_Soil_Dry_P Parameter: Timepoint (day) Value: 7
  misc_feature: MA Experiment 20001554 PARAMETER Experiment Name: At_Drought_Soil_Dry_P Parameter: Treatment Value: Drought vs. No Drought
  misc_feature: MA Experiment ID: 20001555 Result: Down-regulated in Transcription
  misc_feature: MA Experiment 20001555 PARAMETER Experiment Name: At_Drought_Soil_Dry_P Parameter: Age (day) Value: 24
  misc_feature: MA Experiment 20001555 PARAMETER Experiment Name: At_Drought_Soil_Dry_P Parameter: Organism Value: A. thaliana
  misc_feature: MA Experiment 20001555 PARAMETER Experiment Name: At_Drought_Soil_Dry_P Parameter: Plant Line Value: WS
  misc_feature: MA Experiment 20001555 PARAMETER Experiment Name: At_Drought_Soil_Dry_P Parameter: Post Timepoint (hr) Value: None
  misc_feature: MA Experiment 20001555 PARAMETER Experiment Name: At_Drought_Soil_Dry_P Parameter: Post-Treatment Value: None
  misc_feature: MA Experiment 20001555 PARAMETER Experiment Name: At_Drought_Soil_Dry_P Parameter: Timepoint (day) Value: 10
  misc_feature: MA Experiment 20001555 PARAMETER Experiment Name: At_Drought_Soil_Dry_P Parameter: Treatment Value: Drought vs. No Drought
  misc_feature: MA Experiment ID: 20001556 Result: Down-regulated in Transcription
  misc_feature: MA Experiment 20001556 PARAMETER Experiment Name: At_Drought_Soil_Dry_P Parameter: Age (day) Value: 26
  misc_feature: MA Experiment 20001556 PARAMETER Experiment Name: At_Drought_Soil_Dry_P Parameter: Organism Value: A. thaliana
  misc_feature: MA Experiment 20001556 PARAMETER Experiment Name: At_Drought_Soil_Dry_P Parameter: Plant Line Value: WS
  misc_feature: MA Experiment 20001556 PARAMETER Experiment Name: At_Drought_Soil_Dry_P Parameter: Post Timepoint (hr) Value: None
  misc_feature: MA Experiment 20001556 PARAMETER Experiment Name: At_Drought_Soil_Dry_P Parameter: Post-Treatment Value: None
  misc_feature: MA Experiment 20001556 PARAMETER Experiment Name: At_Drought_Soil_Dry_P Parameter: Timepoint (day) Value: 12
  misc_feature: MA Experiment 20001556 PARAMETER Experiment Name: At_Drought_Soil_Dry_P Parameter: Treatment Value: Drought vs. No Drought
  misc_feature: MA Experiment ID: 20001557 Result: Down-regulated in Transcription
  misc_feature: MA Experiment 20001557 PARAMETER Experiment Name: At_Drought_Soil_Dry_P Parameter: Age (day) Value: 27
  misc_feature: MA Experiment 20001557 PARAMETER Experiment Name: At_Drought_Soil_Dry_P Parameter: Organism Value: A. thaliana
  misc_feature: MA Experiment 20001557 PARAMETER Experiment Name: At_Drought_Soil_Dry_P Parameter: Plant Line Value: WS
  misc_feature: MA Experiment 20001557 PARAMETER Experiment Name: At_Drought_Soil_Dry_P Parameter: Post Timepoint (hr) Value: 3
  misc_feature: MA Experiment 20001557 PARAMETER Experiment Name: At_Drought_Soil_Dry_P Parameter: Post-Treatment Value: Re-Water vs. No Drought
  misc_feature: MA Experiment 20001557 PARAMETER Experiment Name: At_Drought_Soil_Dry_P Parameter: Timepoint (day) Value: 13
  misc_feature: MA Experiment 20001557 PARAMETER Experiment Name: At_Drought_Soil_Dry_P Parameter: Treatment Value: Drought vs. No Drought
  misc_feature: MA Experiment ID: 20001559 Result: Down-regulated in Transcription
  misc_feature: MA Experiment 20001559 PARAMETER Experiment Name: At_Drought_Soil_Dry_P Parameter: Age (day) Value: 28
  misc_feature: MA Experiment 20001559 PARAMETER Experiment Name: At_Drought_Soil_Dry_P Parameter: Organism Value: A. thaliana
  misc_feature: MA Experiment 20001559 PARAMETER Experiment Name: At_Drought_Soil_Dry_P Parameter: Plant Line Value: WS
  misc_feature: MA Experiment 20001559 PARAMETER Experiment Name: At_Drought_Soil_Dry_P Parameter: Post Timepoint (hr) Value: 29
  misc_feature: MA Experiment 20001559 PARAMETER Experiment Name: At_Drought_Soil_Dry_P Parameter: Post-Treatment Value: Re-Water vs. No Drought
  misc_feature: MA Experiment 20001559 PARAMETER Experiment Name: At_Drought_Soil_Dry_P Parameter: Timepoint (day) Value: 14
  misc_feature: MA Experiment 20001559 PARAMETER Experiment Name: At_Drought_Soil_Dry_P Parameter: Treatment Value: Drought vs. No Drought
  misc_feature: MA Experiment ID: 20001904 Result: Down-regulated in Transcription
  misc_feature: MA Experiment 20001904 PARAMETER Experiment Name: At_Drought_Reproduction_P Parameter: Age (day) Value: 37
  misc_feature: MA Experiment 20001904 PARAMETER Experiment Name: At_Drought_Reproduction_P Parameter: Organism Value: A. thaliana
  misc_feature: MA Experiment 20001904 PARAMETER Experiment Name: At_Drought_Reproduction_P Parameter: Plant Line Value: WS
  misc_feature: MA Experiment 20001904 PARAMETER Experiment Name: At_Drought_Reproduction_P Parameter: Timepoint (day) Value: 7
  misc_feature: MA Experiment 20001904 PARAMETER Experiment Name: At_Drought_Reproduction_P Parameter: Tissue Value: Rosettes
  misc_feature: MA Experiment 20001904 PARAMETER Experiment Name: At_Drought_Reproduction_P Parameter: Treatment Value: Drought vs. No Drought
  misc_feature: MA Experiment ID: 20001905 Result: Down-regulated in Transcription
  misc_feature: MA Experiment 20001905 PARAMETER Experiment Name: At_Drought_Reproduction_P Parameter: Age (day) Value: 40
  misc_feature: MA Experiment 20001905 PARAMETER Experiment Name: At_Drought_Reproduction_P Parameter: Organism Value: A. thaliana
  misc_feature: MA Experiment 20001905 PARAMETER Experiment Name: At_Drought_Reproduction_P Parameter: Plant Line Value: WS
  misc_feature: MA Experiment 20001905 PARAMETER Experiment Name: At_Drought_Reproduction_P Parameter: Timepoint (day) Value: 10
  misc_feature: MA Experiment 20001905 PARAMETER Experiment Name: At_Drought_Reproduction_P Parameter: Tissue Value: Rosettes
  misc_feature: MA Experiment 20001905 PARAMETER Experiment Name: At_Drought_Reproduction_P Parameter: Treatment Value: Drought vs. No Drought
  misc_feature: MA Experiment ID: 20001906 Result: Down-regulated in Transcription
  misc_feature: MA Experiment 20001906 PARAMETER Experiment Name: At_Drought_Reproduction_P Parameter: Age (day) Value: 35
  misc_feature: MA Experiment 20001906 PARAMETER Experiment Name: At_Drought_Reproduction_P Parameter: Organism Value: A. thaliana
  misc_feature: MA Experiment 20001906 PARAMETER Experiment Name: At_Drought_Reproduction_P Parameter: Plant Line Value: WS
  misc_feature: MA Experiment 20001906 PARAMETER Experiment Name: At_Drought_Reproduction_P Parameter: Timepoint (day) Value: 5
  misc_feature: MA Experiment 20001906 PARAMETER Experiment Name: At_Drought_Reproduction_P Parameter: Tissue Value: Siliques
  misc_feature: MA Experiment 20001906 PARAMETER Experiment Name: At_Drought_Reproduction_P Parameter: Treatment Value: Drought vs. No Drought
  misc_feature: MA Experiment ID: 20001907 Result: Down-regulated in Transcription
  misc_feature: MA Experiment 20001907 PARAMETER Experiment Name: At_Drought_Reproduction_P Parameter: Age (day) Value: 37
  misc_feature: MA Experiment 20001907 PARAMETER Experiment Name: At_Drought_Reproduction_P Parameter: Organism Value: A. thaliana
  misc_feature: MA Experiment 20001907 PARAMETER Experiment Name: At_Drought_Reproduction_P Parameter: Plant Line Value: WS
  misc_feature: MA Experiment 20001907 PARAMETER Experiment Name: At_Drought_Reproduction_P Parameter: Timepoint (day) Value: 7
  misc_feature: MA Experiment 20001907 PARAMETER Experiment Name: At_Drought_Reproduction_P Parameter: Tissue Value: Siliques
  misc_feature: MA Experiment 20001907 PARAMETER Experiment Name: At_Drought_Reproduction_P Parameter: Treatment Value: Drought vs. No Drought
  misc_feature: MA Experiment ID: 20001908 Result: Down-regulated in Transcription
  misc_feature: MA Experiment 20001908 PARAMETER Experiment Name: At_Drought_Reproduction_P Parameter: Age (day) Value: 40
  misc_feature: MA Experiment 20001908 PARAMETER Experiment Name: At_Drought_Reproduction_P Parameter: Organism Value: A. thaliana
  misc_feature: MA Experiment 20001908 PARAMETER Experiment Name: At_Drought_Reproduction_P Parameter: Plant Line Value: WS
  misc_feature: MA Experiment 20001908 PARAMETER Experiment Name: At_Drought_Reproduction_P Parameter: Timepoint (day) Value: 10
  misc_feature: MA Experiment 20001908 PARAMETER Experiment Name: At_Drought_Reproduction_P Parameter: Tissue Value: Siliques
  misc_feature: MA Experiment 20001908 PARAMETER Experiment Name: At_Drought_Reproduction_P Parameter: Treatment Value: Drought vs. No Drought
  misc_feature: MA Experiment ID: 20001910 Result: Down-regulated in Transcription
  misc_feature: MA Experiment 20001910 PARAMETER Experiment Name: At_Drought_Reproduction_P Parameter: Age (day) Value: 37
  misc_feature: MA Experiment 20001910 PARAMETER Experiment Name: At_Drought_Reproduction_P Parameter: Organism Value: A. thaliana
  misc_feature: MA Experiment 20001910 PARAMETER Experiment Name: At_Drought_Reproduction_P Parameter: Plant Line Value: WS
  misc_feature: MA Experiment 20001910 PARAMETER Experiment Name: At_Drought_Reproduction_P Parameter: Timepoint (day) Value: 7
  misc_feature: MA Experiment 20001910 PARAMETER Experiment Name: At_Drought_Reproduction_P Parameter: Tissue Value: Flowers
  misc_feature: MA Experiment 20001910 PARAMETER Experiment Name: At_Drought_Reproduction_P Parameter: Treatment Value: Drought vs. No Drought
  misc_feature: MA Experiment ID: 20001911 Result: Down-regulated in Transcription
  misc_feature: MA Experiment 20001911 PARAMETER Experiment Name: At_Drought_Reproduction_P Parameter: Age (day) Value: 40
  misc_feature: MA Experiment 20001911 PARAMETER Experiment Name: At_Drought_Reproduction_P Parameter: Organism Value: A. thaliana
  misc_feature: MA Experiment 20001911 PARAMETER Experiment Name: At_Drought_Reproduction_P Parameter: Plant Line Value: WS
  misc_feature: MA Experiment 20001911 PARAMETER Experiment Name: At_Drought_Reproduction_P Parameter: Timepoint (day) Value: 10
  misc_feature: MA Experiment 20001911 PARAMETER Experiment Name: At_Drought_Reproduction_P Parameter: Tissue Value: Flowers
  misc_feature: MA Experiment 20001911 PARAMETER Experiment Name: At_Drought_Reproduction_P Parameter: Treatment Value: Drought vs. No Drought
tcaaaaaatatctctcccccttcttctctcttcctcacattcctcaccaaaccctctccaaaacacacccacacgtacgcacacacacaaagacaatgtctcctttcaaaatattcttcttcacgactcttctcgtggcggcgttttcagtgtcggctgctgatttcaacactgacgtcaacgtagcttggggaaatggccgtgggaagatactcaacaacggccagcttcttactctctccttagacaaatcctctggttccggttttcaatccaaaacagagtatttgtttggaaagattgatatgcagattaagcttgttcctggtaactctgcaggaacagtcacaactttttacctaaaatccgaaggatccacttgggatgagattgattttgagttcttgggtaatatgagtggagatccttatactttacacactaatgtttacactcaaggtaaaggtgacaaagagcaacaattccatctctggttcgacccaaccgccaatttccacacttactcaatcctctggaaccctcaaagaatcatattgaccgtcgatgacacacccattagagagtttaaaaactatgagtctctcggtgtcttgtttccaaagaacaagccgatgaggatgtacgcgagtttatggaacgcagacgattgggcaacaagaggcggtcttgttaaaactgattggtctaaagctccattcatggcttcttacagaaacattaagattgactcgaaaccaaactccaattggtacactcaagaaatggattcaacaagccaagctagactcaaatgggttcagaagaattacatgatctacaattattgtactgaccataggaggtttccacagggagctcctaaggaatgcacaacaagctcatagaatctcaaattatattctatttatttatctacacttcctctctttcttttatgtgaaaattgtgaatgctctgtttctagcttgtctattatgtccgagaatttctttttctgtttttgattcttttcgttgtatatctttgtccaataaaggaaatgatgtgtctttactcc

SEQ ID NO: 22344 - protein, 300 aa, Arabidopsis thaliana
  peptide (1)..(300): Ceres Seq. ID no. 12372182
  misc_feature (55)..(236): Pfam Name: Glycosyl hydrolases family 16 Pfam Description: Glycosyl hydrolases family 16
  misc_feature (256)..(296): Homolog of NCBI NO: 29500893 NR Description: putative xyloglucan endotransglycosylase [Cucumis
  misc_feature (33)..(245): Homolog of NCBI NO: 29500893 NR Description: putative xyloglucan endotransglycosylase [Cucumis
  misc_feature (40)..(296): Homolog of NCBI NO: 29500891 NR Description: putative xyloglucan endotransglycosylase [Cucumis
  misc_feature (234)..(296): Homolog of NCBI NO: 15242781 NR Description: xyloglucan endotransglycosylase (TCH4)
  misc_feature (40)..(255): Homolog of NCBI NO: 15242781 NR Description: xyloglucan endotransglycosylase (TCH4)
  misc_feature (32)..(300): Homolog of NCBI NO: 21553999 NR Description: xyloglucan endo-1,4-beta-D-glucanase precursor
  misc_feature (32)..(300): Homolog of NCBI NO: 15234678 NR Description: xyloglucan endotransglycosylase (meri5B)
KKYLSPFFSLPHIPHQTLSKTHPHVRTHTKTMSPFKIFFFTTLLVAAFSVSAADFNTDVNVAWGNGRGKILNNGQLLTLSLDKSSGSGFQSKTEYLFGKIDMQIKLVPGNSAGTVTTFYLKSEGSTWDEIDFEFLGNMSGDPYTLHTNVYTQGKGDKEQQFHLWFDPTANFHTYSILWNPQRIILTVDDTPIREFKNYESLGVLFPKNKPMRMYASLWNADDWATRGGLVKTDWSKAPFMASYRNIKIDSKPNSNWYTQEMDSTSQARLKWVQKNYMIYNYCTDHRRFPQGAPKECTTSS

SEQ ID NO: 22345 - protein, 269 aa, Arabidopsis thaliana; identical to SEQ ID NO: 21034
  peptide (1)..(269): Ceres Seq. ID no. 12372183
  misc_feature (24)..(205): Pfam Name: Glycosyl hydrolases family 16 Pfam Description: Glycosyl hydrolases family 16
  misc_feature (225)..(265): Homolog of NCBI NO: 29500893 NR Description: putative xyloglucan endotransglycosylase [Cucumis
  misc_feature (2)..(214): Homolog of NCBI NO: 29500893 NR Description: putative xyloglucan endotransglycosylase [Cucumis
  misc_feature (9)..(265): Homolog of NCBI NO: 29500891 NR Description: putative xyloglucan endotransglycosylase [Cucumis
  misc_feature (203)..(265): Homolog of NCBI NO: 15242781 NR Description: xyloglucan endotransglycosylase (TCH4)
  misc_feature (9)..(224): Homolog of NCBI NO: 15242781 NR Description: xyloglucan endotransglycosylase (TCH4)
  misc_feature (1)..(269): Homolog of NCBI NO: 21553999 NR Description: xyloglucan endo-1,4-beta-D-glucanase precursor
  misc_feature (1)..(269): Homolog of NCBI NO: 15234678 NR Description: xyloglucan endotransglycosylase (meri5B)

SEQ ID NO: 22346 - protein, 199 aa, Arabidopsis thaliana; identical to SEQ ID NO: 21035
  peptide (1)..(199): Ceres Seq. ID no. 12372184
  misc_feature (1)..(135): Pfam Name: Glycosyl hydrolases family 16 Pfam Description: Glycosyl hydrolases family 16
  misc_feature (155)..(195): Homolog of NCBI NO: 29500893 NR Description: putative xyloglucan endotransglycosylase [Cucumis
  misc_feature (1)..(144): Homolog of NCBI NO: 29500893 NR Description: putative xyloglucan endotransglycosylase [Cucumis
  misc_feature (1)..(195): Homolog of NCBI NO: 29500891 NR Description: putative xyloglucan endotransglycosylase [Cucumis
  misc_feature (133)..(195): Homolog of NCBI NO: 15242781 NR Description: xyloglucan endotransglycosylase (TCH4)
  misc_feature (1)..(154): Homolog of NCBI NO: 15242781 NR Description: xyloglucan endotransglycosylase (TCH4)
  misc_feature (1)..(199): Homolog of NCBI NO: 21553999 NR Description: xyloglucan endo-1,4-beta-D-glucanase precursor
  misc_feature (1)..(199): Homolog of NCBI NO: 15234678 NR Description: xyloglucan endotransglycosylase (meri5B)

SEQ ID NO: 22347 - DNA, 1451 bp, Arabidopsis thaliana
  misc_feature (1)..(1451): Ceres Seq. ID no. 12337916
  misc_feature: MA Experiment ID: 108434 Result: Up-regulated in Transcription
  misc_feature: MA Experiment 108434 PARAMETER Experiment Name: At_Root_Tips_cDNA_P Parameter: Tissue Value: Root Tips
  misc_feature: MA Experiment ID: 20000087 Result: Down-regulated in Transcription
  misc_feature: MA Experiment 20000087 PARAMETER Experiment Name: At_100uM_ABA_Mutants_cDNA_P Parameter: Plant Line Value: WS
  misc_feature: MA Experiment 20000087 PARAMETER Experiment Name: At_100uM_ABA_Mutants_cDNA_P Parameter: Timepoint (hr) Value: 6
  misc_feature: MA Experiment 20000087 PARAMETER Experiment Name: At_100uM_ABA_Mutants_cDNA_P Parameter: Tissue Value: Aerial
  misc_feature: MA Experiment 20000087 PARAMETER Experiment Name: At_100uM_ABA_Mutants_cDNA_P Parameter: Treatment Value: 100uM ABA vs. No Treatment
atttttgagttctcagatttcaaacacaaaagtttcgtctccgatttaatctttctacgtcttggtttatgagctcaaaggagaagcccactctcgggggtacgcggattaagacccgcaaaaggaatattgctgctcctctcgaccctgctgctttttctgatgcactagttcagatttatctggataatgctggtgatctggaacttgttgccagaagtttagagtcatctgatcttaatttctcaagatacggtgatattttctttgaggttgttttcattggaggacgtactcaaactggttcagtgaaatctgatgaaggggaacgccacccttactctataatcgactgtgaaccaaagcgtgaagctattttaccatcagttgtatacatacagaaaattttgcggaggaaagccttccttattaagaaccttgagaatgttacacggagattcttacagtcactggagctttttgaggagaatgagagaaagaagcttgcaatattcacagcacttgcattttcacagaagctctcaggattacctgcagagactgtcttccagccattgcttaaggatactcttgttgccaaagggatagttctcaattttgtaacagacttcttcaatgaatatttggttgagaacagtcttgatgacttgatttctattctgaggcgtggcaagatggatgacaaactcttggagttcctgccacccacaaagcggactacagaaagttttgccgagcatttcactaaggcaggattgacagctctggtagagtacaatgaaaggaaaatatttgaggtgaagctgaaggaaatcaaagcggtccttacgagccaagtgacagaggaaataaacgtagatgaagtgactgaaatggtgaagcaacaggtgaaagatgcaaagctgccagagactgaggttgtgcatgtgatctgggatgggataatgaatgctgttcaatggtctgggaaaaaccagcagcagaattcgaatgctgtattacgccaagtgaaaacatgggcaccccttctgaacacgctgtgtagcaccgggaacatggagatggaactgatgtataaagtacagatgcaatgctatgaggatgcaaagctgatgaaagtgtttcctgaggtagtgagatctctgtatgaactggatgtgcttgcggaagacaccattctgcactggtatcgcaaagggaccaaccctaagggcaggcaaacgtttgtgaagggattggaaccgttagtgaattggctcgaagaggccgaagaagaggagtgagtgagacgctctgcttcttgttttctctttttactctcttctaataaaagaaagacaatattttacttctcttaacgcaaaattcagatgctctacattgttggtgacttggtgtgatctcttttttgaatgaataagtacttcttc

SEQ ID NO: 22348 - protein, 411 aa, Arabidopsis thaliana
  peptide (1)..(411): Ceres Seq. ID no. 12337917
  misc_feature (335)..(411): Pfam Name: eIF4-gamma/eIF5/eIF2-epsilon Pfam Description: eIF4-gamma/eIF5/eIF2-epsilon
  misc_feature (1)..(410): Homolog of NCBI NO: 12847253 NR Description: unnamed protein product [Mus musculus]
  misc_feature (1)..(410): Homolog of NCBI NO: 11640562 NR Description: MSTP017 [Homo sapiens]
  misc_feature (1)..(410): Homolog of NCBI NO: 19705527 NR Description: Hfb2 protein [Rattus norvegicus]
  misc_feature (1)..(410): Homolog of NCBI NO: 31981160 NR Description: basic leucine zipper and W2 domains 2 [Mus
  misc_feature (1)..(410): Homolog of NCBI NO: 7661744 NR Description: basic leucine zipper and W2 domains 2; HSPC028
  misc_feature (2)..(411): Homolog of NCBI NO: 9759036 NR Description: gb|AAD26879.1~gene_id:T30G6.9~strong similarity
  misc_feature (1)..(411): Homolog of NCBI NO: 18421544 NR Description: putative protein
  misc_feature (1)..(411): Homolog of NCBI NO: 21554220 NR Description: unknown [Arabidopsis thaliana]
  misc_feature (2)..(411): Homolog of NCBI NO: 25404540 NR Description: hypothetical protein T23K8.13 [imported] -
  misc_feature (1)..(411): Homolog of NCBI NO: 18408228 NR Description: expressed protein
MSSKEKPTLGGTRIKTRKRNIAAPLDPAAFSDALVQIYLDNAGDLELVARSLESSDLNFSRYGDIFFEVVFIGGRTQTGSVKSDEGERHPYSIIDCEPKREAILPSVVYIQKILRRKAFLIKNLENVTRRFLQSLELFEENERKKLAIFTALAFSQKLSGLPAETVFQPLLKDTLVAKGIVLNFVTDFFNEYLVENSLDDLISILRRGKMDDKLLEFLPPTKRTTESFAEHFTKAGLTALVEYNERKIFEVKLKEIKAVLTSQVTEEINVDEVTEMVKQQVKDAKLPETEVVHVIWDGIMNAVQWSGKNQQQNSNAVLRQVKTWAPLLNTLCSTGNMEMELMYKVQMQCYEDAKLMKVFPEVVRSLYELDVLAEDTILHWYRKGTNPKGRQTFVKGLEPLVNWLEEAEEEE

SEQ ID NO: 22349 - DNA, 1032 bp, Arabidopsis thaliana
  misc_feature (1)..(1032): Ceres Seq. ID no. 12327106
  misc_feature: MA Experiment ID: 108579 Result: Down-regulated in Transcription
  misc_feature: MA Experiment 108579 PARAMETER Experiment Name: At_4deg_Cold_cDNA_P Parameter: Temperature (deg C) Value: 4 vs. 22
  misc_feature: MA Experiment 108579 PARAMETER Experiment Name: At_4deg_Cold_cDNA_P Parameter: Timepoint (hr) Value: 6
  misc_feature: MA Experiment 108579 PARAMETER Experiment Name: At_4deg_Cold_cDNA_P Parameter: Tissue Value: Aerial
  misc_feature: MA Experiment ID: 20000069 Result: Up-regulated in Transcription
  misc_feature: MA Experiment 20000069 PARAMETER Experiment Name: At_100uM_ABA_Mutants_cDNA_P Parameter: Plant Line Value: CS23
  misc_feature: MA Experiment 20000069 PARAMETER Experiment Name: At_100uM_ABA_Mutants_cDNA_P Parameter: Timepoint (hr) Value: 6
  misc_feature: MA Experiment 20000069 PARAMETER Experiment Name: At_100uM_ABA_Mutants_cDNA_P Parameter: Tissue Value: Aerial
  misc_feature: MA Experiment 20000069 PARAMETER Experiment Name: At_100uM_ABA_Mutants_cDNA_P Parameter: Treatment Value: 100uM ABA vs. No Treatment
  misc_feature: MA Experiment ID: 20000184 Result: Down-regulated in Transcription
  misc_feature: MA Experiment 20000184 PARAMETER Experiment Name: At_Shoots__P Parameter: Age (day) Value: 7
  misc_feature: MA Experiment 20000184 PARAMETER Experiment Name: At_Shoots__P Parameter: Tissue Value: Shoots vs. Whole Plant
  misc_feature: MA Experiment ID: 20000224 Result: Up-regulated in Transcription
  misc_feature: MA Experiment ID: 20000437 Result: Up-regulated in Transcription
  misc_feature: MA Experiment 20000437 PARAMETER Experiment Name: At_Drought_P Parameter: Age (day) Value: 8
  misc_feature: MA Experiment 20000437 PARAMETER Experiment Name: At_Drought_P Parameter: Organism Value: A. thaliana
  misc_feature: MA Experiment 20000437 PARAMETER Experiment Name: At_Drought_P Parameter: Plant Line Value: WS
  misc_feature: MA Experiment 20000437 PARAMETER Experiment Name: At_Drought_P Parameter: Timepoint (hr) Value: 24
  misc_feature: MA Experiment 20000437 PARAMETER Experiment Name: At_Drought_P Parameter: Tissue Value: Whole Plant
  misc_feature: MA Experiment 20000437 PARAMETER Experiment Name: At_Drought_P Parameter: Treatment Value: Drought vs. No Drought
  misc_feature: MA Experiment ID: 20000495 Result: Up-regulated in Transcription
  misc_feature: MA Experiment 20000495 PARAMETER Experiment Name: At_Guard_Cells_P Parameter: Harvest Date Value: 8/2/2002
  misc_feature: MA Experiment 20000495 PARAMETER Experiment Name: At_Guard_Cells_P Parameter: Organism Value: A. thaliana
  misc_feature: MA Experiment 20000495 PARAMETER Experiment Name: At_Guard_Cells_P Parameter: Tissue Value: Guard Cells vs. Leaves
  misc_feature: MA Experiment ID: 20000794 Result: Up-regulated in Transcription
  misc_feature: MA Experiment 20000794 PARAMETER Experiment Name: At_Petals_P Parameter: Age (day) Value: 23-25 days
  misc_feature: MA Experiment 20000794 PARAMETER Experiment Name: At_Petals_P Parameter: Plant Line Value: WS
  misc_feature: MA Experiment 20000794 PARAMETER Experiment Name: At_Petals_P Parameter: Tissue Value: Petals vs. Whole plant
  misc_feature: MA Experiment ID: 20001558 Result: Down-regulated in Transcription
  misc_feature: MA Experiment 20001558 PARAMETER Experiment Name: At_Drought_Soil_Dry_P Parameter: Age (day) Value: 27
  misc_feature: MA Experiment 20001558 PARAMETER Experiment Name: At_Drought_Soil_Dry_P Parameter: Organism Value: A. thaliana
  misc_feature: MA Experiment 20001558 PARAMETER Experiment Name: At_Drought_Soil_Dry_P Parameter: Plant Line Value: WS
  misc_feature: MA Experiment 20001558 PARAMETER Experiment Name: At_Drought_Soil_Dry_P Parameter: Post Timepoint (hr) Value: 6
  misc_feature: MA Experiment 20001558 PARAMETER Experiment Name: At_Drought_Soil_Dry_P Parameter: Post-Treatment Value: Re-Water vs. No Drought
  misc_feature: MA Experiment 20001558 PARAMETER Experiment Name: At_Drought_Soil_Dry_P Parameter: Timepoint (day) Value: 13
  misc_feature: MA Experiment 20001558 PARAMETER Experiment Name: At_Drought_Soil_Dry_P Parameter: Treatment Value: Drought vs. No Drought
  misc_feature: MA Experiment ID: 20001911 Result: Up-regulated in Transcription
  misc_feature: MA Experiment 20001911 PARAMETER Experiment Name: At_Drought_Reproduction_P Parameter: Age (day) Value: 40
  misc_feature: MA Experiment 20001911 PARAMETER Experiment Name: At_Drought_Reproduction_P Parameter: Organism Value: A. thaliana
  misc_feature: MA Experiment 20001911 PARAMETER Experiment Name: At_Drought_Reproduction_P Parameter: Plant Line Value: WS
  misc_feature: MA Experiment 20001911 PARAMETER Experiment Name: At_Drought_Reproduction_P Parameter: Timepoint (day) Value: 10
  misc_feature: MA Experiment 20001911 PARAMETER Experiment Name: At_Drought_Reproduction_P Parameter: Tissue Value: Flowers
  misc_feature: MA Experiment 20001911 PARAMETER Experiment Name: At_Drought_Reproduction_P Parameter: Treatment Value: Drought vs. No Drought
aaatataagtcttcttcttctccaatggcgtcttcttctcttgttcgaatcgctgtcgtcggagacatccatggcttctggaacctagatgaagatcgaaaggctctacgagttctccagccggatttggtgctcttcacaggtgattttggtgaagaaaacgtcccactggttcaaagtgttgccgctcttactttccctaaagcagtcatattggggaatcatgatgcctggttcacccaagattttccaaggaaagaaaaacaaaaacaaaacggtgttcaaatgcaactcgatatccttggtgacgagcacataggatatcaacgcatggacttcccatcttttaagctcagtattgttggtggtcgacccttttcacatggtggggatcgattgtttcggaaaaatctgcttgtccagaggtatggagttcatgatatggaagccagtgctgggagtatttgtcgagctgcacatggaacaccggaagatcacgtggctataattctcgctcacaatgggccaacaggtcttggttggcaagcagaggatatatgtggaaaagactggggggctgaaggcggtgaccatggtgatccagatctagagcaggcgatacgacagttgaaggagacgactaagttgtcgattcctttagttgtgtttgggcacatgcataaggagctgcaacgggggaaaggaaatcggaaaatggtagtgcaagatagtgacaaccagactgtgtatgtgaacggtgcaatagttccaagggttaaagaggcaaagaaaagaggagcagcagagtctgagagtggtggcacaacaagagctttcacattggtggagattttagatgggaaaatcaagaaaatagcagaaatttgggtacatgtaaatggaagtatggctaagattgtggaggaaaatactttgtttgaagatgtaacctgatttgaaatttaaacaattaattcgggacaagactgtaataactaattatacatttgtcttggcgaacaagtccctttt

SEQ ID NO: 22350 - protein, 317 aa, Arabidopsis thaliana
  peptide (1)..(317): Ceres Seq. ID no. 12327107
  misc_feature (17)..(227): Pfam Name: Calcineurin-like phosphoesterase Pfam Description: Calcineurin-like phosphoesterase
  misc_feature (15)..(315): Homolog of NCBI NO: 33861236 NR Description: putative transcripton factor
  misc_feature (39)..(304): Homolog of NCBI NO: 33240462 NR Description: Predicted phosphoesterase
  misc_feature (15)..(258): Homolog of NCBI NO: 33865849 NR Description: putative transcripton factor [Synechococcus sp.
  misc_feature (14)..(313): Homolog of NCBI NO: 23042127 NR Description: hypothetical protein [Trichodesmium erythraeum
  misc_feature (1)..(317): Homolog of NCBI NO: 17232166 NR Description: putative transcripton factor for heterocyst
  misc_feature (8)..(313): Homolog of NCBI NO: 16331583 NR Description: hypothetical protein [Synechocystis sp. PCC 6803]
  misc_feature (6)..(314): Homolog of NCBI NO: 23124236 NR Description: hypothetical protein [Nostoc punctiforme]
  misc_feature (96)..(317): Homolog of NCBI NO: 30697022 NR Description: contains similarity to phosphoesterase
  misc_feature (9)..(40): Homolog of NCBI NO: 8777321 NR Description: contains similarity to
  misc_feature (111)..(317): Homolog of NCBI NO: 8777321 NR Description: contains similarity to
KYKSSSSPMASSSLVRIAVVGDIHGFWNLDEDRKALRVLQPDLVLFTGDFGEENVPLVQSVAALTFPKAVILGNHDAWFTQDFPRKEKQKQNGVQMQLDILGDEHIGYQRMDFPSFKLSIVGGRPFSHGGDRLFRKNLLVQRYGVHDMEASAGSICRAAHGTPEDHVAIILAHNGPTGLGWQAEDICGKDWGAEGGDHGDPDLEQAIRQLKETTKLSIPLVVFGHMHKELQRGKGNRKMVVQDSDNQTVYVNGAIVPRVKEAKKRGAAESESGGTTRAFTLVEILDGKIKKIAEIWVHVNGSMAKIVEENTLFEDVT

SEQ ID NO: 22351 - protein, 309 aa, Arabidopsis thaliana
  peptide (1)..(309): Ceres Seq. ID no. 12327108
  misc_feature (9)..(219): Pfam Name: Calcineurin-like phosphoesterase Pfam Description: Calcineurin-like phosphoesterase
  misc_feature (7)..(307): Homolog of NCBI NO: 33861236 NR Description: putative transcripton factor
  misc_feature (31)..(296): Homolog of NCBI NO: 33240462 NR Description: Predicted phosphoesterase
  misc_feature (7)..(250): Homolog of NCBI NO: 33865849 NR Description: putative transcripton factor [Synechococcus sp.
  misc_feature (6)..(305): Homolog of NCBI NO: 23042127 NR Description: hypothetical protein [Trichodesmium erythraeum
  misc_feature (1)..(309): Homolog of NCBI NO: 17232166 NR Description: putative transcripton factor for heterocyst
  misc_feature (1)..(305): Homolog of NCBI NO: 16331583 NR Description: hypothetical protein [Synechocystis sp. PCC 6803]
  misc_feature (1)..(306): Homolog of NCBI NO: 23124236 NR Description: hypothetical protein [Nostoc punctiforme]
  misc_feature (88)..(309): Homolog of NCBI NO: 30697022 NR Description: contains similarity to phosphoesterase
  misc_feature (1)..(32): Homolog of NCBI NO: 8777321 NR Description: contains similarity to
  misc_feature (103)..(309): Homolog of NCBI NO: 8777321 NR Description: contains similarity to
MASSSLVRIAVVGDIHGFWNLDEDRKALRVLQPDLVLFTGDFGEENVPLVQSVAALTFPKAVILGNHDAWFTQDFPRKEKQKQNGVQMQLDILGDEHIGYQRMDFPSFKLSIVGGRPFSHGGDRLFRKNLLVQRYGVHDMEASAGSICRAAHGTPEDHVAIILAHNGPTGLGWQAEDICGKDWGAEGGDHGDPDLEQAIRQLKETTKLSIPLVVFGHMHKELQRGKGNRKMVVQDSDNQTVYVNGAIVPRVKEAKKRGAAESESGGTTRAFTLVEILDGKIKKIAEIWVHVNGSMAKIVEENTLFEDVT

SEQ ID NO: 22352 - protein, 222 aa, Arabidopsis thaliana
  peptide (1)..(222): Ceres Seq. ID no. 12327109
  misc_feature (1)..(132): Pfam Name: Calcineurin-like phosphoesterase Pfam Description: Calcineurin-like phosphoesterase
  misc_feature (1)..(220): Homolog of NCBI NO: 33861236 NR Description: putative transcripton factor
  misc_feature (1)..(209): Homolog of NCBI NO: 33240462 NR Description: Predicted phosphoesterase
  misc_feature (1)..(163): Homolog of NCBI NO: 33865849 NR Description: putative transcripton factor [Synechococcus sp.
  misc_feature (1)..(218): Homolog of NCBI NO: 23042127 NR Description: hypothetical protein [Trichodesmium erythraeum
  misc_feature (1)..(222): Homolog of NCBI NO: 17232166 NR Description: putative transcripton factor for heterocyst
  misc_feature (1)..(218): Homolog of NCBI NO: 16331583 NR Description: hypothetical protein [Synechocystis sp. PCC 6803]
  misc_feature (1)..(219): Homolog of NCBI NO: 23124236 NR Description: hypothetical protein [Nostoc punctiforme]
  misc_feature (1)..(222): Homolog of NCBI NO: 30697022 NR Description: contains similarity to phosphoesterase
  misc_feature (16)..(222): Homolog of NCBI NO: 8777321 NR Description: contains similarity to
MQLDILGDEHIGYQRMDFPSFKLSIVGGRPFSHGGDRLFRKNLLVQRYGVHDMEASAGSICRAAHGTPEDHVAIILAHNGPTGLGWQAEDICGKDWGAEGGDHGDPDLEQAIRQLKETTKLSIPLVVFGHMHKELQRGKGNRKMVVQDSDNQTVYVNGAIVPRVKEAKKRGAAESESGGTTRAFTLVEILDGKIKKIAEIWVHVNGSMAKIVEENTLFEDVT

SEQ ID NO: 22353 - DNA, 836 bp, Arabidopsis thaliana
  misc_feature (1)..(836): Ceres Seq. ID no. 13496938
  misc_feature: MA Experiment ID: 20000185 Result: Down-regulated in Transcription
  misc_feature: MA Experiment 20000185 PARAMETER Experiment Name: At_Roots__P Parameter: Age (day) Value: 7 vs. 21
  misc_feature: MA Experiment 20000185 PARAMETER Experiment Name: At_Roots__P Parameter: Organism Value: A. thaliana
  misc_feature: MA Experiment 20000185 PARAMETER Experiment Name: At_Roots__P Parameter: Tissue Value: Roots vs. Whole Plant
  misc_feature: MA Experiment ID: 20000265 Result: Up-regulated in Transcription
  misc_feature: MA Experiment 20000265 PARAMETER Experiment Name: At_Open_Flower_P Parameter: Age (day) Value: 21
  misc_feature: MA Experiment 20000265 PARAMETER Experiment Name: At_Open_Flower_P Parameter: Plant Line Value: WS
  misc_feature: MA Experiment 20000265 PARAMETER Experiment Name: At_Open_Flower_P Parameter: Tissue Value: Closed Flower vs. Whole Plant
  misc_feature: MA Experiment ID: 20000286 Result: Up-regulated in Transcription
  misc_feature: MA Experiment 20000286 PARAMETER Experiment Name: At_Open_Flower_P Parameter: Age (day) Value: 21
  misc_feature: MA Experiment 20000286 PARAMETER Experiment Name: At_Open_Flower_P Parameter: Plant Line Value: WS
  misc_feature: MA Experiment 20000286 PARAMETER Experiment Name: At_Open_Flower_P Parameter: Tissue Value: Half Open vs. Whole Plant
  misc_feature: MA Experiment ID: 20000439 Result: Down-regulated in Transcription
  misc_feature: MA Experiment 20000439 PARAMETER Experiment Name: At_Roots__P Parameter: Age (day) Value: 14 vs. 21
  misc_feature: MA Experiment 20000439 PARAMETER Experiment Name: At_Roots__P Parameter: Organism Value: A. thaliana
  misc_feature: MA Experiment 20000439 PARAMETER Experiment Name: At_Roots__P Parameter: Tissue Value: Roots vs. Whole Plant
  misc_feature: MA Experiment ID: 20000495 Result: Up-regulated in Transcription
  misc_feature: MA Experiment 20000495 PARAMETER Experiment Name: At_Guard_Cells_P Parameter: Harvest Date Value: 8/2/2002
  misc_feature: MA Experiment 20000495 PARAMETER Experiment Name: At_Guard_Cells_P Parameter: Organism Value: A. thaliana
  misc_feature: MA Experiment 20000495 PARAMETER Experiment Name: At_Guard_Cells_P Parameter: Tissue Value: Guard Cells vs. Leaves
  misc_feature: MA Experiment ID: 20000794 Result: Down-regulated in Transcription
  misc_feature: MA Experiment 20000794 PARAMETER Experiment Name: At_Petals_P Parameter: Age (day) Value: 23-25 days
  misc_feature: MA Experiment 20000794 PARAMETER Experiment Name: At_Petals_P Parameter: Plant Line Value: WS
  misc_feature: MA Experiment 20000794 PARAMETER Experiment Name: At_Petals_P Parameter: Tissue Value: Petals vs. Whole plant
  misc_feature: MA Experiment ID: 20001247 Result: Down-regulated in Transcription
  misc_feature: MA Experiment 20001247 PARAMETER Experiment Name: At_Far-red-induction_P Parameter: Age (day) Value: 7
  misc_feature: MA Experiment 20001247 PARAMETER Experiment Name: At_Far-red-induction_P Parameter: Light Value: Far-red vs. White
  misc_feature: MA Experiment 20001247 PARAMETER Experiment Name: At_Far-red-induction_P Parameter: Organism Value: A. thaliana
  misc_feature: MA Experiment 20001247 PARAMETER Experiment Name: At_Far-red-induction_P Parameter: Plant Line Value: Columbia
  misc_feature: MA Experiment 20001247 PARAMETER Experiment Name: At_Far-red-induction_P Parameter: Timepoint (hr) Value: 1
  misc_feature: MA Experiment 20001247 PARAMETER Experiment Name: At_Far-red-induction_P Parameter: Tissue Value: Whole Plant
  misc_feature: MA Experiment ID: 20001555 Result: Down-regulated in Transcription
  misc_feature: MA Experiment 20001555 PARAMETER Experiment Name: At_Drought_Soil_Dry_P Parameter: Age (day) Value: 24
  misc_feature: MA Experiment 20001555 PARAMETER Experiment Name: At_Drought_Soil_Dry_P Parameter: Organism Value: A. thaliana
  misc_feature: MA Experiment 20001555 PARAMETER Experiment Name: At_Drought_Soil_Dry_P Parameter: Plant Line Value: WS
  misc_feature: MA Experiment 20001555 PARAMETER Experiment Name: At_Drought_Soil_Dry_P Parameter: Post Timepoint (hr) Value: None
  misc_feature: MA Experiment 20001555 PARAMETER Experiment Name: At_Drought_Soil_Dry_P Parameter: Post-Treatment Value: None
  misc_feature: MA Experiment 20001555 PARAMETER Experiment Name: At_Drought_Soil_Dry_P Parameter: Timepoint (day) Value: 10
  misc_feature: MA Experiment 20001555 PARAMETER Experiment Name: At_Drought_Soil_Dry_P Parameter: Treatment Value: Drought vs. No Drought
  misc_feature: MA Experiment ID: 20001560 Result: Up-regulated in Transcription
  misc_feature: MA Experiment 20001560 PARAMETER Experiment Name: At_Drought_Soil_Dry_P Parameter: Age (day) Value: 28
  misc_feature: MA Experiment 20001560 PARAMETER Experiment Name: At_Drought_Soil_Dry_P Parameter: Organism Value: A. thaliana
  misc_feature: MA Experiment 20001560 PARAMETER Experiment Name: At_Drought_Soil_Dry_P Parameter: Plant Line Value: WS
  misc_feature: MA Experiment 20001560 PARAMETER Experiment Name: At_Drought_Soil_Dry_P Parameter: Post Timepoint (hr) Value: None
  misc_feature: MA Experiment 20001560 PARAMETER Experiment Name: At_Drought_Soil_Dry_P Parameter: Post-Treatment Value: None
  misc_feature: MA Experiment 20001560 PARAMETER Experiment Name: At_Drought_Soil_Dry_P Parameter: Timepoint (day) Value: 14
  misc_feature: MA Experiment 20001560 PARAMETER Experiment Name: At_Drought_Soil_Dry_P Parameter: Treatment Value: Drought vs. No Drought
ctaaaagttatcagaatagaaatctctctctctcaacaagtctaacagtgccatttgtatctctgaactccaaccatggctcctctggttctctaccttctcactctcctcatggctggccataccagtgcctcatggtgtgtgtgcaaaacagggctgagtgactcagtgctacaaaagacattagactatgcttgtggaaatggagctgactgtaacccaactcacccaaaaggctcttgcttcaatcctgacaatgttagggctcattgcaactatgcagtcaatagcttcttccaaaagaaaggtcaagcttctgagtcttgtaacttcactggtactgccactcttaccaccaccgatcccagctatacaggatgtgcattcccttctagtgctagtggttctagtggaagcggtagcaccaccgtgacgccaggcaaaaacagtccaaaaggaagcaacagcatcaccacatttcccggcggaaacagtccatactctggcacaccatccaccggcttattaggaggcaatatcactgatgctactggaaccgggttgaacccggattactcaaccgaaagcagtggatttgcgctctattactccaacaaccttctgttaaccggcttttgttctctcgtgatgatgctctgaactgaagaagaatcactgtcttcttttagtttatgcttagtcaaaaaatatgttatttatatgttcttgttgttttagagataatttaatctggatttcggttcttttttactttccggttttaagaaaacacttatcaatgtaaaaccaaatctactatcgatcggtttggtacg

SEQ ID NO: 22354 - protein, 194 aa, Arabidopsis thaliana
  peptide (1)..(194): Ceres Seq. ID no. 13496939
  misc_feature (1)..(186): Homolog of NCBI NO: 25404810 NR Description: unknown protein, 45065-49536 [imported] -
  misc_feature (1)..(186): Homolog of NCBI NO: 21553768 NR Description: unknown [Arabidopsis thaliana]
  misc_feature (5)..(109): Homolog of NCBI NO: 21326118 NR Description: putative expressed protein [Sorghum bicolor]
  misc_feature (1)..(186): Homolog of NCBI NO: 18409239 NR Description: expressed protein [Arabidopsis thaliana]
  misc_feature (1)..(186): Homolog of NCBI NO: 30683485 NR Description: expressed protein [Arabidopsis thaliana]
  misc_feature (1)..(192): Homolog of NCBI NO: 22775658 NR Description: contains ESTs
  misc_feature (1)..(176): Homolog of NCBI NO: 18394637 NR Description: glycosyl hydrolase family 17 [Arabidopsis
  misc_feature (1)..(193): Homolog of NCBI NO: 30697478 NR Description: glycosyl hydrolase family 17 [Arabidopsis
  misc_feature (1)..(194): Homolog of NCBI NO: 21592859 NR Description: unknown [Arabidopsis thaliana]
  misc_feature (1)..(194): Homolog of NCBI NO: 15241485 NR Description: glycosyl hydrolase family 17 [Arabidopsis
MAPLVLYLLTLLMAGHTSASWCVCKTGLSDSVLQKTLDYACGNGADCNPTHPKGSCFNPDNVRAHCNYAVNSFFQKKGQASESCNFTGTATLTTTDPSYTGCAFPSSASGSSGSGSTTVTPGKNSPKGSNSITTFPGGNSPYSGTPSTGLLGGNITDATGTGLNPDYSTESSGFALYYSNNLLLTGFCSLVMML

SEQ ID NO: 22355 - protein, 182 aa, Arabidopsis thaliana
  peptide (1)..(182): Ceres Seq. ID no. 13496940
  misc_feature (1)..(174): Homolog of NCBI NO: 25404810 NR Description: unknown protein, 45065-49536 [imported] -
  misc_feature (1)..(174): Homolog of NCBI NO: 21553768 NR Description: unknown [Arabidopsis thaliana]
  misc_feature (1)..(97): Homolog of NCBI NO: 21326118 NR Description: putative expressed protein [Sorghum bicolor]
  misc_feature (1)..(174): Homolog of NCBI NO: 18409239 NR Description: expressed protein [Arabidopsis thaliana]
  misc_feature (1)..(174): Homolog of NCBI NO: 30683485 NR Description: expressed protein [Arabidopsis thaliana]
  misc_feature (1)..(180): Homolog of NCBI NO: 22775658 NR Description: contains ESTs
  misc_feature (1)..(164): Homolog of NCBI NO: 18394637 NR Description: glycosyl hydrolase family 17 [Arabidopsis
  misc_feature (1)..(181): Homolog of NCBI NO: 30697478 NR Description: glycosyl hydrolase family 17 [Arabidopsis
  misc_feature (1)..(182): Homolog of NCBI NO: 21592859 NR Description: unknown [Arabidopsis thaliana]
  misc_feature (1)..(182): Homolog of NCBI NO: 15241485 NR Description: glycosyl hydrolase family 17 [Arabidopsis
MAGHTSASWCVCKTGLSDSVLQKTLDYACGNGADCNPTHPKGSCFNPDNVRAHCNYAVNSFFQKKGQASESCNFTGTATLTTTDPSYTGCAFPSSASGSSGSGSTTVTPGKNSPKGSNSITTFPGGNSPYSGTPSTGLLGGNITDATGTGLNPDYSTESSGFALYYSNNLLLTGFCSLVMML

SEQ ID NO: 22356 - DNA, 812 bp, Arabidopsis thaliana
  misc_feature (1)..(812): Ceres Seq. ID no. 12334024
  misc_feature: MA Experiment ID: 108433 Result: Up-regulated in Transcription
  misc_feature: MA Experiment 108433 PARAMETER Experiment Name: At_rhl_Mutant2_cDNA_P Parameter: Age (day) Value: 7
  misc_feature: MA Experiment 108433 PARAMETER Experiment Name: At_rhl_Mutant2_cDNA_P Parameter: Organism Value: A. thaliana
  misc_feature: MA Experiment 108433 PARAMETER Experiment Name: At_rhl_Mutant2_cDNA_P Parameter: Plant Line Value: rhl Mutant vs. wt landsburg
  misc_feature: MA Experiment 108433 PARAMETER Experiment Name: At_rhl_Mutant2_cDNA_P Parameter: Tissue Value: Roots
  misc_feature: MA Experiment ID: 108434 Result: Down-regulated in Transcription
  misc_feature: MA Experiment 108434 PARAMETER Experiment Name: At_Root_Tips_cDNA_P Parameter: Tissue Value: Root Tips
  misc_feature: MA Experiment ID: 108462 Result: Up-regulated in Transcription
  misc_feature: MA Experiment 108462 PARAMETER Experiment Name: At_Germinating_Seeds_cDNA_P Parameter: Age (day) Value: 2 vs. 0
  misc_feature: MA Experiment 108462 PARAMETER Experiment Name: At_Germinating_Seeds_cDNA_P Parameter: Tissue Value: Germinating Seeds
  misc_feature: MA Experiment ID: 108463 Result: Up-regulated in Transcription
  misc_feature: MA Experiment 108463 PARAMETER Experiment Name: At_Germinating_Seeds_cDNA_P Parameter: Age (day) Value: 3 vs. 0
  misc_feature: MA Experiment 108463 PARAMETER Experiment Name: At_Germinating_Seeds_cDNA_P Parameter: Tissue Value: Germinating Seeds
  misc_feature: MA Experiment ID: 108464 Result: Up-regulated in Transcription
  misc_feature: MA Experiment 108464 PARAMETER Experiment Name: At_Germinating_Seeds_cDNA_P Parameter: Age (day) Value: 4 vs. 0
  misc_feature: MA Experiment 108464 PARAMETER Experiment Name: At_Germinating_Seeds_cDNA_P Parameter: Tissue Value: Germinating Seeds
  misc_feature: MA Experiment ID: 108501 Result: Up-regulated in Transcription
  misc_feature: MA Experiment 108501 PARAMETER Experiment Name: At_ap2_floral_buds_cDNA_P Parameter: Plant Line Value: ap2 (Ler.)
  misc_feature: MA Experiment 108501 PARAMETER Experiment Name: At_ap2_floral_buds_cDNA_P Parameter: Tissue Value: Closed Flower
  misc_feature: MA Experiment ID: 20000112 Result: Down-regulated in Transcription
  misc_feature: MA Experiment 20000112 PARAMETER Experiment Name: At_42deg_Heat_cDNA_P Parameter: Temperature (deg C) Value: 42 vs. 22
  misc_feature: MA Experiment 20000112 PARAMETER Experiment Name: At_42deg_Heat_cDNA_P Parameter: Timepoint (hr) Value: 2
  misc_feature: MA Experiment 20000112 PARAMETER Experiment Name: At_42deg_Heat_cDNA_P Parameter: Tissue Value: Aerial
  misc_feature: MA Experiment ID: 20000182 Result: Up-regulated in Transcription
  misc_feature: MA Experiment 20000182 PARAMETER Experiment Name: At_2mM_SA_P Parameter: Age (day) Value: 14
  misc_feature: MA Experiment 20000182 PARAMETER Experiment Name: At_2mM_SA_P Parameter: Organism Value: A. thaliana
  misc_feature: MA Experiment 20000182 PARAMETER Experiment Name: At_2mM_SA_P Parameter: Plant Line Value: WS
  misc_feature: MA Experiment 20000182 PARAMETER Experiment Name: At_2mM_SA_P Parameter: Timepoint (hr) Value: 6
  misc_feature: MA Experiment 20000182 PARAMETER Experiment Name: At_2mM_SA_P Parameter: Tissue Value: Aerial
  misc_feature: MA Experiment 20000182 PARAMETER Experiment Name: At_2mM_SA_P Parameter: Treatment Value: 2mM SA vs. No Treatment
  misc_feature: MA Experiment ID: 20000185 Result: Down-regulated in Transcription
  misc_feature: MA Experiment 20000185 PARAMETER Experiment Name: At_Roots__P Parameter: Age (day) Value: 7 vs. 21
  misc_feature: MA Experiment 20000185 PARAMETER Experiment Name: At_Roots__P Parameter: Organism Value: A. thaliana
  misc_feature: MA Experiment 20000185 PARAMETER Experiment Name: At_Roots__P Parameter: Tissue Value: Roots vs. Whole Plant
  misc_feature: MA Experiment ID: 20000441 Result: Up-regulated in Transcription
  misc_feature: MA Experiment 20000441 PARAMETER Experiment Name: At_1uM_BR-BRZ__P Parameter: Tissue Value: Shoot Apices
  misc_feature: MA Experiment 20000441 PARAMETER Experiment Name: At_1uM_BR-BRZ__P Parameter: Treatment Value: 1uM BR vs. No Treatment
  misc_feature: MA Experiment ID: 20000495 Result: Up-regulated in Transcription
  misc_feature: MA Experiment 20000495 PARAMETER Experiment Name: At_Guard_Cells_P Parameter: Harvest Date Value: 8/2/2002
  misc_feature: MA Experiment 20000495 PARAMETER Experiment Name: At_Guard_Cells_P Parameter: Organism Value: A. thaliana
  misc_feature: MA Experiment 20000495 PARAMETER Experiment Name: At_Guard_Cells_P Parameter: Tissue Value: Guard Cells vs. Leaves
  misc_feature: MA Experiment ID: 20001248 Result: Up-regulated in Transcription
  misc_feature: MA Experiment 20001248 PARAMETER Experiment Name: At_Far-red-induction_P Parameter: Age (day) Value: 7
  misc_feature: MA Experiment 20001248 PARAMETER Experiment Name: At_Far-red-induction_P Parameter: Light Value: Far-red vs. White
  misc_feature: MA Experiment 20001248 PARAMETER Experiment Name: At_Far-red-induction_P Parameter: Organism Value: A. thaliana
  misc_feature: MA Experiment 20001248 PARAMETER Experiment Name: At_Far-red-induction_P Parameter: Plant Line Value: Columbia
  misc_feature: MA Experiment 20001248 PARAMETER Experiment Name: At_Far-red-induction_P Parameter: Timepoint (hr) Value: 4
  misc_feature: MA Experiment 20001248 PARAMETER Experiment Name: At_Far-red-induction_P Parameter: Tissue Value: Whole Plant
  misc_feature: MA Experiment ID: 20001450 Result: Up-regulated in Transcription
  misc_feature: MA Experiment 20001450 PARAMETER Experiment Name: At_Far-red-induction_P Parameter: Age (day) Value: 7
  misc_feature: MA Experiment 20001450 PARAMETER Experiment Name: At_Far-red-induction_P Parameter: Light Value: Far-red vs. White
  misc_feature: MA Experiment 20001450 PARAMETER Experiment Name: At_Far-red-induction_P Parameter: Organism Value: A. thaliana
  misc_feature: MA Experiment 20001450 PARAMETER Experiment Name: At_Far-red-induction_P Parameter: Plant Line Value: Columbia
  misc_feature: MA Experiment 20001450 PARAMETER Experiment Name: At_Far-red-induction_P Parameter: Timepoint (hr) Value: 8
  misc_feature: MA Experiment 20001450 PARAMETER Experiment Name: At_Far-red-induction_P Parameter: Tissue Value: Whole Plant
  misc_feature: MA Experiment ID: 20001906 Result: Down-regulated in Transcription
  misc_feature: MA Experiment 20001906 PARAMETER Experiment Name: At_Drought_Reproduction_P Parameter: Age (day) Value: 35
  misc_feature: MA Experiment 20001906 PARAMETER Experiment Name: At_Drought_Reproduction_P Parameter: Organism Value: A. thaliana
  misc_feature: MA Experiment 20001906 PARAMETER Experiment Name: At_Drought_Reproduction_P Parameter: Plant Line Value: WS
  misc_feature: MA Experiment 20001906 PARAMETER Experiment Name: At_Drought_Reproduction_P Parameter: Timepoint (day) Value: 5
  misc_feature: MA Experiment 20001906 PARAMETER Experiment Name: At_Drought_Reproduction_P Parameter: Tissue Value: Siliques
  misc_feature: MA Experiment 20001906 PARAMETER Experiment Name: At_Drought_Reproduction_P Parameter: Treatment Value: Drought vs. No Drought
aaagaagaaataaacagagtaaaaaacttaaagcttaaaatggggaggcagctttatacgacgacggttctctacttagtcaccctactcttcatttgccggacaatctcagccgtccgtttccctccggaacaaccaacaaccgatgatctagatttcatccgtacgagctgcaacacaacgctgtatccagacgtatgttacacgtctctagctggatacgcctccgccgtccaagataatccggcaaggctagctaaactcgcaatcggcgtttctctctcccgcgcaaaatacacggcggcttacctctccaaactctcacgtcgcgctgcctcagctgctgtccacgactgcgtttcgaacgtgggagatgccgtggatcagatgcgtggctccctaaggcagctccgagagatgaaccaccgtcgtcccggagatccggcgtttaggtttcagatgagtaacgtgcagacgtggatgagcgcggcgttgacggacgaggagacgtgtacggatggggtcacggaggagatggaagacggagagacgaagacggctatttgcgatagagtcgccgacgtcaagaggttcacgagtaatgcgctcgctctcgttaatacctacgccaacaatggagcctaactaactaagctaggtcttgaaattcctaaagttataaaaacacttgtatatatatatgtgttaagttgtgtgcttagtttataatgtgtattcgaggctttgaaaccgagttagaactctgagtttgggtgttcaaattatacattaatctatgtttgattgtattg

SEQ ID NO: 22357 - protein, 214 aa, Arabidopsis thaliana
  peptide (1)..(214): Ceres Seq. ID no. 12334025
  misc_feature (22)..(211): Homolog of NCBI NO: 18409660 NR Description: expressed protein
  misc_feature (26)..(211): Homolog of NCBI NO: 21554277 NR Description: unknown [Arabidopsis thaliana]
  misc_feature (17)..(214): Homolog of NCBI NO: 15226321 NR Description: unknown protein; protein id: At2g01610.1
  misc_feature (14)..(214): Homolog of NCBI NO: 18394174 NR Description: expressed protein
  misc_feature (14)..(211): Homolog of NCBI NO: 15234982 NR Description: putative protein
  misc_feature (14)..(210): Homolog of NCBI NO: 15232790 NR Description: putative protein; protein id: At3g47380.1
  misc_feature (53)..(210): Homolog of NCBI NO: 112717 NR Description: 21 KD PROTEIN PRECURSOR (1.2 PROTEIN)
  misc_feature (48)..(207): Homolog of NCBI NO: 21555465 NR Description: unknown [Arabidopsis thaliana]
  misc_feature (48)..(207): Homolog of NCBI NO: 15220674 NR Description: Unknown protein
  misc_feature (22)..(211): Homolog of NCBI NO: 25406069 NR Description: hypothetical protein F5A18.10 [imported] -
KEEINRVKNLKLKMGRQLYTTTVLYLVTLLFICRTISAVRFPPEQPTTDDLDFIRTSCNTTLYPDVCYTSLAGYASAVQDNPARLAKLAIGVSLSRAKYTAAYLSKLSRRAASAAVHDCVSNVGDAVDQMRGSLRQLREMNHRRPGDPAFRFQMSNVQTWMSAALTDEETCTDGVTEEMEDGETKTAICDRVADVKRFTSNALALVNTYANNGA

SEQ ID NO: 22358 - protein, 201 aa, Arabidopsis thaliana
  peptide (1)..(201): Ceres Seq. ID no. 12334026
  misc_feature (1)..(198): Homolog of NCBI NO: 15234982 NR Description: putative protein
  misc_feature (1)..(197): Homolog of NCBI NO: 15232790 NR Description: putative protein; protein id: At3g47380.1
  misc_feature (40)..(197): Homolog of NCBI NO: 112717 NR Description: 21 KD PROTEIN PRECURSOR (1.2 PROTEIN)
  misc_feature (35)..(194): Homolog of NCBI NO: 21555465 NR Description: unknown [Arabidopsis thaliana]
  misc_feature (35)..(194): Homolog of NCBI NO: 15220674 NR Description: Unknown protein
  misc_feature (9)..(198): Homolog of NCBI NO: 25406069 NR Description: hypothetical protein F5A18.10 [imported] -
  misc_feature (9)..(198): Homolog of NCBI NO: 18409660 NR Description: expressed protein
  misc_feature (13)..(198): Homolog of NCBI NO: 21554277 NR Description: unknown [Arabidopsis thaliana]
  misc_feature (4)..(201): Homolog of NCBI NO: 15226321 NR Description: unknown protein; protein id: At2g01610.1
  misc_feature (1)..(201): Homolog of NCBI NO: 18394174 NR Description: expressed protein
MGRQLYTTTVLYLVTLLFICRTISAVRFPPEQPTTDDLDFIRTSCNTTLYPDVCYTSLAGYASAVQDNPARLAKLAIGVSLSRAKYTAAYLSKLSRRAASAAVHDCVSNVGDAVDQMRGSLRQLREMNHRRPGDPAFRFQMSNVQTWMSAALTDEETCTDGVTEEMEDGETKTAICDRVADVKRFTSNALALVNTYANNGA

SEQ ID NO: 22359 - DNA, 1204 bp, Arabidopsis thaliana
  misc_feature (1)..(1204): Ceres Seq. ID no. 13490357
  misc_feature: MA Experiment ID: 108434 Result: Down-regulated in Transcription
  misc_feature: MA Experiment 108434 PARAMETER Experiment Name: At_Root_Tips_cDNA_P Parameter: Tissue Value: Root Tips
  misc_feature: MA Experiment ID: 108461 Result: Up-regulated in Transcription
  misc_feature: MA Experiment 108461 PARAMETER Experiment Name: At_Germinating_Seeds_cDNA_P Parameter: Age (day) Value: 1 vs. 0
  misc_feature: MA Experiment 108461 PARAMETER Experiment Name: At_Germinating_Seeds_cDNA_P Parameter: Tissue Value: Germinating Seeds
  misc_feature: MA Experiment ID: 108462 Result: Up-regulated in Transcription
  misc_feature: MA Experiment 108462 PARAMETER Experiment Name: At_Germinating_Seeds_cDNA_P Parameter: Age (day) Value: 2 vs. 0
  misc_feature: MA Experiment 108462 PARAMETER Experiment Name: At_Germinating_Seeds_cDNA_P Parameter: Tissue Value: Germinating Seeds
  misc_feature: MA Experiment ID: 108463 Result: Up-regulated in Transcription
  misc_feature: MA Experiment 108463 PARAMETER Experiment Name: At_Germinating_Seeds_cDNA_P Parameter: Age (day) Value: 3 vs. 0
  misc_feature: MA Experiment 108463 PARAMETER Experiment Name: At_Germinating_Seeds_cDNA_P Parameter: Tissue Value: Germinating Seeds
  misc_feature: MA Experiment ID: 108464 Result: Up-regulated in Transcription
  misc_feature: MA Experiment 108464 PARAMETER Experiment Name: At_Germinating_Seeds_cDNA_P Parameter: Age (day) Value: 4 vs. 0
  misc_feature: MA Experiment 108464 PARAMETER Experiment Name: At_Germinating_Seeds_cDNA_P Parameter: Tissue Value: Germinating Seeds
  misc_feature: MA Experiment ID: 108595 Result: Up-regulated in Transcription
  misc_feature: MA Experiment 108595 PARAMETER Experiment Name: At_Ler-pi_Ovule_cDNA_P Parameter: Plant Line Value: null
  misc_feature: MA Experiment ID: 20000180 Result: Up-regulated in Transcription
  misc_feature: MA Experiment 20000180 PARAMETER Experiment Name: At_Germinating_Seeds_P Parameter: Age (hr) Value: 24 vs. 0
  misc_feature: MA Experiment 20000180 PARAMETER Experiment Name: At_Germinating_Seeds_P Parameter: Tissue Value: Germinating Seeds
  misc_feature: MA Experiment ID: 20000185 Result: Up-regulated in Transcription
  misc_feature: MA Experiment 20000185 PARAMETER Experiment Name: At_Roots__P Parameter: Age (day) Value: 7 vs. 21
  misc_feature: MA Experiment 20000185 PARAMETER Experiment Name: At_Roots__P Parameter: Organism Value: A. thaliana
  misc_feature: MA Experiment 20000185 PARAMETER Experiment Name: At_Roots__P Parameter: Tissue Value: Roots vs. Whole Plant
  misc_feature: MA Experiment ID: 20000227 Result: Down-regulated in Transcription
  misc_feature: MA Experiment 20000227 PARAMETER Experiment Name: At_Root-Tips-vs-Tops_P Parameter: Tissue Value: Root Tips vs. Root Tops
  misc_feature: MA Experiment ID: 20000439 Result: Up-regulated in Transcription
  misc_feature: MA Experiment 20000439 PARAMETER Experiment Name: At_Roots__P Parameter: Age (day) Value: 14 vs. 21
  misc_feature: MA Experiment 20000439 PARAMETER Experiment Name: At_Roots__P Parameter: Organism Value: A. thaliana
  misc_feature: MA Experiment 20000439 PARAMETER Experiment Name: At_Roots__P Parameter: Tissue Value: Roots vs. Whole Plant
gtctcaattattctccccgcccctctatgtagacgtgtgaatattagagagattgataacgaactcctcacaacatcatatctcaagttcaccacccaaaagaaaaaacacacacacatcttagagagatgaaagagactaattttggcgagaaaacgcgcgttctggtagttggtgggacgggatcattggggaggaggattgtaagtgcgtgtttggctgagggacacgagacttatgttctccagcggccggagattggagtggacatcgagaaggtgcagctacttctttctttcaaaagactcggcgcacatcttgtggaaggctcattctccgatcaccaaagccttgtctctgccgtaaagcaagtcgacgtggttgtctccgccatgtccggtgtccacttccgcacccacaacatccccgttcagctcaagctcgtcgcagccatcaaagaggccggtaacgtcaagcgtttcttaccatcagaatttggaatggatccgtcacgtatgggacatgccatgccaccaggaagtgaaacatttgatcaaaaaatggaaatacgaaatgcaattaaggccgccgggatctcccacacatacctcgtcggtgcttgttttgccgcatacttcggcggaaatttatctcaaatgggaactttgttccctccgaaaaacaaagttgatatttatggggacggaaatgttaaagtggtgttcgtagatgaagatgacatggcaaaatatacagcgaagacgcttaatgatccccgaacgttgaataaaactgtgtatgttagacctaccgacaacattctcacacaaatggaactagttcagatatgggagaaactaaccgaaaaagagttggagaagacctatgtttcaggaaacgactttcttgctgacattgaagataaggagatatcacaccaagcgggactaggacacttttatcacatatactacgaaggttgtctcacagatcatgaagttggagacgacgaagaagctactaaactctatccggatgtgaagtacaaacgcatggatgaatatttgaaaattttcgtataatgttacatatatgtgaaacacatcgccatttccttatttttatgttttaccatggccttttgttttgtttgcttgaagatgttttccgaatttattttaaaatttaaatgtttcagttatgg

SEQ ID NO: 22360 - protein, 317 aa, Arabidopsis thaliana
  peptide (1)..(317): Ceres Seq. ID no. 13490358
  misc_feature (7)..(317): Pfam Name: Isoflavone reductase Pfam Description: Isoflavone reductase
  misc_feature (8)..(317): Homolog of NCBI NO: 7542585 NR Description: pinoresinol-lariciresinol reductase [Thuja
  misc_feature (8)..(317): Homolog of NCBI NO: 7542583 NR Description: pinoresinol-lariciresinol reductase [Thuja
  misc_feature (8)..(317): Homolog of NCBI NO: 7542588 NR Description: pinoresinol-lariciresinol reductase [Thuja
  misc_feature (8)..(317): Homolog of NCBI NO: 38492951 NR Description: Chain A, Crystal Structures Of And Phenylcoumaran Benzylic Ether Reductases, And Their
  misc_feature (10)..(317): Homolog of NCBI NO: 7578917 NR Description: pinoresinol-lariciresinol reductase TH2 [Tsuga
  misc_feature (9)..(317): Homolog of NCBI NO: 1769556 NR Description: Forsythia x intermedia
  misc_feature (9)..(317): Homolog of NCBI NO: 1708424 NR Description: ISOFLAVONE REDUCTASE HOMOLOG
  misc_feature (1)..(317): Homolog of NCBI NO: 21592830 NR Description: pinoresinol-lariciresinol reductase, putative
  misc_feature (1)..(317): Homolog of NCBI NO: 15222571 NR Description: pinoresinol-lariciresinol reductase, putative
  misc_feature (1)..(317): Homolog of NCBI NO: 15236330 NR Description: pinoresinol-lariciresinol reductase, putative
MKETNFGEKTRVLVVGGTGSLGRRIVSACLAEGHETYVLQRPEIGVDIEKVQLLLSFKRLGAHLVEGSFSDHQSLVSAVKQVDVVVSAMSGVHFRTHNIPVQLKLVAAIKEAGNVKRFLPSEFGMDPSRMGHAMPPGSETFDQKMEIRNAIKAAGISHTYLVGACFAAYFGGNLSQMGTLFPPKNKVDIYGDGNVKVVFVDEDDMAKYTAKTLNDPRTLNKTVYVRPTDNILTQMELVQIWEKLTEKELEKTYVSGNDFLADIEDKEISHQAGLGHFYHIYYEGCLTDHEVGDDEEATKLYPDVKYKRMDEYLKIFV

SEQ ID NO: 22361 - protein, 229 aa, Arabidopsis thaliana
  peptide (1)..(229): Ceres Seq. ID no. 13490359
  misc_feature (1)..(229): Pfam Name: Isoflavone reductase Pfam Description: Isoflavone reductase
  misc_feature (1)..(229): Homolog of NCBI NO: 7542585 NR Description: pinoresinol-lariciresinol reductase [Thuja
  misc_feature (1)..(229): Homolog of NCBI NO: 7542583 NR Description: pinoresinol-lariciresinol reductase [Thuja
  misc_feature (1)..(229): Homolog of NCBI NO: 7542588 NR Description: pinoresinol-lariciresinol reductase [Thuja
  misc_feature (1)..(229): Homolog of NCBI NO: 38492951 NR Description: Chain A, Crystal Structures Of And Phenylcoumaran Benzylic Ether Reductases, And Their
  misc_feature (1)..(229): Homolog of NCBI NO: 7578917 NR Description: pinoresinol-lariciresinol reductase TH2 [Tsuga
  misc_feature (1)..(229): Homolog of NCBI NO: 1769556 NR Description: Forsythia x intermedia
  misc_feature (1)..(229): Homolog of NCBI NO: 1708424 NR Description: ISOFLAVONE REDUCTASE HOMOLOG
  misc_feature (1)..(229): Homolog of NCBI NO: 21592830 NR Description: pinoresinol-lariciresinol reductase, putative
  misc_feature (1)..(229): Homolog of NCBI NO: 15222571 NR Description: pinoresinol-lariciresinol reductase, putative
  misc_feature (1)..(229): Homolog of NCBI NO: 15236330 NR Description: pinoresinol-lariciresinol reductase, putative
MSGVHFRTHNIPVQLKLVAAIKEAGNVKRFLPSEFGMDPSRMGHAMPPGSETFDQKMEIRNAIKAAGISHTYLVGACFAAYFGGNLSQMGTLFPPKNKVDIYGDGNVKVVFVDEDDMAKYTAKTLNDPRTLNKTVYVRPTDNILTQMELVQIWEKLTEKELEKTYVSGNDFLADIEDKEISHQAGLGHFYHIYYEGCLTDHEVGDDEEATKLYPDVKYKRMDEYLKIFV

SEQ ID NO: 22362 - protein, 193 aa, Arabidopsis thaliana
  peptide (1)..(193): Ceres Seq. ID no. 13490360
  misc_feature (1)..(193): Pfam Name: Isoflavone reductase Pfam Description: Isoflavone reductase
  misc_feature (1)..(193): Homolog of NCBI NO: 7542585 NR Description: pinoresinol-lariciresinol reductase [Thuja
  misc_feature (1)..(193): Homolog of NCBI NO: 7542583 NR Description: pinoresinol-lariciresinol reductase [Thuja
  misc_feature (1)..(193): Homolog of NCBI NO: 7542588 NR Description: pinoresinol-lariciresinol reductase [Thuja
  misc_feature (1)..(193): Homolog of NCBI NO: 38492951 NR Description: Chain A, Crystal Structures Of And Phenylcoumaran Benzylic Ether Reductases, And Their
  misc_feature (1)..(193): Homolog of NCBI NO: 7578917 NR Description: pinoresinol-lariciresinol reductase TH2 [Tsuga
  misc_feature (1)..(193): Homolog of NCBI NO: 1769556 NR Description: Forsythia x intermedia
  misc_feature (1)..(193): Homolog of NCBI NO: 1708424 NR Description: ISOFLAVONE REDUCTASE HOMOLOG
  misc_feature (1)..(193): Homolog of NCBI NO: 21592830 NR Description: pinoresinol-lariciresinol reductase, putative
  misc_feature (1)..(193): Homolog of NCBI NO: 15222571 NR Description: pinoresinol-lariciresinol reductase, putative
  misc_feature (1)..(193): Homolog of NCBI NO: 15236330 NR Description: pinoresinol-lariciresinol reductase, putative
MDPSRMGHAMPPGSETFDQKMEIRNAIKAAGISHTYLVGACFAAYFGGNLSQMGTLFPPKNKVDIYGDGNVKVVFVDEDDMAKYTAKTLNDPRTLNKTVYVRPTDNILTQMELVQIWEKLTEKELEKTYVSGNDFLADIEDKEISHQAGLGHFYHIYYEGCLTDHEVGDDEEATKLYPDVKYKRMDEYLKIFV

SEQ ID NO: 22363 - DNA, 1660 bp, Arabidopsis thaliana
  misc_feature (1)..(1660): Ceres Seq. ID no. 12327451
  misc_feature: MA Experiment ID: 20000169 Result: Up-regulated in Transcription
  misc_feature: MA Experiment 20000169 PARAMETER Experiment Name: At_100uM_ABA_P Parameter: Age (day) Value: 14
  misc_feature: MA Experiment 20000169 PARAMETER Experiment Name: At_100uM_ABA_P Parameter: Organism Value: A. thaliana
  misc_feature: MA Experiment 20000169 PARAMETER Experiment Name: At_100uM_ABA_P Parameter: Plant Line Value: WS
  misc_feature: MA Experiment 20000169 PARAMETER Experiment Name: At_100uM_ABA_P Parameter: Timepoint (hr) Value: 6
  misc_feature: MA Experiment 20000169 PARAMETER Experiment Name: At_100uM_ABA_P Parameter: Tissue Value: Aerial
  misc_feature: MA Experiment 20000169 PARAMETER Experiment Name: At_100uM_ABA_P Parameter: Treatment Value: 100uM ABA vs. No Treatment
  misc_feature: MA Experiment ID: 20000179 Result: Up-regulated in Transcription
  misc_feature: MA Experiment 20000179 PARAMETER Experiment Name: At_Germinating_Seeds_P Parameter: Age (hr) Value: 6 vs. 0
  misc_feature: MA Experiment 20000179 PARAMETER Experiment Name: At_Germinating_Seeds_P Parameter: Tissue Value: Germinating Seeds
  misc_feature: MA Experiment ID: 20000184 Result: Down-regulated in Transcription
  misc_feature: MA Experiment 20000184 PARAMETER Experiment Name: At_Shoots__P Parameter: Age (day) Value: 7
  misc_feature: MA Experiment 20000184 PARAMETER Experiment Name: At_Shoots__P Parameter: Tissue Value: Shoots vs. Whole Plant
  misc_feature: MA Experiment ID: 20000185 Result: Down-regulated in Transcription
  misc_feature: MA Experiment 20000185 PARAMETER Experiment Name: At_Roots__P Parameter: Age (day) Value: 7 vs. 21
  misc_feature: MA Experiment 20000185 PARAMETER Experiment Name: At_Roots__P Parameter: Organism Value: A. thaliana
  misc_feature: MA Experiment 20000185 PARAMETER Experiment Name: At_Roots__P Parameter: Tissue Value: Roots vs. Whole Plant
  misc_feature: MA Experiment ID: 20000227 Result: Up-regulated in Transcription
  misc_feature: MA Experiment 20000227 PARAMETER Experiment Name: At_Root-Tips-vs-Tops_P Parameter: Tissue Value: Root Tips vs. Root Tops
  misc_feature: MA Experiment ID: 20000267 Result: Up-regulated in Transcription
  misc_feature: MA Experiment 20000267 PARAMETER Experiment Name: At_Drought_P Parameter: Age (day) Value: 7
  misc_feature: MA Experiment 20000267 PARAMETER Experiment Name: At_Drought_P Parameter: Organism Value: A. thaliana
  misc_feature: MA Experiment 20000267 PARAMETER Experiment Name: At_Drought_P Parameter: Plant Line Value: WS
  misc_feature: MA Experiment 20000267 PARAMETER Experiment Name: At_Drought_P Parameter: Timepoint (hr) Value: 6
  misc_feature: MA Experiment 20000267 PARAMETER Experiment Name: At_Drought_P Parameter: Tissue Value: Whole Plant
  misc_feature: MA Experiment 20000267 PARAMETER Experiment Name: At_Drought_P Parameter: Treatment Value: Drought vs. No Drought
  misc_feature: MA Experiment ID: 20000436 Result: Up-regulated in Transcription
  misc_feature: MA Experiment 20000436 PARAMETER Experiment Name: At_Drought_P Parameter: Age (day) Value: 7
  misc_feature: MA Experiment 20000436 PARAMETER Experiment Name: At_Drought_P Parameter: Organism Value: A. thaliana
  misc_feature: MA Experiment 20000436 PARAMETER Experiment Name: At_Drought_P Parameter: Plant Line Value: WS
  misc_feature: MA Experiment 20000436 PARAMETER Experiment Name: At_Drought_P Parameter: Timepoint (hr) Value: 12
  misc_feature: MA Experiment 20000436 PARAMETER Experiment Name: At_Drought_P Parameter: Tissue Value: Whole Plant
  misc_feature: MA Experiment 20000436 PARAMETER Experiment Name: At_Drought_P Parameter: Treatment Value: Drought vs. No Drought
  misc_feature: MA Experiment ID: 20000437 Result: Up-regulated in Transcription
  misc_feature: MA Experiment 20000437 PARAMETER Experiment Name: At_Drought_P Parameter: Age (day) Value: 8
  misc_feature: MA Experiment 20000437 PARAMETER Experiment Name: At_Drought_P Parameter: Organism Value: A. thaliana
  misc_feature: MA Experiment 20000437 PARAMETER Experiment Name: At_Drought_P Parameter: Plant Line Value: WS
  misc_feature: MA Experiment 20000437 PARAMETER Experiment Name: At_Drought_P Parameter: Timepoint (hr) Value: 24
  misc_feature: MA Experiment 20000437 PARAMETER Experiment Name: At_Drought_P Parameter: Tissue Value: Whole Plant
  misc_feature: MA Experiment 20000437 PARAMETER Experiment Name: At_Drought_P Parameter: Treatment Value: Drought vs. No Drought
  misc_feature: MA Experiment ID: 20000438 Result: Down-regulated in Transcription
  misc_feature: MA Experiment 20000438 PARAMETER Experiment Name: At_Shoots__P Parameter: Age (day) Value: 14
  misc_feature: MA Experiment 20000438 PARAMETER Experiment Name: At_Shoots__P Parameter: Tissue Value: Shoots vs. Whole Plant
  misc_feature: MA Experiment ID: 20000439 Result: Down-regulated in Transcription
  misc_feature: MA Experiment 20000439 PARAMETER Experiment Name: At_Roots__P Parameter: Age (day) Value: 14 vs. 21
  misc_feature: MA Experiment 20000439 PARAMETER Experiment Name: At_Roots__P Parameter: Organism Value: A. thaliana
  misc_feature: MA Experiment 20000439 PARAMETER Experiment Name: At_Roots__P Parameter: Tissue Value: Roots vs. Whole Plant
  misc_feature: MA Experiment ID: 20000453 Result: Up-regulated in Transcription
  misc_feature: MA Experiment 20000453 PARAMETER Experiment Name: At_100uM_ABA_P Parameter: Age (day) Value: 15
  misc_feature: MA Experiment 20000453 PARAMETER Experiment Name: At_100uM_ABA_P Parameter: Organism Value: A. thaliana
  misc_feature: MA Experiment 20000453 PARAMETER Experiment Name: At_100uM_ABA_P Parameter: Plant Line Value: WS
  misc_feature: MA Experiment 20000453 PARAMETER Experiment Name: At_100uM_ABA_P Parameter: Timepoint (hr) Value: 24
  misc_feature: MA Experiment 20000453 PARAMETER Experiment Name: At_100uM_ABA_P Parameter: Tissue Value: Aerial
  misc_feature: MA Experiment 20000453 PARAMETER Experiment Name: At_100uM_ABA_P Parameter: Treatment Value: 100uM ABA vs. No Treatment
  misc_feature: MA Experiment ID: 20000495 Result: Up-regulated in Transcription
  misc_feature: MA Experiment 20000495 PARAMETER Experiment Name: At_Guard_Cells_P Parameter: Harvest Date Value: 8/2/2002
  misc_feature: MA Experiment 20000495 PARAMETER Experiment Name: At_Guard_Cells_P Parameter: Organism Value: A. thaliana
  misc_feature: MA Experiment 20000495 PARAMETER Experiment Name: At_Guard_Cells_P Parameter: Tissue Value: Guard Cells vs. Leaves
  misc_feature: MA Experiment ID: 20001451 Result: Up-regulated in Transcription
  misc_feature: MA Experiment 20001451 PARAMETER Experiment Name: At_Far-red-induction_P Parameter: Age (day) Value: 7
  misc_feature: MA Experiment 20001451 PARAMETER Experiment Name: At_Far-red-induction_P Parameter: Light Value: Far-red vs. White
  misc_feature: MA Experiment 20001451 PARAMETER Experiment Name: At_Far-red-induction_P Parameter: Organism Value: A. thaliana
  misc_feature: MA Experiment 20001451 PARAMETER Experiment Name: At_Far-red-induction_P Parameter: Plant Line Value: Columbia
  misc_feature: MA Experiment 20001451 PARAMETER Experiment Name: At_Far-red-induction_P Parameter: Timepoint (hr) Value: 24
  misc_feature: MA Experiment 20001451 PARAMETER Experiment Name: At_Far-red-induction_P Parameter: Tissue Value: Whole Plant
  misc_feature: MA Experiment ID: 20001554 Result: Up-regulated in Transcription
  misc_feature: MA Experiment 20001554 PARAMETER Experiment Name: At_Drought_Soil_Dry_P Parameter: Age (day) Value: 21
  misc_feature: MA Experiment 20001554 PARAMETER Experiment Name: At_Drought_Soil_Dry_P Parameter: Organism Value: A. thaliana
  misc_feature: MA Experiment 20001554 PARAMETER Experiment Name: At_Drought_Soil_Dry_P Parameter: Plant Line Value: WS
  misc_feature: MA Experiment 20001554 PARAMETER Experiment Name: At_Drought_Soil_Dry_P Parameter: Post Timepoint (hr) Value: None
  misc_feature: MA Experiment 20001554 PARAMETER Experiment Name: At_Drought_Soil_Dry_P Parameter: Post-Treatment Value: None
  misc_feature: MA Experiment 20001554 PARAMETER Experiment Name: At_Drought_Soil_Dry_P Parameter: Timepoint (day) Value: 7
  misc_feature: MA Experiment 20001554 PARAMETER Experiment Name: At_Drought_Soil_Dry_P Parameter: Treatment Value: Drought vs. No Drought
  misc_feature: MA Experiment ID: 20001555 Result: Up-regulated in Transcription
  misc_feature: MA Experiment 20001555 PARAMETER Experiment Name: At_Drought_Soil_Dry_P Parameter: Age (day) Value: 24
  misc_feature: MA Experiment 20001555 PARAMETER Experiment Name: At_Drought_Soil_Dry_P Parameter: Organism Value: A. thaliana
  misc_feature: MA Experiment 20001555 PARAMETER Experiment Name: At_Drought_Soil_Dry_P Parameter: Plant Line Value: WS
  misc_feature: MA Experiment 20001555 PARAMETER Experiment Name: At_Drought_Soil_Dry_P Parameter: Post Timepoint (hr) Value: None
  misc_feature: MA Experiment 20001555 PARAMETER Experiment Name: At_Drought_Soil_Dry_P Parameter: Post-Treatment Value: None
  misc_feature: MA Experiment 20001555 PARAMETER Experiment Name: At_Drought_Soil_Dry_P Parameter: Timepoint (day) Value: 10
  misc_feature: MA Experiment 20001555 PARAMETER Experiment Name: At_Drought_Soil_Dry_P Parameter: Treatment Value: Drought vs. No Drought
  misc_feature: MA Experiment ID: 20001556 Result: Up-regulated in Transcription
  misc_feature: MA Experiment 20001556 PARAMETER Experiment Name: At_Drought_Soil_Dry_P Parameter: Age (day) Value: 26
  misc_feature: MA Experiment 20001556 PARAMETER Experiment Name: At_Drought_Soil_Dry_P Parameter: Organism Value: A. thaliana
  misc_feature: MA Experiment 20001556 PARAMETER Experiment Name: At_Drought_Soil_Dry_P Parameter: Plant Line Value: WS
  misc_feature: MA Experiment 20001556 PARAMETER Experiment Name: At_Drought_Soil_Dry_P Parameter: Post Timepoint (hr) Value: None
  misc_feature: MA Experiment 20001556 PARAMETER Experiment Name: At_Drought_Soil_Dry_P Parameter: Post-Treatment Value: None
  misc_feature: MA Experiment 20001556 PARAMETER Experiment Name: At_Drought_Soil_Dry_P Parameter: Timepoint (day) Value: 12
  misc_feature: MA Experiment 20001556 PARAMETER Experiment Name: At_Drought_Soil_Dry_P Parameter: Treatment Value: Drought vs. No Drought
  misc_feature: MA Experiment ID: 20001557 Result: Up-regulated in Transcription
  misc_feature: MA Experiment 20001557 PARAMETER Experiment Name: At_Drought_Soil_Dry_P Parameter: Age (day) Value: 27
  misc_feature: MA Experiment 20001557 PARAMETER Experiment Name: At_Drought_Soil_Dry_P Parameter: Organism Value: A. thaliana
  misc_feature: MA Experiment 20001557 PARAMETER Experiment Name: At_Drought_Soil_Dry_P Parameter: Plant Line Value: WS
  misc_feature: MA Experiment 20001557 PARAMETER Experiment Name: At_Drought_Soil_Dry_P Parameter: Post Timepoint (hr) Value: 3
  misc_feature: MA Experiment 20001557 PARAMETER Experiment Name: At_Drought_Soil_Dry_P Parameter: Post-Treatment Value: Re-Water vs. No Drought
  misc_feature: MA Experiment 20001557 PARAMETER Experiment Name: At_Drought_Soil_Dry_P Parameter: Timepoint (day) Value: 13
  misc_feature: MA Experiment 20001557 PARAMETER Experiment Name: At_Drought_Soil_Dry_P Parameter: Treatment Value: Drought vs. No Drought
  misc_feature: MA Experiment ID: 20001558 Result: Up-regulated in Transcription
  misc_feature: MA Experiment 20001558 PARAMETER Experiment Name: At_Drought_Soil_Dry_P Parameter: Age (day) Value: 27
  misc_feature: MA Experiment 20001558 PARAMETER Experiment Name: At_Drought_Soil_Dry_P Parameter: Organism Value: A. thaliana
  misc_feature: MA Experiment 20001558 PARAMETER Experiment Name: At_Drought_Soil_Dry_P Parameter: Plant Line Value: WS
  misc_feature: MA Experiment 20001558 PARAMETER Experiment Name: At_Drought_Soil_Dry_P Parameter: Post Timepoint (hr) Value: 6
  misc_feature: MA Experiment 20001558 PARAMETER Experiment Name: At_Drought_Soil_Dry_P Parameter: Post-Treatment Value: Re-Water vs. No Drought
  misc_feature: MA Experiment 20001558 PARAMETER Experiment Name: At_Drought_Soil_Dry_P Parameter: Timepoint (day) Value: 13
  misc_feature: MA Experiment 20001558 PARAMETER Experiment Name: At_Drought_Soil_Dry_P Parameter: Treatment Value: Drought vs. No Drought
  misc_feature: MA Experiment ID: 20001559 Result: Up-regulated in Transcription
  misc_feature: MA Experiment 20001559 PARAMETER Experiment Name: At_Drought_Soil_Dry_P Parameter: Age (day) Value: 28
  misc_feature: MA Experiment 20001559 PARAMETER Experiment Name: At_Drought_Soil_Dry_P Parameter: Organism Value: A. thaliana
  misc_feature: MA Experiment 20001559 PARAMETER Experiment Name: At_Drought_Soil_Dry_P Parameter: Plant Line Value: WS
  misc_feature: MA Experiment 20001559 PARAMETER Experiment Name: At_Drought_Soil_Dry_P Parameter: Post Timepoint (hr) Value: 29
  misc_feature: MA Experiment 20001559 PARAMETER Experiment Name: At_Drought_Soil_Dry_P Parameter: Post-Treatment Value: Re-Water vs. No Drought
  misc_feature: MA Experiment 20001559 PARAMETER Experiment Name: At_Drought_Soil_Dry_P Parameter: Timepoint (day) Value: 14
  misc_feature: MA Experiment 20001559 PARAMETER Experiment Name: At_Drought_Soil_Dry_P Parameter: Treatment Value: Drought vs. No Drought
  misc_feature: MA Experiment ID: 20001560 Result: Up-regulated in Transcription
  misc_feature: MA Experiment 20001560 PARAMETER Experiment Name: At_Drought_Soil_Dry_P Parameter: Age (day) Value: 28
  misc_feature: MA Experiment 20001560 PARAMETER Experiment Name: At_Drought_Soil_Dry_P Parameter: Organism Value: A. thaliana
  misc_feature: MA Experiment 20001560 PARAMETER Experiment Name: At_Drought_Soil_Dry_P Parameter: Plant Line Value: WS
  misc_feature: MA Experiment 20001560 PARAMETER Experiment Name: At_Drought_Soil_Dry_P Parameter: Post Timepoint (hr) Value: None
  misc_feature: MA Experiment 20001560 PARAMETER Experiment Name: At_Drought_Soil_Dry_P Parameter: Post-Treatment Value: None
  misc_feature: MA Experiment 20001560 PARAMETER Experiment Name: At_Drought_Soil_Dry_P Parameter: Timepoint (day) Value: 14
  misc_feature: MA Experiment 20001560 PARAMETER Experiment Name: At_Drought_Soil_Dry_P Parameter: Treatment Value: Drought vs. No Drought
  misc_feature: MA Experiment ID: 20001904 Result: Up-regulated in Transcription
  misc_feature: MA Experiment 20001904 PARAMETER Experiment Name: At_Drought_Reproduction_P Parameter: Age (day) Value: 37
  misc_feature: MA Experiment 20001904 PARAMETER Experiment Name: At_Drought_Reproduction_P Parameter: Organism Value: A. thaliana
  misc_feature: MA Experiment 20001904 PARAMETER Experiment Name: At_Drought_Reproduction_P Parameter: Plant Line Value: WS
  misc_feature: MA Experiment 20001904 PARAMETER Experiment Name: At_Drought_Reproduction_P Parameter: Timepoint (day) Value: 7
  misc_feature: MA Experiment 20001904 PARAMETER Experiment Name: At_Drought_Reproduction_P Parameter: Tissue Value: Rosettes
  misc_feature: MA Experiment 20001904 PARAMETER Experiment Name: At_Drought_Reproduction_P Parameter: Treatment Value: Drought vs. No Drought
  misc_feature: MA Experiment ID: 20001905 Result: Up-regulated in Transcription
  misc_feature: MA Experiment 20001905 PARAMETER Experiment Name: At_Drought_Reproduction_P Parameter: Age (day) Value: 40
  misc_feature: MA Experiment 20001905 PARAMETER Experiment Name: At_Drought_Reproduction_P Parameter: Organism Value: A. thaliana
  misc_feature: MA Experiment 20001905 PARAMETER Experiment Name: At_Drought_Reproduction_P Parameter: Plant Line Value: WS
  misc_feature: MA Experiment 20001905 PARAMETER Experiment Name: At_Drought_Reproduction_P Parameter: Timepoint (day) Value: 10
  misc_feature: MA Experiment 20001905 PARAMETER Experiment Name: At_Drought_Reproduction_P Parameter: Tissue Value: Rosettes
  misc_feature: MA Experiment 20001905 PARAMETER Experiment Name: At_Drought_Reproduction_P Parameter: Treatment Value: Drought vs. No Drought
  misc_feature: MA Experiment ID: 20001906 Result: Up-regulated in Transcription
  misc_feature: MA Experiment 20001906 PARAMETER Experiment Name: At_Drought_Reproduction_P Parameter: Age (day) Value: 35
  misc_feature: MA Experiment 20001906 PARAMETER Experiment Name: At_Drought_Reproduction_P Parameter: Organism Value: A. thaliana
  misc_feature: MA Experiment 20001906 PARAMETER Experiment Name: At_Drought_Reproduction_P Parameter: Plant Line Value: WS
  misc_feature: MA Experiment 20001906 PARAMETER Experiment Name: At_Drought_Reproduction_P Parameter: Timepoint (day) Value: 5
  misc_feature: MA Experiment 20001906 PARAMETER Experiment Name: At_Drought_Reproduction_P Parameter: Tissue Value: Siliques
  misc_feature: MA Experiment 20001906 PARAMETER Experiment Name: At_Drought_Reproduction_P Parameter: Treatment Value: Drought vs. No Drought
  misc_feature: MA Experiment ID: 20001908 Result: Up-regulated in Transcription
  misc_feature: MA Experiment 20001908 PARAMETER Experiment Name: At_Drought_Reproduction_P Parameter: Age (day) Value: 40
  misc_feature: MA Experiment 20001908 PARAMETER Experiment Name: At_Drought_Reproduction_P Parameter: Organism Value: A. thaliana
  misc_feature: MA Experiment 20001908 PARAMETER Experiment Name: At_Drought_Reproduction_P Parameter: Plant Line Value: WS
  misc_feature: MA Experiment 20001908 PARAMETER Experiment Name: At_Drought_Reproduction_P Parameter: Timepoint (day) Value: 10
  misc_feature: MA Experiment 20001908 PARAMETER Experiment Name: At_Drought_Reproduction_P Parameter: Tissue Value: Siliques
  misc_feature: MA Experiment 20001908 PARAMETER Experiment Name: At_Drought_Reproduction_P Parameter: Treatment Value: Drought vs. No Drought
  misc_feature: MA Experiment ID: 20001910 Result: Up-regulated in Transcription
  misc_feature: MA Experiment 20001910 PARAMETER Experiment Name: At_Drought_Reproduction_P Parameter: Age (day) Value: 37
  misc_feature: MA Experiment 20001910 PARAMETER Experiment Name: At_Drought_Reproduction_P Parameter: Organism Value: A. thaliana
  misc_feature: MA Experiment 20001910 PARAMETER Experiment Name: At_Drought_Reproduction_P Parameter: Plant Line Value: WS
  misc_feature: MA Experiment 20001910 PARAMETER Experiment Name: At_Drought_Reproduction_P Parameter: Timepoint (day) Value: 7
  misc_feature: MA Experiment 20001910 PARAMETER Experiment Name: At_Drought_Reproduction_P Parameter: Tissue Value: Flowers
  misc_feature: MA Experiment 20001910 PARAMETER Experiment Name: At_Drought_Reproduction_P Parameter: Treatment Value: Drought vs. No Drought
  misc_feature: MA Experiment ID: 20001911 Result: Up-regulated in Transcription
  misc_feature: MA Experiment 20001911 PARAMETER Experiment Name: At_Drought_Reproduction_P Parameter: Age (day) Value: 40
  misc_feature: MA Experiment 20001911 PARAMETER Experiment Name: At_Drought_Reproduction_P Parameter: Organism Value: A. thaliana
  misc_feature: MA Experiment 20001911 PARAMETER Experiment Name: At_Drought_Reproduction_P Parameter: Plant Line Value: WS
  misc_feature: MA Experiment 20001911 PARAMETER Experiment Name: At_Drought_Reproduction_P Parameter: Timepoint (day) Value: 10
  misc_feature: MA Experiment 20001911 PARAMETER Experiment Name: At_Drought_Reproduction_P Parameter: Tissue Value: Flowers
  misc_feature: MA Experiment 20001911 PARAMETER Experiment Name: At_Drought_Reproduction_P Parameter: Treatment Value: Drought vs. No Drought
aaatcctcgcacaagtagaaaaaaacacaaacatcctgaaactagaagagagagacaaaatgttatacttcatccttctccctcttctatttcttgtaataagttacaaatttctctactccaaaacgcaacgtttcaaccttcctccaggaccaccgtcacgacccttcgtcggccatctccacctcatgaaaccgccgatccaccgtctcctccaacgctactccaaccaatacggcccaatcttttccctccgtttcggctcccgacgcgtcgtggtcataacatccccttctctcgcccaagaatccttcaccggccaaaacgacatcgttctctccagccggccgctccaactcaccgccaaatacgtcgcatacaaccacacaaccgttggtacagctccttacggcgaccactggcgtaacctccgccgcatttgctcccaagagattctctcctctcaccgtctcatcaacttccaacacatccgcaaagacgagatcttacggatgctcacacgcctctcacgttacacacaaacctccaacgaaagcaacgatttcactcacatcgagctagaaccgctcttatctgatctaacattcaacaacatagtaagaatggttacagggaagagatattacggcgacgacgtcaacaacaaagaagaagcagagctattcaagaagctagtctacgatatcgccatgtatagcggcgctaatcattccgctgattacttaccaatactaaaactattcggaaacaaattcgagaaagaagttaaagctataggcaaatcaatggatgatattttgcagcgtttgttagatgaatgtagaagagataaagaaggtaacacaatggtcaatcatttgatctctctacaacaacaacaacctgagtattacactgacgttatcatcaaaggccttatgatgtcgatgatgctcgccggaactgagacctccgctgtgacattagagtgggcgatggcgaatctactgagaaatccagaagtactggagaaggcgagatcggagatcgatgagaagatcggaaaagatcgactaatcgacgaatcagacatcgcagtgcttccttacctccaaaacgtcgtctccgaaacattccggctatttccggtggcgccgtttctaatccctcgatcaccgacggacgacatgaaaatcggaggttacgacgtcccgcgagatacgatagtgatggttaacgcttgggctatacatagagatccagagatttgggaggagccagagaagtttaatccagatcgatataatgacggatgcggaagcgattactatgtttacaagctgatgccgtttgggaatggccggagaacttgtcccggcgccggattaggtcagaggattgtgacattggcgcttggatcgttgattcaatgctttgaatgggagaatgtgaaaggggaagagatggatatgtctgagagtactgggttgggtatgcgtaagatggatcctttacgggccatgtgtaggcctaggcccattatgtcaaagcttttactctaataagatgagtagaggttaaaaaaagaaaaaataacttattggatgtaactggtaattatctttaagataaagatgaataaaatgaatctttgcctcat

SEQ ID NO: 22364 - protein, 519 aa, Arabidopsis thaliana
  peptide (1)..(519): Ceres Seq. ID no. 12327452
  misc_feature (22)..(479): Homolog of NCBI NO: 18252165 NR Description: cytochrome P450 monooxygenase - like protein
  misc_feature (22)..(517): Homolog of NCBI NO: 15235541 NR Description: cytochrome p450, putative
  misc_feature (24)..(518): Homolog of NCBI NO: 15242068 NR Description: cytochrome p450 family
  misc_feature (22)..(517): Homolog of NCBI NO: 21618287 NR Description: cytochrome P450 monooxygenase-like protein
  misc_feature (22)..(517): Homolog of NCBI NO: 18420031 NR Description: cytochrome p450 family
  misc_feature (20)..(503): Homolog of NCBI NO: 23397303 NR Description: putative cytochrome P450 monooxygenase (CYP91A2)
  misc_feature (20)..(519): Homolog of NCBI NO: 18491105 NR Description: AT4g37430/F6G17_80 [Arabidopsis thaliana]
  misc_feature (20)..(519): Homolog of NCBI NO: 25282605 NR Description: cytochrome P450 monooxygenase [imported] -
  misc_feature (20)..(519): Homolog of NCBI NO: 21618274 NR Description: cytochrome P450 monooxygenase CYP91A2
  misc_feature (20)..(519): Homolog of NCBI NO: 15235559 NR Description: cytochrome p450 family
ILAQVEKNTNILKLEERDKMLYFILLPLLFLVISYKFLYSKTQRFNLPPGPPSRPFVGHLHLMKPPIHRLLQRYSNQYGPIFSLRFGSRRVVVITSPSLAQESFTGQNDIVLSSRPLQLTAKYVAYNHTTVGTAPYGDHWRNLRRICSQEILSSHRLINFQHIRKDEILRMLTRLSRYTQTSNESNDFTHIELEPLLSDLTFNNIVRMVTGKRYYGDDVNNKEEAELFKKLVYDIAMYSGANHSADYLPILKLFGNKFEKEVKAIGKSMDDILQRLLDECRRDKEGNTMVNHLISLQQQQPEYYTDVIIKGLMMSMMLAGTETSAVTLEWAMANLLRNPEVLEKARSEIDEKIGKDRLIDESDIAVLPYLQNVVSETFRLFPVAPFLIPRSPTDDMKIGGYDVPRDTIVMVNAWAIHRDPEIWEEPEKFNPDRYNDGCGSDYYVYKLMPFGNGRRTCPGAGLGQRIVTLALGSLIQCFEWENVKGEEMDMSESTGLGMRKMDPLRAMCRPRPIMSKLLL

SEQ ID NO: 22365 - protein, 500 aa, Arabidopsis thaliana
  peptide (1)..(500): Ceres Seq. ID no. 12327453
  misc_feature (3)..(460): Homolog of NCBI NO: 18252165 NR Description: cytochrome P450 monooxygenase - like protein
  misc_feature (3)..(498): Homolog of NCBI NO: 15235541 NR Description: cytochrome p450, putative
  misc_feature (5)..(499): Homolog of NCBI NO: 15242068 NR Description: cytochrome p450 family
  misc_feature (3)..(498): Homolog of NCBI NO: 21618287 NR Description: cytochrome P450 monooxygenase-like protein
  misc_feature (3)..(498): Homolog of NCBI NO: 18420031 NR Description: cytochrome p450 family
  misc_feature (1)..(484): Homolog of NCBI NO: 23397303 NR Description: putative cytochrome P450 monooxygenase (CYP91A2)
  misc_feature (1)..(500): Homolog of NCBI NO: 18491105 NR Description: AT4g37430/F6G17_80 [Arabidopsis thaliana]
  misc_feature (1)..(500): Homolog of NCBI NO: 25282605 NR Description: cytochrome P450 monooxygenase [imported] -
  misc_feature (1)..(500): Homolog of NCBI NO: 21618274 NR Description: cytochrome P450 monooxygenase CYP91A2
  misc_feature (1)..(500): Homolog of NCBI NO: 15235559 NR Description: cytochrome p450 family
MLYFILLPLLFLVISYKFLYSKTQRFNLPPGPPSRPFVGHLHLMKPPIHRLLQRYSNQYGPIFSLRFGSRRVVVITSPSLAQESFTGQNDIVLSSRPLQLTAKYVAYNHTTVGTAPYGDHWRNLRRICSQEILSSHRLINFQHIRKDEILRMLTRLSRYTQTSNESNDFTHIELEPLLSDLTFNNIVRMVTGKRYYGDDVNNKEEAELFKKLVYDIAMYSGANHSADYLPILKLFGNKFEKEVKAIGKSMDDILQRLLDECRRDKEGNTMVNHLISLQQQQPEYYTDVIIKGLMMSMMLAGTETSAVTLEWAMANLLRNPEVLEKARSEIDEKIGKDRLIDESDIAVLPYLQNVVSETFRLFPVAPFLIPRSPTDDMKIGGYDVPRDTIVMVNAWAIHRDPEIWEEPEKFNPDRYNDGCGSDYYVYKLMPFGNGRRTCPGAGLGQRIVTLALGSLIQCFEWENVKGEEMDMSESTGLGMRKMDPLRAMCRPRPIMSKLLL

SEQ ID NO: 22366 - protein, 457 aa, Arabidopsis thaliana
  peptide (1)..(457): Ceres Seq. ID no. 12327454
  misc_feature (1)..(417): Homolog of NCBI NO: 18252165 NR Description: cytochrome P450 monooxygenase - like protein
  misc_feature (1)..(455): Homolog of NCBI NO: 15235541 NR Description: cytochrome p450, putative
  misc_feature (1)..(456): Homolog of NCBI NO: 15242068 NR Description: cytochrome p450 family
  misc_feature (1)..(455): Homolog of NCBI NO: 21618287 NR Description: cytochrome P450 monooxygenase-like protein
  misc_feature (1)..(455): Homolog of NCBI NO: 18420031 NR Description: cytochrome p450 family
  misc_feature (1)..(441): Homolog of NCBI NO: 23397303 NR Description: putative cytochrome P450 monooxygenase (CYP91A2)
  misc_feature (1)..(457): Homolog of NCBI NO: 18491105 NR Description: AT4g37430/F6G17_80 [Arabidopsis thaliana]
  misc_feature (1)..(457): Homolog of NCBI NO: 25282605 NR Description: cytochrome P450 monooxygenase [imported] -
  misc_feature (1)..(457): Homolog of NCBI NO: 21618274 NR Description: cytochrome P450 monooxygenase CYP91A2
  misc_feature (1)..(457): Homolog of NCBI NO: 15235559 NR Description: cytochrome p450 family
MKPPIHRLLQRYSNQYGPIFSLRFGSRRVVVITSPSLAQESFTGQNDIVLSSRPLQLTAKYVAYNHTTVGTAPYGDHWRNLRRICSQEILSSHRLINFQHIRKDEILRMLTRLSRYTQTSNESNDFTHIELEPLLSDLTFNNIVRMVTGKRYYGDDVNNKEEAELFKKLVYDIAMYSGANHSADYLPILKLFGNKFEKEVKAIGKSMDDILQRLLDECRRDKEGNTMVNHLISLQQQQPEYYTDVIIKGLMMSMMLAGTETSAVTLEWAMANLLRNPEVLEKARSEIDEKIGKDRLIDESDIAVLPYLQNVVSETFRLFPVAPFLIPRSPTDDMKIGGYDVPRDTIVMVNAWAIHRDPEIWEEPEKFNPDRYNDGCGSDYYVYKLMPFGNGRRTCPGAGLGQRIVTLALGSLIQCFEWENVKGEEMDMSESTGLGMRKMDPLRAMCRPRPIMSKLLL

SEQ ID NO: 22367 - DNA, 1520 bp, Arabidopsis thaliana
  misc_feature (1)..(1520): Ceres Seq. ID no. 13488272
  misc_feature: MA Experiment ID: 108576 Result: Up-regulated in Transcription
  misc_feature: MA Experiment 108576 PARAMETER Experiment Name: At_42deg_Heat_cDNA_P Parameter: Temperature (deg C) Value: 42 vs. 22
  misc_feature: MA Experiment 108576 PARAMETER Experiment Name: At_42deg_Heat_cDNA_P Parameter: Timepoint (hr) Value: 1
  misc_feature: MA Experiment 108576 PARAMETER Experiment Name: At_42deg_Heat_cDNA_P Parameter: Tissue Value: Aerial
  misc_feature: MA Experiment ID: 108595 Result: Up-regulated in Transcription
  misc_feature: MA Experiment 108595 PARAMETER Experiment Name: At_Ler-pi_Ovule_cDNA_P Parameter: Plant Line Value: null
  misc_feature: MA Experiment ID: 20000437 Result: Down-regulated in Transcription
  misc_feature: MA Experiment 20000437 PARAMETER Experiment Name: At_Drought_P Parameter: Age (day) Value: 8
  misc_feature: MA Experiment 20000437 PARAMETER Experiment Name: At_Drought_P Parameter: Organism Value: A. thaliana
  misc_feature: MA Experiment 20000437 PARAMETER Experiment Name: At_Drought_P Parameter: Plant Line Value: WS
  misc_feature: MA Experiment 20000437 PARAMETER Experiment Name: At_Drought_P Parameter: Timepoint (hr) Value: 24
  misc_feature: MA Experiment 20000437 PARAMETER Experiment Name: At_Drought_P Parameter: Tissue Value: Whole Plant
  misc_feature: MA Experiment 20000437 PARAMETER Experiment Name: At_Drought_P Parameter: Treatment Value: Drought vs. No Drought
  misc_feature: MA Experiment ID: 20001247 Result: Up-regulated in Transcription
  misc_feature: MA Experiment 20001247 PARAMETER Experiment Name: At_Far-red-induction_P Parameter: Age (day) Value: 7
  misc_feature: MA Experiment 20001247 PARAMETER Experiment Name: At_Far-red-induction_P Parameter: Light Value: Far-red vs. White
  misc_feature: MA Experiment 20001247 PARAMETER Experiment Name: At_Far-red-induction_P Parameter: Organism Value: A. thaliana
  misc_feature: MA Experiment 20001247 PARAMETER Experiment Name: At_Far-red-induction_P Parameter: Plant Line Value: Columbia
  misc_feature: MA Experiment 20001247 PARAMETER Experiment Name: At_Far-red-induction_P Parameter: Timepoint (hr) Value: 1
  misc_feature: MA Experiment 20001247 PARAMETER Experiment Name: At_Far-red-induction_P Parameter: Tissue Value: Whole Plant
  misc_feature: MA Experiment ID: 20001248 Result: Up-regulated in Transcription
  misc_feature: MA Experiment 20001248 PARAMETER Experiment Name: At_Far-red-induction_P Parameter: Age (day) Value: 7
  misc_feature: MA Experiment 20001248 PARAMETER Experiment Name: At_Far-red-induction_P Parameter: Light Value: Far-red vs. White
  misc_feature: MA Experiment 20001248 PARAMETER Experiment Name: At_Far-red-induction_P Parameter: Organism Value: A. thaliana
  misc_feature: MA Experiment 20001248 PARAMETER Experiment Name: At_Far-red-induction_P Parameter: Plant Line Value: Columbia
  misc_feature: MA Experiment 20001248 PARAMETER Experiment Name: At_Far-red-induction_P Parameter: Timepoint (hr) Value: 4
  misc_feature: MA Experiment 20001248 PARAMETER Experiment Name: At_Far-red-induction_P Parameter: Tissue Value: Whole Plant
  misc_feature: MA Experiment ID: 20001451 Result: Up-regulated in Transcription
  misc_feature: MA Experiment 20001451 PARAMETER Experiment Name: At_Far-red-induction_P Parameter: Age (day) Value: 7
  misc_feature: MA Experiment 20001451 PARAMETER Experiment Name: At_Far-red-induction_P Parameter: Light Value: Far-red vs. White
  misc_feature: MA Experiment 20001451 PARAMETER Experiment Name: At_Far-red-induction_P Parameter: Organism Value: A. thaliana
  misc_feature: MA Experiment 20001451 PARAMETER Experiment Name: At_Far-red-induction_P Parameter: Plant Line Value: Columbia
  misc_feature: MA Experiment 20001451 PARAMETER Experiment Name: At_Far-red-induction_P Parameter: Timepoint (hr) Value: 24
  misc_feature: MA Experiment 20001451 PARAMETER Experiment Name: At_Far-red-induction_P Parameter: Tissue Value: Whole Plant
  misc_feature: MA Experiment ID: 20001757 Result: Down-regulated in Transcription
  misc_feature: MA Experiment 20001757 PARAMETER Experiment Name: At_50mM_NH4NO3_L-to-H_P Parameter: Timepoint (hr) Value: 6
  misc_feature: MA Experiment 20001757 PARAMETER Experiment Name: At_50mM_NH4NO3_L-to-H_P Parameter: Tissue Value: Leaf
  misc_feature: MA Experiment 20001757 PARAMETER Experiment Name: At_50mM_NH4NO3_L-to-H_P Parameter: Treatment Value: 50mM NH4NO3 vs 100mM Mannitol
agatgaaaaaaatattattatttgttggagaagaaagagagattcttcttcttcgattccagcgaaggaaaagcgtattcctcgtgagcactaacttctcactcctctcttcttcttcttcatcagtctacgttcacacaatctttcacccacctattcaaagctctctccggaagtttcgaggggttggttgttggttttcccgatgacttcggatggagctacgtcgacatcagcagctgcagctgcggcggcggcagcagcggcgaggaggaagccgtcgtggagagaaagggagaataatcggaggagagaaagacggagaagagctgtagctgcgaagatatacactgggcttagagctcaaggtgattataatttgcctaaacattgtgataataatgaagtccttaaagctctttgtgttgaagctggttgggttgttgaagaagatggtactacttatcgcaagggatgcaagcctttacctggtgagatagctgggacttcatctcgagtaactccatattcatcacagaaccagagccctctttcatcagcctttcaaagtcccatcccatcttaccaagttagcccgtcttcttcatcattcccgagtccttctcgcggtgaaccaaataacaacatgtcctctacattcttccctttcctcagaaatggtggcattccttcttctcttccttccctcagaatctcaaacagttgtccagttaccccaccgctctcatcgccgacttctaagaacccgaaaccgttgcctaactgggaatctatcgctaagcaatccatggccattgctaaacaatcaatggcgtcttttaattatcctttctatgcggtttctgcacctgctagtccgacacatcgccaccagtttcataccccggctactatacctgaatgtgatgagtctgactcttccactgttgattctggtcattggataagctttcagaagtttgcacaacaacagccattctctgcctctatggtgccaacctctcctaccttcaatcttgtgaaacctgcgcctcagcagatgtctccaaatactgctgccttccaagagattggtcaaagctctgagtttaaatttgagaatagccaagttaaaccctgggaaggagagaggatacatgatgtgggtatggaggatcttgagcttacacttggaaatgggaaggctcgtggttgacataaacaactaggcaaacccaaatggcatgtcattggaatatgagaaactaatcctcttgagtattttcttcttcgtccaggtatttggatctttatggaatctcatatgttcttcacttattatccaaatatgctgcccaaagccttctccatggaagcattggagtgttagagtggttattcaattcatgaatttggtttcaaaagcattatttgtagataaaaaaatcttaagatgtatgattctgtttccttacatttgttacattaattagtggcttgaaactgtcttgtgtcttgtc

SEQ ID NO: 22368 - protein, 336 aa, Arabidopsis thaliana
  peptide (1)..(336): Ceres Seq. ID no. 13488273
  misc_feature (5)..(281): Homolog of NCBI NO: 14626761 NR Description: mature anther-specific protein LAT61
  misc_feature (1)..(334): Homolog of NCBI NO: 21592457 NR Description: unknown [Arabidopsis thaliana]
  misc_feature (1)..(334): Homolog of NCBI NO: 6651069 NR Description: 107 protein [Arabidopsis thaliana]
  misc_feature (1)..(334): Homolog of NCBI NO: 18394728 NR Description: expressed protein [Arabidopsis thaliana]
  misc_feature (1)..(336): Homolog of NCBI NO: 25352558 NR Description: unknown protein F9E10.7 [imported] - Arabidopsis
  misc_feature (1)..(336): Homolog of NCBI NO: 18410764 NR Description: expressed protein [Arabidopsis thaliana]
  misc_feature (1)..(336): Homolog of NCBI NO: 18086461 NR Description: At1g75080/F9E10_7 [Arabidopsis thaliana]
  misc_feature (201)..(334): Homolog of NCBI NO: 13937167 NR Description: At1g19350/F18O14_4 [Arabidopsis thaliana]
  misc_feature (16)..(274): Homolog of NCBI NO: 33146833 NR Description: putative mature anther-specific protein LAT61
  misc_feature (10)..(335): Homolog of NCBI NO: 15215731 NR Description: AT4g36780/C7A10_580 [Arabidopsis thaliana]
MTSDGATSTSAAAAAAAAAAARRKPSWRERENNRRRERRRRAVAAKIYTGLRAQGDYNLPKHCDNNEVLKALCVEAGWVVEEDGTTYRKGCKPLPGEIAGTSSRVTPYSSQNQSPLSSAFQSPIPSYQVSPSSSSFPSPSRGEPNNNMSSTFFPFLRNGGIPSSLPSLRISNSCPVTPPLSSPTSKNPKPLPNWESIAKQSMAIAKQSMASFNYPFYAVSAPASPTHRHQFHTPATIPECDESDSSTVDSGHWISFQKFAQQQPFSASMVPTSPTFNLVKPAPQQMSPNTAAFQEIGQSSEFKFENSQVKPWEGERIHDVGMEDLELTLGNGKARG

SEQ ID NO: 22369 - protein, 189 aa, Arabidopsis thaliana
  peptide (1)..(189): Ceres Seq. ID no. 13488274
  misc_feature (54)..(187): Homolog of NCBI NO: 13937167 NR Description: At1g19350/F18O14_4 [Arabidopsis thaliana]
  misc_feature (1)..(127): Homolog of NCBI NO: 33146833 NR Description: putative mature anther-specific protein LAT61
  misc_feature (1)..(188): Homolog of NCBI NO: 15215731 NR Description: AT4g36780/C7A10_580 [Arabidopsis thaliana]
  misc_feature (1)..(134): Homolog of NCBI NO: 14626761 NR Description: mature anther-specific protein LAT61
  misc_feature (1)..(187): Homolog of NCBI NO: 21592457 NR Description: unknown [Arabidopsis thaliana]
  misc_feature (1)..(187): Homolog of NCBI NO: 6651069 NR Description: 107 protein [Arabidopsis thaliana]
  misc_feature (1)..(187): Homolog of NCBI NO: 18394728 NR Description: expressed protein [Arabidopsis thaliana]
  misc_feature (1)..(189): Homolog of NCBI NO: 25352558 NR Description: unknown protein F9E10.7 [imported] - Arabidopsis
  misc_feature (1)..(189): Homolog of NCBI NO: 18410764 NR Description: expressed protein [Arabidopsis thaliana]
  misc_feature (1)..(189): Homolog of NCBI NO: 18086461 NR Description: At1g75080/F9E10_7 [Arabidopsis thaliana]
MSSTFFPFLRNGGIPSSLPSLRISNSCPVTPPLSSPTSKNPKPLPNWESIAKQSMAIAKQSMASFNYPFYAVSAPASPTHRHQFHTPATIPECDESDSSTVDSGHWISFQKFAQQQPFSASMVPTSPTFNLVKPAPQQMSPNTAAFQEIGQSSEFKFENSQVKPWEGERIHDVGMEDLELTLGNGKARG

SEQ ID NO: 22370 - DNA, 1231 bp, Arabidopsis thaliana
  misc_feature (1)..(1231): Ceres Seq. ID no. 12335283
  misc_feature: MA Experiment ID: 108488 Result: Down-regulated in Transcription
  misc_feature: MA Experiment ID: 20000182 Result: Up-regulated in Transcription
  misc_feature: MA Experiment 20000182 PARAMETER Experiment Name: At_2mM_SA_P Parameter: Age (day) Value: 14
  misc_feature: MA Experiment 20000182 PARAMETER Experiment Name: At_2mM_SA_P Parameter: Organism Value: A. thaliana
  misc_feature: MA Experiment 20000182 PARAMETER Experiment Name: At_2mM_SA_P Parameter: Plant Line Value: WS
  misc_feature: MA Experiment 20000182 PARAMETER Experiment Name: At_2mM_SA_P Parameter: Timepoint (hr) Value: 6
  misc_feature: MA Experiment 20000182 PARAMETER Experiment Name: At_2mM_SA_P Parameter: Tissue Value: Aerial
  misc_feature: MA Experiment 20000182 PARAMETER Experiment Name: At_2mM_SA_P Parameter: Treatment Value: 2mM SA vs. No Treatment
  misc_feature: MA Experiment ID: 20000185 Result: Up-regulated in Transcription
  misc_feature: MA Experiment 20000185 PARAMETER Experiment Name: At_Roots__P Parameter: Age (day) Value: 7 vs. 21
  misc_feature: MA Experiment 20000185 PARAMETER Experiment Name: At_Roots__P Parameter: Organism Value: A. thaliana
  misc_feature: MA Experiment 20000185 PARAMETER Experiment Name: At_Roots__P Parameter: Tissue Value: Roots vs. Whole Plant
  misc_feature: MA Experiment ID: 20000437 Result: Up-regulated in Transcription
  misc_feature: MA Experiment 20000437 PARAMETER Experiment Name: At_Drought_P Parameter: Age (day) Value: 8
  misc_feature: MA Experiment 20000437 PARAMETER Experiment Name: At_Drought_P Parameter: Organism Value: A. thaliana
  misc_feature: MA Experiment 20000437 PARAMETER Experiment Name: At_Drought_P Parameter: Plant Line Value: WS
  misc_feature: MA Experiment 20000437 PARAMETER Experiment Name: At_Drought_P Parameter: Timepoint (hr) Value: 24
  misc_feature: MA Experiment 20000437 PARAMETER Experiment Name: At_Drought_P Parameter: Tissue Value: Whole Plant
  misc_feature: MA Experiment 20000437 PARAMETER Experiment Name: At_Drought_P Parameter: Treatment Value: Drought vs. No Drought
  misc_feature: MA Experiment ID: 20000438 Result: Down-regulated in Transcription
  misc_feature: MA Experiment 20000438 PARAMETER Experiment Name: At_Shoots__P Parameter: Age (day) Value: 14
  misc_feature: MA Experiment 20000438 PARAMETER Experiment Name: At_Shoots__P Parameter: Tissue Value: Shoots vs. Whole Plant
  misc_feature: MA Experiment ID: 20000439 Result: Up-regulated in Transcription
  misc_feature: MA Experiment 20000439 PARAMETER Experiment Name: At_Roots__P Parameter: Age (day) Value: 14 vs. 21
  misc_feature: MA Experiment 20000439 PARAMETER Experiment Name: At_Roots__P Parameter: Organism Value: A. thaliana
  misc_feature: MA Experiment 20000439 PARAMETER Experiment Name: At_Roots__P Parameter: Tissue Value: Roots vs. Whole Plant
  misc_feature: MA Experiment ID: 20001904 Result: Up-regulated in Transcription
  misc_feature: MA Experiment 20001904 PARAMETER Experiment Name: At_Drought_Reproduction_P Parameter: Age (day) Value: 37
  misc_feature: MA Experiment 20001904 PARAMETER Experiment Name: At_Drought_Reproduction_P Parameter: Organism Value: A. thaliana
  misc_feature: MA Experiment 20001904 PARAMETER Experiment Name: At_Drought_Reproduction_P Parameter: Plant Line Value: WS
  misc_feature: MA Experiment 20001904 PARAMETER Experiment Name: At_Drought_Reproduction_P Parameter: Timepoint (day) Value: 7
  misc_feature: MA Experiment 20001904 PARAMETER Experiment Name: At_Drought_Reproduction_P Parameter: Tissue Value: Rosettes
  misc_feature: MA Experiment 20001904 PARAMETER Experiment Name: At_Drought_Reproduction_P Parameter: Treatment Value: Drought vs. No Drought
  misc_feature: MA Experiment ID: 20001905 Result: Up-regulated in Transcription
  misc_feature: MA Experiment 20001905 PARAMETER Experiment Name: At_Drought_Reproduction_P Parameter: Age (day) Value: 40
  misc_feature: MA Experiment 20001905 PARAMETER Experiment Name: At_Drought_Reproduction_P Parameter: Organism Value: A. thaliana
  misc_feature: MA Experiment 20001905 PARAMETER Experiment Name: At_Drought_Reproduction_P Parameter: Plant Line Value: WS
  misc_feature: MA Experiment 20001905 PARAMETER Experiment Name: At_Drought_Reproduction_P Parameter: Timepoint (day) Value: 10
  misc_feature: MA Experiment 20001905 PARAMETER Experiment Name: At_Drought_Reproduction_P Parameter: Tissue Value: Rosettes
  misc_feature: MA Experiment 20001905 PARAMETER Experiment Name: At_Drought_Reproduction_P Parameter: Treatment Value: Drought vs. No Drought
aaggaagatcgatcacggacaaaatttgcagagacattgtagacaaagatcattcatgtttcttcaactccggtcttagttagagaaaggagcttattgaagaatcaatggcctctgatagagaagagtttaacttgtgtggacctacacacctcacaactgttgattggggaaatgaagatcaccaacgttgtgtagcagcttgtttggtacaaggaatctatatagtagagcaagaccgtcagcttaaacgtgaaggcactgaagctcttgcatctccatggtgggaatcattcaactttaaattgatccgtcaccttaaagacgatgctgatttctccatctttggtggcatttttgaatacaaatcgttacagccagatgttgtggactctggagttccacggtatgttatagcctttagagggactttgactaaagcggattcgataacccgtgatatcgagttggatatccatattatacggaatgggcttcaccgaacgtcgcgttttgagatagcgatgcaagctgtgagaagtatggctgattctgtgggagcttcgagcttttggcttacggggcattctttaggtgcagcgatggcgcttcttgctggtaaaacaatggggaagagtggagtttatattaagtcattgttgtttaaccctccttatgtgtctcccccgattgagaggatagcaaacgaacgggttaggcacgggattagattcgcggggagtctaatcaccgcaggactcgctctctctagaactcttaaacaaacacagcagccgcaacaacagcaactgcaactacaaaacttgactgaagatccactagaggcattatcttcgtggctccctaacatacatgtaaatccaggggaccatctatgttcggagtatatcgggtttttcgagcaccggggaaatatggaacagattgggtatggagccggaattgtggagcggatggcgatgcagcattccttgggaggtttgttgatggatgcgatgggagtgagcaatgcagttgaagtagaagagccggttcatgtcatcccatctgctaatcttatagtaaacaaaaccatatccgaagattacaaggacgctcatgggatacaccaatggtggagagatgaccaagatttggtttcccacatttacatgtacaaatagctctcattcttttcctttttctcattactaagatttggtttgttcct

SEQ ID NO: 22371 - protein, 358 aa, Arabidopsis thaliana
  peptide (1)..(358): Ceres Seq. ID no. 12335284
  misc_feature (1)..(344): Homolog of NCBI NO: 15237916 NR Description: putative protein
  misc_feature (1)..(221): Homolog of NCBI NO: 10177082 NR Description: gene_id:MOP9.4~pir||T04290~similar to unknown
  misc_feature (1)..(344): Homolog of NCBI NO: 15237913 NR Description: putative protein; protein id: At5g24200.1
  misc_feature (1)..(347): Homolog of NCBI NO: 15237918 NR Description: putative protein; protein id: At5g24220.1
  misc_feature (1)..(350): Homolog of NCBI NO: 15237909 NR Description: putative protein; protein id: At5g24180.1
  misc_feature (1)..(344): Homolog of NCBI NO: 30689345 NR Description: expressed protein [Arabidopsis thaliana]
  misc_feature (23)..(301): Homolog of NCBI NO: 7486718 NR Description: hypothetical protein F8M12.9 - Arabidopsis
  misc_feature (1)..(301): Homolog of NCBI NO: 7486138 NR Description: hypothetical protein F25I24.160 - Arabidopsis
  misc_feature (1)..(358): Homolog of NCBI NO: 18413406 NR Description: unknown protein; protein id: At4g10955.1
  misc_feature (1)..(358): Homolog of NCBI NO: 18396010 NR Description: expressed protein
MASDREEFNLCGPTHLTTVDWGNEDHQRCVAACLVQGIYIVEQDRQLKREGTEALASPWWESFNFKLIRHLKDDADFSIFGGIFEYKSLQPDVVDSGVPRYVIAFRGTLTKADSITRDIELDIHIIRNGLHRTSRFEIAMQAVRSMADSVGASSFWLTGHSLGAAMALLAGKTMGKSGVYIKSLLFNPPYVSPPIERIANERVRHGIRFAGSLITAGLALSRTLKQTQQPQQQQLQLQNLTEDPLEALSSWLPNIHVNPGDHLCSEYIGFFEHRGNMEQIGYGAGIVERMAMQHSLGGLLMDAMGVSNAVEVEEPVHVIPSANLIVNKTISEDYKDAHGIHQWWRDDQDLVSHIYMYK

SEQ ID NO: 22372 - protein, 219 aa, Arabidopsis thaliana
  peptide (1)..(219): Ceres Seq. ID no. 12335285
  misc_feature (1)..(205): Homolog of NCBI NO: 15237916 NR Description: putative protein
  misc_feature (1)..(82): Homolog of NCBI NO: 10177082 NR Description: gene_id:MOP9.4~pir||T04290~similar to unknown
  misc_feature (1)..(205): Homolog of NCBI NO: 15237913 NR Description: putative protein; protein id: At5g24200.1
  misc_feature (1)..(208): Homolog of NCBI NO: 15237918 NR Description: putative protein; protein id: At5g24220.1
  misc_feature (1)..(211): Homolog of NCBI NO: 15237909 NR Description: putative protein; protein id: At5g24180.1
  misc_feature (1)..(205): Homolog of NCBI NO: 30689345 NR Description: expressed protein [Arabidopsis thaliana]
  misc_feature (1)..(162): Homolog of NCBI NO: 7486718 NR Description: hypothetical protein F8M12.9 - Arabidopsis
  misc_feature (1)..(162): Homolog of NCBI NO: 7486138 NR Description: hypothetical protein F25I24.160 - Arabidopsis
  misc_feature (1)..(219): Homolog of NCBI NO: 18413406 NR Description: unknown protein; protein id: At4g10955.1
  misc_feature (1)..(219): Homolog of NCBI NO: 18396010 NR Description: expressed protein
MQAVRSMADSVGASSFWLTGHSLGAAMALLAGKTMGKSGVYIKSLLFNPPYVSPPIERIANERVRHGIRFAGSLITAGLALSRTLKQTQQPQQQQLQLQNLTEDPLEALSSWLPNIHVNPGDHLCSEYIGFFEHRGNMEQIGYGAGIVERMAMQHSLGGLLMDAMGVSNAVEVEEPVHVIPSANLIVNKTISEDYKDAHGIHQWWRDDQDLVSHIYMYK

SEQ ID NO: 22373 - protein, 213 aa, Arabidopsis thaliana
  peptide (1)..(213): Ceres Seq. ID no. 12335286
  misc_feature (1)..(199): Homolog of NCBI NO: 15237916 NR Description: putative protein
  misc_feature (1)..(76): Homolog of NCBI NO: 10177082 NR Description: gene_id:MOP9.4~pir||T04290~similar to unknown
  misc_feature (1)..(199): Homolog of NCBI NO: 15237913 NR Description: putative protein; protein id: At5g24200.1
  misc_feature (1)..(202): Homolog of NCBI NO: 15237918 NR Description: putative protein; protein id: At5g24220.1
  misc_feature (1)..(205): Homolog of NCBI NO: 15237909 NR Description: putative protein; protein id: At5g24180.1
  misc_feature (1)..(199): Homolog of NCBI NO: 30689345 NR Description: expressed protein [Arabidopsis thaliana]
  misc_feature (1)..(156): Homolog of NCBI NO: 7486718 NR Description: hypothetical protein F8M12.9 - Arabidopsis
  misc_feature (1)..(156): Homolog of NCBI NO: 7486138 NR Description: hypothetical protein F25I24.160 - Arabidopsis
  misc_feature (1)..(213): Homolog of NCBI NO: 18413406 NR Description: unknown protein; protein id: At4g10955.1
  misc_feature (1)..(213): Homolog of NCBI NO: 18396010 NR Description: expressed protein
MADSVGASSFWLTGHSLGAAMALLAGKTMGKSGVYIKSLLFNPPYVSPPIERIANERVRHGIRFAGSLITAGLALSRTLKQTQQPQQQQLQLQNLTEDPLEALSSWLPNIHVNPGDHLCSEYIGFFEHRGNMEQIGYGAGIVERMAMQHSLGGLLMDAMGVSNAVEVEEPVHVIPSANLIVNKTISEDYKDAHGIHQWWRDDQDLVSHIYMYK

SEQ ID NO: 22374 - DNA, 715 bp, Arabidopsis thaliana
  misc_feature (1)..(715): Ceres Seq. ID no. 12370447
  misc_feature: MA Experiment ID: 108434 Result: Up-regulated in Transcription
  misc_feature: MA Experiment 108434 PARAMETER Experiment Name: At_Root_Tips_cDNA_P Parameter: Tissue Value: Root Tips
  misc_feature: MA Experiment ID: 108461 Result: Down-regulated in Transcription
  misc_feature: MA Experiment 108461 PARAMETER Experiment Name: At_Germinating_Seeds_cDNA_P Parameter: Age (day) Value: 1 vs. 0
  misc_feature: MA Experiment 108461 PARAMETER Experiment Name: At_Germinating_Seeds_cDNA_P Parameter: Tissue Value: Germinating Seeds
  misc_feature: MA Experiment ID: 108462 Result: Down-regulated in Transcription
  misc_feature: MA Experiment 108462 PARAMETER Experiment Name: At_Germinating_Seeds_cDNA_P Parameter: Age (day) Value: 2 vs. 0
  misc_feature: MA Experiment 108462 PARAMETER Experiment Name: At_Germinating_Seeds_cDNA_P Parameter: Tissue Value: Germinating Seeds
  misc_feature: MA Experiment ID: 108463 Result: Down-regulated in Transcription
  misc_feature: MA Experiment 108463 PARAMETER Experiment Name: At_Germinating_Seeds_cDNA_P Parameter: Age (day) Value: 3 vs. 0
  misc_feature: MA Experiment 108463 PARAMETER Experiment Name: At_Germinating_Seeds_cDNA_P Parameter: Tissue Value: Germinating Seeds
  misc_feature: MA Experiment ID: 108464 Result: Down-regulated in Transcription
  misc_feature: MA Experiment 108464 PARAMETER Experiment Name: At_Germinating_Seeds_cDNA_P Parameter: Age (day) Value: 4 vs. 0
  misc_feature: MA Experiment 108464 PARAMETER Experiment Name: At_Germinating_Seeds_cDNA_P Parameter: Tissue Value: Germinating Seeds
  misc_feature: MA Experiment ID: 108488 Result: Up-regulated in Transcription
  misc_feature: MA Experiment ID: 108489 Result: Up-regulated in Transcription
  misc_feature: MA Experiment ID: 108572 Result: Down-regulated in Transcription
  misc_feature: MA Experiment 108572 PARAMETER Experiment Name: At_Drought_cDNA_P Parameter: Timepoint (hr) Value: 1
  misc_feature: MA Experiment 108572 PARAMETER Experiment Name: At_Drought_cDNA_P Parameter: Tissue Value: Aerial
  misc_feature: MA Experiment 108572 PARAMETER Experiment Name: At_Drought_cDNA_P Parameter: Treatment Value: Drought vs. No Drought
  misc_feature: MA Experiment ID: 108573 Result: Down-regulated in Transcription
  misc_feature: MA Experiment 108573 PARAMETER Experiment Name: At_Drought_cDNA_P Parameter: Timepoint (hr) Value: 6
  misc_feature: MA Experiment 108573 PARAMETER Experiment Name: At_Drought_cDNA_P Parameter: Tissue Value: Aerial
  misc_feature: MA Experiment 108573 PARAMETER Experiment Name: At_Drought_cDNA_P Parameter: Treatment Value: Drought vs. No Drought
  misc_feature: MA Experiment ID: 108595 Result: Down-regulated in Transcription
  misc_feature: MA Experiment 108595 PARAMETER Experiment Name: At_Ler-pi_Ovule_cDNA_P Parameter: Plant Line Value: null
  misc_feature: MA Experiment ID: 108607 Result: Down-regulated in Transcription
  misc_feature: MA Experiment 108607 PARAMETER Experiment Name: At_100uM_ABA_cDNA_P Parameter: Timepoint (hr) Value: 4
  misc_feature: MA Experiment 108607 PARAMETER Experiment Name: At_100uM_ABA_cDNA_P Parameter: Tissue Value: Aerial
  misc_feature: MA Experiment 108607 PARAMETER Experiment Name: At_100uM_ABA_cDNA_P Parameter: Treatment Value: 100uM ABA vs. No Treatment
  misc_feature: MA Experiment ID: 20000090 Result: Up-regulated in Transcription
  misc_feature: MA Experiment ID: 20000111 Result: Up-regulated in Transcription
  misc_feature: MA Experiment 20000111 PARAMETER Experiment Name: At_42deg_Heat_cDNA_P Parameter: Temperature (deg C) Value: 42 vs. 22
  misc_feature: MA Experiment 20000111 PARAMETER Experiment Name: At_42deg_Heat_cDNA_P Parameter: Timepoint (hr) Value: 6
  misc_feature: MA Experiment 20000111 PARAMETER Experiment Name: At_42deg_Heat_cDNA_P Parameter: Tissue Value: Aerial
  misc_feature: MA Experiment ID: 20000113 Result: Up-regulated in Transcription
  misc_feature: MA Experiment 20000113 PARAMETER Experiment Name: At_42deg_Heat_cDNA_P Parameter: Temperature (deg C) Value: 42 vs. 22
  misc_feature: MA Experiment 20000113 PARAMETER Experiment Name: At_42deg_Heat_cDNA_P Parameter: Timepoint (hr) Value: 8
  misc_feature: MA Experiment 20000113 PARAMETER Experiment Name: At_42deg_Heat_cDNA_P Parameter: Tissue Value: Aerial
  misc_feature: MA Experiment ID: 20000173 Result: Up-regulated in Transcription
  misc_feature: MA Experiment 20000173 PARAMETER Experiment Name: At_42deg_Heat_P Parameter: Age (day) Value: 14
  misc_feature: MA Experiment 20000173 PARAMETER Experiment Name: At_42deg_Heat_P Parameter: Organism Value: A. thaliana
  misc_feature: MA Experiment 20000173 PARAMETER Experiment Name: At_42deg_Heat_P Parameter: Plant Line Value: WS
  misc_feature: MA Experiment 20000173 PARAMETER Experiment Name: At_42deg_Heat_P Parameter: Temperature (deg C) Value: 42 vs. 22
  misc_feature: MA Experiment 20000173 PARAMETER Experiment Name: At_42deg_Heat_P Parameter: Timepoint (hr) Value: 6
  misc_feature: MA Experiment 20000173 PARAMETER Experiment Name: At_42deg_Heat_P Parameter: Tissue Value: Aerial
  misc_feature: MA Experiment ID: 20000180 Result: Down-regulated in Transcription
  misc_feature: MA Experiment 20000180 PARAMETER Experiment Name: At_Germinating_Seeds_P Parameter: Age (hr) Value: 24 vs. 0
  misc_feature: MA Experiment 20000180 PARAMETER Experiment Name: At_Germinating_Seeds_P Parameter: Tissue Value: Germinating Seeds
  misc_feature: MA Experiment ID: 20000227 Result: Up-regulated in Transcription
  misc_feature: MA Experiment 20000227 PARAMETER Experiment Name: At_Root-Tips-vs-Tops_P Parameter: Tissue Value: Root Tips vs. Root Tops
  misc_feature: MA Experiment ID: 20000437 Result: Down-regulated in Transcription
  misc_feature: MA Experiment 20000437 PARAMETER Experiment Name: At_Drought_P Parameter: Age (day) Value: 8
  misc_feature: MA Experiment 20000437 PARAMETER Experiment Name: At_Drought_P Parameter: Organism Value: A. thaliana
  misc_feature: MA Experiment 20000437 PARAMETER Experiment Name: At_Drought_P Parameter: Plant Line Value: WS
  misc_feature: MA Experiment 20000437 PARAMETER Experiment Name: At_Drought_P Parameter: Timepoint (hr) Value: 24
  misc_feature: MA Experiment 20000437 PARAMETER Experiment Name: At_Drought_P Parameter: Tissue Value: Whole Plant
  misc_feature: MA Experiment 20000437 PARAMETER Experiment Name: At_Drought_P Parameter: Treatment Value: Drought vs. No Drought
  misc_feature: MA Experiment ID: 20000456 Result: Up-regulated in Transcription
  misc_feature: MA Experiment 20000456 PARAMETER Experiment Name: At_100uM_BA_P Parameter: Age (day) Value: 14
  misc_feature: MA Experiment 20000456 PARAMETER Experiment Name: At_100uM_BA_P Parameter: Organism Value: A. thaliana
  misc_feature: MA Experiment 20000456 PARAMETER Experiment Name: At_100uM_BA_P Parameter: Plant Line Value: WS
  misc_feature: MA Experiment 20000456 PARAMETER Experiment Name: At_100uM_BA_P Parameter: Timepoint (hr) Value: 6
  misc_feature: MA Experiment 20000456 PARAMETER Experiment Name: At_100uM_BA_P Parameter: Tissue Value: Aerial
  misc_feature: MA Experiment 20000456 PARAMETER Experiment Name: At_100uM_BA_P Parameter: Treatment Value: 100uM BA vs. No Treatment
  misc_feature: MA Experiment ID: 20000794 Result: Down-regulated in Transcription
  misc_feature: MA Experiment 20000794 PARAMETER Experiment Name: At_Petals_P Parameter: Age (day) Value: 23-25 days
  misc_feature: MA Experiment 20000794 PARAMETER Experiment Name: At_Petals_P Parameter: Plant Line Value: WS
  misc_feature: MA Experiment 20000794 PARAMETER Experiment Name: At_Petals_P Parameter: Tissue Value: Petals vs. Whole plant
  misc_feature: MA Experiment ID: 20001557 Result: Up-regulated in Transcription
  misc_feature: MA Experiment 20001557 PARAMETER Experiment Name: At_Drought_Soil_Dry_P Parameter: Age (day) Value: 27
  misc_feature: MA Experiment 20001557 PARAMETER Experiment Name: At_Drought_Soil_Dry_P Parameter: Organism Value: A. thaliana
  misc_feature: MA Experiment 20001557 PARAMETER Experiment Name: At_Drought_Soil_Dry_P Parameter: Plant Line Value: WS
  misc_feature: MA Experiment 20001557 PARAMETER Experiment Name: At_Drought_Soil_Dry_P Parameter: Post Timepoint (hr) Value: 3
  misc_feature: MA Experiment 20001557 PARAMETER Experiment Name: At_Drought_Soil_Dry_P Parameter: Post-Treatment Value: Re-Water vs. No Drought
  misc_feature: MA Experiment 20001557 PARAMETER Experiment Name: At_Drought_Soil_Dry_P Parameter: Timepoint (day) Value: 13
  misc_feature: MA Experiment 20001557 PARAMETER Experiment Name: At_Drought_Soil_Dry_P Parameter: Treatment Value: Drought vs. No Drought
  misc_feature: MA Experiment ID: 20001558 Result: Up-regulated in Transcription
  misc_feature: MA Experiment 20001558 PARAMETER Experiment Name: At_Drought_Soil_Dry_P Parameter: Age (day) Value: 27
  misc_feature: MA Experiment 20001558 PARAMETER Experiment Name: At_Drought_Soil_Dry_P Parameter: Organism Value: A. thaliana
  misc_feature: MA Experiment 20001558 PARAMETER Experiment Name: At_Drought_Soil_Dry_P Parameter: Plant Line Value: WS
  misc_feature: MA Experiment 20001558 PARAMETER Experiment Name: At_Drought_Soil_Dry_P Parameter: Post Timepoint (hr) Value: 6
  misc_feature: MA Experiment 20001558 PARAMETER Experiment Name: At_Drought_Soil_Dry_P Parameter: Post-Treatment Value: Re-Water vs. No Drought
  misc_feature: MA Experiment 20001558 PARAMETER Experiment Name: At_Drought_Soil_Dry_P Parameter: Timepoint (day) Value: 13
  misc_feature: MA Experiment 20001558 PARAMETER Experiment Name: At_Drought_Soil_Dry_P Parameter: Treatment Value: Drought vs. No Drought
  misc_feature: MA Experiment ID: 20001560 Result: Up-regulated in Transcription
  misc_feature: MA Experiment 20001560 PARAMETER Experiment Name: At_Drought_Soil_Dry_P Parameter: Age (day) Value: 28
  misc_feature: MA Experiment 20001560 PARAMETER Experiment Name: At_Drought_Soil_Dry_P Parameter: Organism Value: A. thaliana
  misc_feature: MA Experiment 20001560 PARAMETER Experiment Name: At_Drought_Soil_Dry_P Parameter: Plant Line Value: WS
  misc_feature: MA Experiment 20001560 PARAMETER Experiment Name: At_Drought_Soil_Dry_P Parameter: Post Timepoint (hr) Value: None
  misc_feature: MA Experiment 20001560 PARAMETER Experiment Name: At_Drought_Soil_Dry_P Parameter: Post-Treatment Value: None
  misc_feature: MA Experiment 20001560 PARAMETER Experiment Name: At_Drought_Soil_Dry_P Parameter: Timepoint (day) Value: 14
  misc_feature: MA Experiment 20001560 PARAMETER Experiment Name: At_Drought_Soil_Dry_P Parameter: Treatment Value: Drought vs. No Drought
  misc_feature: MA Experiment ID: 20001757 Result: Up-regulated in Transcription
  misc_feature: MA Experiment 20001757 PARAMETER Experiment Name: At_50mM_NH4NO3_L-to-H_P Parameter: Timepoint (hr) Value: 6
  misc_feature: MA Experiment 20001757 PARAMETER Experiment Name: At_50mM_NH4NO3_L-to-H_P Parameter: Tissue Value: Leaf
  misc_feature: MA Experiment 20001757 PARAMETER Experiment Name: At_50mM_NH4NO3_L-to-H_P Parameter: Treatment Value: 50mM NH4NO3 vs 100mM Mannitol
aaactaaaaccctagctacctttttctcctcaccgcttctttcttccctgaactcagaacttagaacaaagaactctcgtagacgaagaagaagatgacggtagaaggagtgaaccctaaggcgtatccgttagctgattctcagttatcgataacgattcttgatcttgttcaacaagctacgaattacaaacagttaaagaaaggagctaatgaagctaccaagacattgaaccgtgggatctctgagttcattgttatggctgctgatactgagcctctcgagattcttcttcatcttcctcttcttgctgaagataagaatgtgccgtatgtgtttgtgccatcgaaacaagcccttggaagagcatgtgatgtaaccagacccgtgatcgcttgttccgttacatcaaacgaggctagtcagttgaaatctcaaattcagcaccttaaggatgccattgagaagctcctcatctagattcttggtggaatgaatgaatgatgggtctctccatttatgaagaggcttggactgaagtgagtttatgtgcaactttttagcctatgagaaaaacaaaaaacttgtgaacgaatcctatcctttttgaagattgtaatgctttttatttgatattgtgttggtgccaatgcatttatgaacaacaagaatccttttaaagtgagtttcttcaatttggttatttgtttggtg

SEQ ID NO: 22375 - protein, 128 aa, Arabidopsis thaliana
  peptide (1)..(128): Ceres Seq. ID no. 12370448
  misc_feature (20)..(114): Pfam Name: Ribosomal protein L7Ae/L30e/S12e/Gadd45 family Pfam Description: Ribosomal protein L7Ae/L30e/S12e/Gadd45 family
  misc_feature (1)..(128): Homolog of NCBI NO: 38174386 NR Description: Unknown (protein for MGC:75724) [Silurana
  misc_feature (1)..(128): Homolog of NCBI NO: 17535189 NR Description: Ribosomal protein L7Ae/L30e/S12e/Gadd45 family
  misc_feature (1)..(108): Homolog of NCBI NO: 25295061 NR Description: Ribosomal protein L7Ae-like (partial)
  misc_feature (6)..(128): Homolog of NCBI NO: 37530712 NR Description: putative ribosomal protein L7Ae-like
  misc_feature (1)..(46): Homolog of NCBI NO: 30687670 NR Description: ribosomal protein L7Ae family [Arabidopsis
  misc_feature (42)..(128): Homolog of NCBI NO: 30687670 NR Description: ribosomal protein L7Ae family [Arabidopsis
  misc_feature (1)..(128): Homolog of NCBI NO: 15236127 NR Description: Ribosomal protein L7Ae - like; protein id:
  misc_feature (1)..(128): Homolog of NCBI NO: 15241276 NR Description: ribosomal protein L7Ae-like
  misc_feature (1)..(128): Homolog of NCBI NO: 21592866 NR Description: Ribosomal protein L7Ae-like [Arabidopsis thaliana]
  misc_feature (1)..(128): Homolog of NCBI NO: 15235416 NR Description: Ribosomal protein L7Ae -like
MTVEGVNPKAYPLADSQLSITILDLVQQATNYKQLKKGANEATKTLNRGISEFIVMAADTEPLEILLHLPLLAEDKNVPYVFVPSKQALGRACDVTRPVIACSVTSNEASQLKSQIQHLKDAIEKLLI

SEQ ID NO: 22376 - protein, 73 aa, Arabidopsis thaliana
  peptide (1)..(73): Ceres Seq. ID no. 12370449
  misc_feature (1)..(59): Pfam Name: Ribosomal protein L7Ae/L30e/S12e/Gadd45 family Pfam Description: Ribosomal protein L7Ae/L30e/S12e/Gadd45 family
  misc_feature (1)..(73): Homolog of NCBI NO: 39597398 NR Description: Hypothetical protein CBG03041 [Caenorhabditis
  misc_feature (1)..(73): Homolog of NCBI NO: 38174386 NR Description: Unknown (protein for MGC:75724) [Silurana
  misc_feature (1)..(73): Homolog of NCBI NO: 17535189 NR Description: Ribosomal protein L7Ae/L30e/S12e/Gadd45 family
  misc_feature (1)..(53): Homolog of NCBI NO: 25295061 NR Description: Ribosomal protein L7Ae-like (partial)
  misc_feature (1)..(73): Homolog of NCBI NO: 37530712 NR Description: putative ribosomal protein L7Ae-like
  misc_feature (1)..(73): Homolog of NCBI NO: 30687670 NR Description: ribosomal protein L7Ae family [Arabidopsis
  misc_feature (1)..(73): Homolog of NCBI NO: 15236127 NR Description: Ribosomal protein L7Ae - like; protein id:
  misc_feature (1)..(73): Homolog of NCBI NO: 15241276 NR Description: ribosomal protein L7Ae-like
  misc_feature (1)..(73): Homolog of NCBI NO: 21592866 NR Description: Ribosomal protein L7Ae-like [Arabidopsis thaliana]
  misc_feature (1)..(73): Homolog of NCBI NO: 15235416 NR Description: Ribosomal protein L7Ae -like
MAADTEPLEILLHLPLLAEDKNVPYVFVPSKQALGRACDVTRPVIACSVTSNEASQLKSQIQHLKDAIEKLLI

SEQ ID NO: 22377 - DNA, 1460 bp, Arabidopsis thaliana
  misc_feature (1)..(1460): Ceres Seq. ID no. 12396066
  misc_feature: MA Experiment ID: 108462 Result: Up-regulated in Transcription
  misc_feature: MA Experiment 108462 PARAMETER Experiment Name: At_Germinating_Seeds_cDNA_P Parameter: Age (day) Value: 2 vs. 0
  misc_feature: MA Experiment 108462 PARAMETER Experiment Name: At_Germinating_Seeds_cDNA_P Parameter: Tissue Value: Germinating Seeds
  misc_feature: MA Experiment ID: 108463 Result: Up-regulated in Transcription
  misc_feature: MA Experiment 108463 PARAMETER Experiment Name: At_Germinating_Seeds_cDNA_P Parameter: Age (day) Value: 3 vs. 0
  misc_feature: MA Experiment 108463 PARAMETER Experiment Name: At_Germinating_Seeds_cDNA_P Parameter: Tissue Value: Germinating Seeds
  misc_feature: MA Experiment ID: 108464 Result: Up-regulated in Transcription
  misc_feature: MA Experiment 108464 PARAMETER Experiment Name: At_Germinating_Seeds_cDNA_P Parameter: Age (day) Value: 4 vs. 0
  misc_feature: MA Experiment 108464 PARAMETER Experiment Name: At_Germinating_Seeds_cDNA_P Parameter: Tissue Value: Germinating Seeds
  misc_feature: MA Experiment ID: 108473 Result: Down-regulated in Transcription
  misc_feature: MA Experiment 108473 PARAMETER Experiment Name: At_Drought_Flowers_cDNA_P Parameter: Timepoint (hr) Value: 7 d
  misc_feature: MA Experiment 108473 PARAMETER Experiment Name: At_Drought_Flowers_cDNA_P Parameter: Tissue Value: Flower
  misc_feature: MA Experiment 108473 PARAMETER Experiment Name: At_Drought_Flowers_cDNA_P Parameter: Treatment Value: Drought vs. No Drought
  misc_feature: MA Experiment ID: 108488 Result: Up-regulated in Transcription
  misc_feature: MA Experiment ID: 108605 Result: Up-regulated in Transcription
  misc_feature: MA Experiment 108605 PARAMETER Experiment Name: At_100uM_ABA_cDNA_P Parameter: Timepoint (hr) Value: 6
  misc_feature: MA Experiment 108605 PARAMETER Experiment Name: At_100uM_ABA_cDNA_P Parameter: Tissue Value: Aerial
  misc_feature: MA Experiment 108605 PARAMETER Experiment Name: At_100uM_ABA_cDNA_P Parameter: Treatment Value: 100uM ABA vs. No Treatment
  misc_feature: MA Experiment ID: 108607 Result: Up-regulated in Transcription
  misc_feature: MA Experiment 108607 PARAMETER Experiment Name: At_100uM_ABA_cDNA_P Parameter: Timepoint (hr) Value: 4
  misc_feature: MA Experiment 108607 PARAMETER Experiment Name: At_100uM_ABA_cDNA_P Parameter: Tissue Value: Aerial
  misc_feature: MA Experiment 108607 PARAMETER Experiment Name: At_100uM_ABA_cDNA_P Parameter: Treatment Value: 100uM ABA vs. No Treatment
  misc_feature: MA Experiment ID: 20000111 Result: Down-regulated in Transcription
  misc_feature: MA Experiment 20000111 PARAMETER Experiment Name: At_42deg_Heat_cDNA_P Parameter: Temperature (deg C) Value: 42 vs. 22
  misc_feature: MA Experiment 20000111 PARAMETER Experiment Name: At_42deg_Heat_cDNA_P Parameter: Timepoint (hr) Value: 6
  misc_feature: MA Experiment 20000111 PARAMETER Experiment Name: At_42deg_Heat_cDNA_P Parameter: Tissue Value: Aerial
  misc_feature: MA Experiment ID: 20000112 Result: Down-regulated in Transcription
  misc_feature: MA Experiment 20000112 PARAMETER Experiment Name: At_42deg_Heat_cDNA_P Parameter: Temperature (deg C) Value: 42 vs. 22
  misc_feature: MA Experiment 20000112 PARAMETER Experiment Name: At_42deg_Heat_cDNA_P Parameter: Timepoint (hr) Value: 2
  misc_feature: MA Experiment 20000112 PARAMETER Experiment Name: At_42deg_Heat_cDNA_P Parameter: Tissue Value: Aerial
  misc_feature: MA Experiment ID: 20000113 Result: Down-regulated in Transcription
  misc_feature: MA Experiment 20000113 PARAMETER Experiment Name: At_42deg_Heat_cDNA_P Parameter: Temperature (deg C) Value: 42 vs. 22
  misc_feature: MA Experiment 20000113 PARAMETER Experiment Name: At_42deg_Heat_cDNA_P Parameter: Timepoint (hr) Value: 8
  misc_feature: MA Experiment 20000113 PARAMETER Experiment Name: At_42deg_Heat_cDNA_P Parameter: Tissue Value: Aerial
  misc_feature: MA Experiment ID: 20000144 Result: Down-regulated in Transcription
  misc_feature: MA Experiment 20000144 PARAMETER Experiment Name: At_42deg_Heat_cDNA_P Parameter: Temperature (deg C) Value: 42 vs. 22
  misc_feature: MA Experiment 20000144 PARAMETER Experiment Name: At_42deg_Heat_cDNA_P Parameter: Timepoint (hr) Value: 1
  misc_feature: MA Experiment 20000144 PARAMETER Experiment Name: At_42deg_Heat_cDNA_P Parameter: Tissue Value: Aerial
  misc_feature: MA Experiment ID: 20000169 Result: Up-regulated in Transcription
  misc_feature: MA Experiment 20000169 PARAMETER Experiment Name: At_100uM_ABA_P Parameter: Age (day) Value: 14
  misc_feature: MA Experiment 20000169 PARAMETER Experiment Name: At_100uM_ABA_P Parameter: Organism Value: A. thaliana
  misc_feature: MA Experiment 20000169 PARAMETER Experiment Name: At_100uM_ABA_P Parameter: Plant Line Value: WS
  misc_feature: MA Experiment 20000169 PARAMETER Experiment Name: At_100uM_ABA_P Parameter: Timepoint (hr) Value: 6
  misc_feature: MA Experiment 20000169 PARAMETER Experiment Name: At_100uM_ABA_P Parameter: Tissue Value: Aerial
  misc_feature: MA Experiment 20000169 PARAMETER Experiment Name: At_100uM_ABA_P Parameter: Treatment Value: 100uM ABA vs. No Treatment
  misc_feature: MA Experiment ID: 20000171 Result: Down-regulated in Transcription
  misc_feature: MA Experiment 20000171 PARAMETER Experiment Name: At_42deg_Heat_P Parameter: Age (day) Value: 14
  misc_feature: MA Experiment 20000171 PARAMETER Experiment Name: At_42deg_Heat_P Parameter: Organism Value: A. thaliana
  misc_feature: MA Experiment 20000171 PARAMETER Experiment Name: At_42deg_Heat_P Parameter: Plant Line Value: WS
  misc_feature: MA Experiment 20000171 PARAMETER Experiment Name: At_42deg_Heat_P Parameter: Temperature (deg C) Value: 42 vs. 22
  misc_feature: MA Experiment 20000171 PARAMETER Experiment Name: At_42deg_Heat_P Parameter: Timepoint (hr) Value: 1
  misc_feature: MA Experiment 20000171 PARAMETER Experiment Name: At_42deg_Heat_P Parameter: Tissue Value: Aerial
  misc_feature: MA Experiment ID: 20000173 Result: Down-regulated in Transcription
  misc_feature: MA Experiment 20000173 PARAMETER Experiment Name: At_42deg_Heat_P Parameter: Age (day) Value: 14
  misc_feature: MA Experiment 20000173 PARAMETER Experiment Name: At_42deg_Heat_P Parameter: Organism Value: A. thaliana
  misc_feature: MA Experiment 20000173 PARAMETER Experiment Name: At_42deg_Heat_P Parameter: Plant Line Value: WS
  misc_feature: MA Experiment 20000173 PARAMETER Experiment Name: At_42deg_Heat_P Parameter: Temperature (deg C) Value: 42 vs. 22
  misc_feature: MA Experiment 20000173 PARAMETER Experiment Name: At_42deg_Heat_P Parameter: Timepoint (hr) Value: 6
  misc_feature: MA Experiment 20000173 PARAMETER Experiment Name: At_42deg_Heat_P Parameter: Tissue Value: Aerial
  misc_feature: MA Experiment ID: 20000180 Result: Up-regulated in Transcription
  misc_feature: MA Experiment 20000180 PARAMETER Experiment Name: At_Germinating_Seeds_P Parameter: Age (hr) Value: 24 vs. 0
  misc_feature: MA Experiment 20000180 PARAMETER Experiment Name: At_Germinating_Seeds_P Parameter: Tissue Value: Germinating Seeds
  misc_feature: MA Experiment ID: 20000184 Result: Up-regulated in Transcription
  misc_feature: MA Experiment 20000184 PARAMETER Experiment Name: At_Shoots__P Parameter: Age (day) Value: 7
  misc_feature: MA Experiment 20000184 PARAMETER Experiment Name: At_Shoots__P Parameter: Tissue Value: Shoots vs. Whole Plant
  misc_feature: MA Experiment ID: 20000185 Result: Down-regulated in Transcription
  misc_feature: MA Experiment 20000185 PARAMETER Experiment Name: At_Roots__P Parameter: Age (day) Value: 7 vs. 21
  misc_feature: MA Experiment 20000185 PARAMETER Experiment Name: At_Roots__P Parameter: Organism Value: A. thaliana
  misc_feature: MA Experiment 20000185 PARAMETER Experiment Name: At_Roots__P Parameter: Tissue Value: Roots vs. Whole Plant
  misc_feature: MA Experiment ID: 20000227 Result: Down-regulated in Transcription
  misc_feature: MA Experiment 20000227 PARAMETER Experiment Name: At_Root-Tips-vs-Tops_P Parameter: Tissue Value: Root Tips vs. Root Tops
  misc_feature: MA Experiment ID: 20000234 Result: Up-regulated in Transcription
  misc_feature: MA Experiment 20000234 PARAMETER Experiment Name: At_Siliques_P Parameter: Age (day) Value: 21
  misc_feature: MA Experiment 20000234 PARAMETER Experiment Name: At_Siliques_P Parameter: Organism Value: A. thaliana
  misc_feature: MA Experiment 20000234 PARAMETER Experiment Name: At_Siliques_P Parameter: Plant Line Value: WS
  misc_feature: MA Experiment 20000234 PARAMETER Experiment Name: At_Siliques_P Parameter: Tissue Value: Less Than 5mm Siliques vs. Whole Plant
  misc_feature: MA Experiment ID: 20000235 Result: Up-regulated in Transcription
  misc_feature: MA Experiment 20000235 PARAMETER Experiment Name: At_Siliques_P Parameter: Age (day) Value: 21
  misc_feature: MA Experiment 20000235 PARAMETER Experiment Name: At_Siliques_P Parameter: Organism Value: A. thaliana
  misc_feature: MA Experiment 20000235 PARAMETER Experiment Name: At_Siliques_P Parameter: Plant Line Value: WS
  misc_feature: MA Experiment 20000235 PARAMETER Experiment Name: At_Siliques_P Parameter: Tissue Value: 5-10mm Siliques vs. Whole Plant
  misc_feature: MA Experiment ID: 20000265 Result: Up-regulated in Transcription
  misc_feature: MA Experiment 20000265 PARAMETER Experiment Name: At_Open_Flower_P Parameter: Age (day) Value: 21
  misc_feature: MA Experiment 20000265 PARAMETER Experiment Name: At_Open_Flower_P Parameter: Plant Line Value: WS
  misc_feature: MA Experiment 20000265 PARAMETER Experiment Name: At_Open_Flower_P Parameter: Tissue Value: Closed Flower vs. Whole Plant
  misc_feature: MA Experiment ID: 20000496 Result: Down-regulated in Transcription
  misc_feature: MA Experiment 20000496 PARAMETER Experiment Name: At_Guard_Cells_P Parameter: Harvest Date Value: 7/19/2002
  misc_feature: MA Experiment 20000496 PARAMETER Experiment Name: At_Guard_Cells_P Parameter: Organism Value: Canola
  misc_feature: MA Experiment 20000496 PARAMETER Experiment Name: At_Guard_Cells_P Parameter: Tissue Value: Guard Cells vs. Leaves
  misc_feature: MA Experiment ID: 20000794 Result: Down-regulated in Transcription
  misc_feature: MA Experiment 20000794 PARAMETER Experiment Name: At_Petals_P Parameter: Age (day) Value: 23-25 days
  misc_feature: MA Experiment 20000794 PARAMETER Experiment Name: At_Petals_P Parameter: Plant Line Value: WS
  misc_feature: MA Experiment 20000794 PARAMETER Experiment Name: At_Petals_P Parameter: Tissue Value: Petals vs. Whole plant
  misc_feature: MA Experiment ID: 20001247 Result: Up-regulated in Transcription
  misc_feature: MA Experiment 20001247 PARAMETER Experiment Name: At_Far-red-induction_P Parameter: Age (day) Value: 7
  misc_feature: MA Experiment 20001247 PARAMETER Experiment Name: At_Far-red-induction_P Parameter: Light Value: Far-red vs. White
  misc_feature: MA Experiment 20001247 PARAMETER Experiment Name: At_Far-red-induction_P Parameter: Organism Value: A. thaliana
  misc_feature: MA Experiment 20001247 PARAMETER Experiment Name: At_Far-red-induction_P Parameter: Plant Line Value: Columbia
  misc_feature: MA Experiment 20001247 PARAMETER Experiment Name: At_Far-red-induction_P Parameter: Timepoint (hr) Value: 1
  misc_feature: MA Experiment 20001247 PARAMETER Experiment Name: At_Far-red-induction_P Parameter: Tissue Value: Whole Plant
  misc_feature: MA Experiment ID: 20001557 Result: Up-regulated in Transcription
  misc_feature: MA Experiment 20001557 PARAMETER Experiment Name: At_Drought_Soil_Dry_P Parameter: Age (day) Value: 27
  misc_feature: MA Experiment 20001557 PARAMETER Experiment Name: At_Drought_Soil_Dry_P Parameter: Organism Value: A. thaliana
  misc_feature: MA Experiment 20001557 PARAMETER Experiment Name: At_Drought_Soil_Dry_P Parameter: Plant Line Value: WS
  misc_feature: MA Experiment 20001557 PARAMETER Experiment Name: At_Drought_Soil_Dry_P Parameter: Post Timepoint (hr) Value: 3
  misc_feature: MA Experiment 20001557 PARAMETER Experiment Name: At_Drought_Soil_Dry_P Parameter: Post-Treatment Value: Re-Water vs. No Drought
  misc_feature: MA Experiment 20001557 PARAMETER Experiment Name: At_Drought_Soil_Dry_P Parameter: Timepoint (day) Value: 13
  misc_feature: MA Experiment 20001557 PARAMETER Experiment Name: At_Drought_Soil_Dry_P Parameter: Treatment Value: Drought vs. No Drought
  misc_feature: MA Experiment ID: 20001560 Result: Up-regulated in Transcription
  misc_feature: MA Experiment 20001560 PARAMETER Experiment Name: At_Drought_Soil_Dry_P Parameter: Age (day) Value: 28
  misc_feature: MA Experiment 20001560 PARAMETER Experiment Name: At_Drought_Soil_Dry_P Parameter: Organism Value: A. thaliana
  misc_feature: MA Experiment 20001560 PARAMETER Experiment Name: At_Drought_Soil_Dry_P Parameter: Plant Line Value: WS
  misc_feature: MA Experiment 20001560 PARAMETER Experiment Name: At_Drought_Soil_Dry_P Parameter: Post Timepoint (hr) Value: None
  misc_feature: MA Experiment 20001560 PARAMETER Experiment Name: At_Drought_Soil_Dry_P Parameter: Post-Treatment Value: None
  misc_feature: MA Experiment 20001560 PARAMETER Experiment Name: At_Drought_Soil_Dry_P Parameter: Timepoint (day) Value: 14
  misc_feature: MA Experiment 20001560 PARAMETER Experiment Name: At_Drought_Soil_Dry_P Parameter: Treatment Value: Drought vs. No Drought
  misc_feature: MA Experiment ID: 20001911 Result: Down-regulated in Transcription
  misc_feature: MA Experiment 20001911 PARAMETER Experiment Name: At_Drought_Reproduction_P Parameter: Age (day) Value: 40
  misc_feature: MA Experiment 20001911 PARAMETER Experiment Name: At_Drought_Reproduction_P Parameter: Organism Value: A. thaliana
  misc_feature: MA Experiment 20001911 PARAMETER Experiment Name: At_Drought_Reproduction_P Parameter: Plant Line Value: WS
  misc_feature: MA Experiment 20001911 PARAMETER Experiment Name: At_Drought_Reproduction_P Parameter: Timepoint (day) Value: 10
  misc_feature: MA Experiment 20001911 PARAMETER Experiment Name: At_Drought_Reproduction_P Parameter: Tissue Value: Flowers
  misc_feature: MA Experiment 20001911 PARAMETER Experiment Name: At_Drought_Reproduction_P Parameter: Treatment Value: Drought vs. No Drought
actcaactctctttcgaaactcaatccttatataacacatcccatttaagcctataagctacacatatcagctctctcacaaaaataaaatggagggaagcccagtgaccagtgtcaggctctcttcggtggtgcctgcttctgtggtaggtgagaacaagccacgacagctcacacccatggacttagccatgaagctccactacgtccgagccgtctacttcttcaagggtgcacgtgacttcactgtcgccgacgtgaagaacaccatgtttactctacagtctctactccaatcttatcaccacgtctcaggtcggatccggatgtccgacaacgacaacgacacttcagctgcagccataccttacattcgctgcaacgacagtggcatacgcgtggtcgaggccaacgtcgaagagttcacagtggagaagtggctcgagttggacgaccgttccattgaccaccgattccttgtctacgatcacgttcttggtcctgatcttaccttctcgccactcgttttcctccagataactcagtttaaatgtggtgggctctgtattgggttgagttgggcccatattcttggagacgtgttttcagcatcaacgttcatgaaaacacttggacagctggtatcgggtcatgccccaacaaaaccggtttacccgaaaacccccgaactaacctctcatgctcgtaatgatggtgaagctatttccattgaaaagatagattcggttggcgagtattggttacttaccaataaatgcaagatggggagacacatttttaattttagcctcaaccacattgatagcttgatggccaagtacaccacgcgagaccaacctttctcggaggttgatattttgtatgcattgatatggaagtcgctactgaatatccgcggcgaaacaaacacgaatgttataacaatttgtgaccgtaaaaagtcttcaacctgttggaacgaggacttggtaataagcgtagtggaaaagaatgacgaaatggttgggatatccgaactagctgcactgattgctggtgaaaaaagagaagaaaacggtgcgatcaagaggatgatagaacaagataaaggctcttcggattttttcacgtacggtgcaaatttaacgtttgtgaatcttgatgaaatagatatgtatgaacttgagatcaacggagggaagccggatttcgtaaactacacgattcatggggtcggagacaaaggtgttgttttggtttttcccaagcaaaactttgcaaggattgtaagtgtagtgatgcctgaagaagaccttgcaaaactcaaggaggaggtgactaatatgattatataactttgtatcttcttcttgttgttatacataaatgctgttttttactctttgtaatttcattatcgaattgttgggaagcctatcaataaattgtttgaactgttt

SEQ ID NO: 22378 - protein, 421 aa, Arabidopsis thaliana
  peptide (1)..(421): Ceres Seq. ID no. 12396067
  misc_feature (4)..(419): Pfam Name: Transferase family Pfam Description: Transferase family
  misc_feature (1)..(392): Homolog of NCBI NO: 18417362 NR Description: expressed protein
  misc_feature (158)..(421): Homolog of NCBI NO: 38568010 NR Description: OSJNBa0070C17.2 [Oryza sativa (japonica
  misc_feature (10)..(150): Homolog of NCBI NO: 38568009 NR Description: OSJNBa0070C17.1 [Oryza sativa (japonica
  misc_feature (171)..(276): Homolog of NCBI NO: 1877046 NR Description: CER2 [Arabidopsis thaliana]
  misc_feature (10)..(413): Homolog of NCBI NO: 2130139 NR Description: hypothetical protein - maize
  misc_feature (10)..(421): Homolog of NCBI NO: 38345799 NR Description: OSJNBa0085I10.16 [Oryza sativa (japonica
  misc_feature (5)..(415): Homolog of NCBI NO: 15236357 NR Description: fatty acid elongase - like protein (cer2-like)
  misc_feature (2)..(416): Homolog of NCBI NO: 18403923 NR Description: expressed protein
  misc_feature (2)..(416): Homolog of NCBI NO: 21593424 NR Description: fatty acid elongase-like protein (cer2-like)
  misc_feature (1)..(421): Homolog of NCBI NO: 15233851 NR Description: CER2; protein id: At4g24510.1, supported by cDNA:
MEGSPVTSVRLSSVVPASVVGENKPRQLTPMDLAMKLHYVRAVYFFKGARDFTVADVKNTMFTLQSLLQSYHHVSGRIRMSDNDNDTSAAAIPYIRCNDSGIRVVEANVEEFTVEKWLELDDRSIDHRFLVYDHVLGPDLTFSPLVFLQITQFKCGGLCIGLSWAHILGDVFSASTFMKTLGQLVSGHAPTKPVYPKTPELTSHARNDGEAISIEKIDSVGEYWLLTNKCKMGRHIFNFSLNHIDSLMAKYTTRDQPFSEVDILYALIWKSLLNIRGETNTNVITICDRKKSSTCWNEDLVISVVEKNDEMVGISELAALIAGEKREENGAIKRMIEQDKGSSDFFTYGANLTFVNLDEIDMYELEINGGKPDFVNYTIHGVGDKGVVLVFPKQNFARIVSVVMPEEDLAKLKEEVTNMII

SEQ ID NO: 22379 - protein, 391 aa, Arabidopsis thaliana
  peptide (1)..(391): Ceres Seq. ID no. 12396068
  misc_feature (1)..(389): Pfam Name: Transferase family Pfam Description: Transferase family
  misc_feature (1)..(383): Homolog of NCBI NO: 2130139 NR Description: hypothetical protein - maize
  misc_feature (1)..(391): Homolog of NCBI NO: 38345799 NR Description: OSJNBa0085I10.16 [Oryza sativa (japonica
  misc_feature (1)..(385): Homolog of NCBI NO: 15236357 NR Description: fatty acid elongase - like protein (cer2-like)
  misc_feature (1)..(362): Homolog of NCBI NO: 18417362 NR Description: expressed protein
  misc_feature (1)..(120): Homolog of NCBI NO: 38568009 NR Description: OSJNBa0070C17.1 [Oryza sativa (japonica
  misc_feature (141)..(246): Homolog of NCBI NO: 1877046 NR Description: CER2 [Arabidopsis thaliana]
  misc_feature (128)..(391): Homolog of NCBI NO: 38568010 NR Description: OSJNBa0070C17.2 [Oryza sativa (japonica
  misc_feature (1)..(386): Homolog of NCBI NO: 18403923 NR Description: expressed protein
  misc_feature (1)..(386): Homolog of NCBI NO: 21593424 NR Description: fatty acid elongase-like protein (cer2-like)
  misc_feature (1)..(391): Homolog of NCBI NO: 15233851 NR Description: CER2; protein id: At4g24510.1, supported by cDNA:
MDLAMKLHYVRAVYFFKGARDFTVADVKNTMFTLQSLLQSYHHVSGRIRMSDNDNDTSAAAIPYIRCNDSGIRVVEANVEEFTVEKWLELDDRSIDHRFLVYDHVLGPDLTFSPLVFLQITQFKCGGLCIGLSWAHILGDVFSASTFMKTLGQLVSGHAPTKPVYPKTPELTSHARNDGEAISIEKIDSVGEYWLLTNKCKMGRHIFNFSLNHIDSLMAKYTTRDQPFSEVDILYALIWKSLLNIRGETNTNVITICDRKKSSTCWNEDLVISVVEKNDEMVGISELAALIAGEKREENGAIKRMIEQDKGSSDFFTYGANLTFVNLDEIDMYELEINGGKPDFVNYTIHGVGDKGVVLVFPKQNFARIVSVVMPEEDLAKLKEEVTNMII

SEQ ID NO: 22380 - protein, 387 aa, Arabidopsis thaliana
  peptide (1)..(387): Ceres Seq. ID no. 12396069
  misc_feature (1)..(385): Pfam Name: Transferase family Pfam Description: Transferase family
  misc_feature (1)..(358): Homolog of NCBI NO: 18417362 NR Description: expressed protein
  misc_feature (124)..(387): Homolog of NCBI NO: 38568010 NR Description: OSJNBa0070C17.2 [Oryza sativa (japonica
  misc_feature (1)..(116): Homolog of NCBI NO: 38568009 NR Description: OSJNBa0070C17.1 [Oryza sativa (japonica
  misc_feature (137)..(242): Homolog of NCBI NO: 1877046 NR Description: CER2 [Arabidopsis thaliana]
  misc_feature (1)..(379): Homolog of NCBI NO: 2130139 NR Description: hypothetical protein - maize
  misc_feature (1)..(387): Homolog of NCBI NO: 38345799 NR Description: OSJNBa0085I10.16 [Oryza sativa (japonica
  misc_feature (1)..(381): Homolog of NCBI NO: 15236357 NR Description: fatty acid elongase - like protein (cer2-like)
  misc_feature (1)..(382): Homolog of NCBI NO: 18403923 NR Description: expressed protein
  misc_feature (1)..(382): Homolog of NCBI NO: 21593424 NR Description: fatty acid elongase-like protein (cer2-like)
  misc_feature (1)..(387): Homolog of NCBI NO: 15233851 NR Description: CER2; protein id: At4g24510.1, supported by cDNA:
MKLHYVRAVYFFKGARDFTVADVKNTMFTLQSLLQSYHHVSGRIRMSDNDNDTSAAAIPYIRCNDSGIRVVEANVEEFTVEKWLELDDRSIDHRFLVYDHVLGPDLTFSPLVFLQITQFKCGGLCIGLSWAHILGDVFSASTFMKTLGQLVSGHAPTKPVYPKTPELTSHARNDGEAISIEKIDSVGEYWLLTNKCKMGRHIFNFSLNHIDSLMAKYTTRDQPFSEVDILYALIWKSLLNIRGETNTNVITICDRKKSSTCWNEDLVISVVEKNDEMVGISELAALIAGEKREENGAIKRMIEQDKGSSDFFTYGANLTFVNLDEIDMYELEINGGKPDFVNYTIHGVGDKGVVLVFPKQNFARIVSVVMPEEDLAKLKEEVTNMII

SEQ ID NO: 22381 - DNA, 1996 bp, Arabidopsis thaliana
  misc_feature (1)..(1996): Ceres Seq. ID no. 12703385
  misc_feature: MA Experiment ID: 108434 Result: Up-regulated in Transcription
  misc_feature: MA Experiment 108434 PARAMETER Experiment Name: At_Root_Tips_cDNA_P Parameter: Tissue Value: Root Tips
  misc_feature: MA Experiment ID: 108462 Result: Down-regulated in Transcription
  misc_feature: MA Experiment 108462 PARAMETER Experiment Name: At_Germinating_Seeds_cDNA_P Parameter: Age (day) Value: 2 vs. 0
  misc_feature: MA Experiment 108462 PARAMETER Experiment Name: At_Germinating_Seeds_cDNA_P Parameter: Tissue Value: Germinating Seeds
  misc_feature: MA Experiment ID: 108463 Result: Down-regulated in Transcription
  misc_feature: MA Experiment 108463 PARAMETER Experiment Name: At_Germinating_Seeds_cDNA_P Parameter: Age (day) Value: 3 vs. 0
  misc_feature: MA Experiment 108463 PARAMETER Experiment Name: At_Germinating_Seeds_cDNA_P Parameter: Tissue Value: Germinating Seeds
  misc_feature: MA Experiment ID: 108464 Result: Down-regulated in Transcription
  misc_feature: MA Experiment 108464 PARAMETER Experiment Name: At_Germinating_Seeds_cDNA_P Parameter: Age (day) Value: 4 vs. 0
  misc_feature: MA Experiment 108464 PARAMETER Experiment Name: At_Germinating_Seeds_cDNA_P Parameter: Tissue Value: Germinating Seeds
  misc_feature: MA Experiment ID: 108488 Result: Up-regulated in Transcription
  misc_feature: MA Experiment ID: 108605 Result: Down-regulated in Transcription
  misc_feature: MA Experiment 108605 PARAMETER Experiment Name: At_100uM_ABA_cDNA_P Parameter: Timepoint (hr) Value: 6
  misc_feature: MA Experiment 108605 PARAMETER Experiment Name: At_100uM_ABA_cDNA_P Parameter: Tissue Value: Aerial
  misc_feature: MA Experiment 108605 PARAMETER Experiment Name: At_100uM_ABA_cDNA_P Parameter: Treatment Value: 100uM ABA vs. No Treatment
  misc_feature: MA Experiment ID: 108607 Result: Down-regulated in Transcription
  misc_feature: MA Experiment 108607 PARAMETER Experiment Name: At_100uM_ABA_cDNA_P Parameter: Timepoint (hr) Value: 4
  misc_feature: MA Experiment 108607 PARAMETER Experiment Name: At_100uM_ABA_cDNA_P Parameter: Tissue Value: Aerial
  misc_feature: MA Experiment 108607 PARAMETER Experiment Name: At_100uM_ABA_cDNA_P Parameter: Treatment Value: 100uM ABA vs. No Treatment
  misc_feature: MA Experiment ID: 108609 Result: Down-regulated in Transcription
  misc_feature: MA Experiment 108609 PARAMETER Experiment Name: At_100uM_ABA_cDNA_P Parameter: Timepoint (hr) Value: 24
  misc_feature: MA Experiment 108609 PARAMETER Experiment Name: At_100uM_ABA_cDNA_P Parameter: Tissue Value: Aerial
  misc_feature: MA Experiment 108609 PARAMETER Experiment Name: At_100uM_ABA_cDNA_P Parameter: Treatment Value: 100uM ABA vs. No Treatment
  misc_feature: MA Experiment ID: 20000069 Result: Down-regulated in Transcription
  misc_feature: MA Experiment 20000069 PARAMETER Experiment Name: At_100uM_ABA_Mutants_cDNA_P Parameter: Plant Line Value: CS23
  misc_feature: MA Experiment 20000069 PARAMETER Experiment Name: At_100uM_ABA_Mutants_cDNA_P Parameter: Timepoint (hr) Value: 6
  misc_feature: MA Experiment 20000069 PARAMETER Experiment Name: At_100uM_ABA_Mutants_cDNA_P Parameter: Tissue Value: Aerial
  misc_feature: MA Experiment 20000069 PARAMETER Experiment Name: At_100uM_ABA_Mutants_cDNA_P Parameter: Treatment Value: 100uM ABA vs. No Treatment
  misc_feature: MA Experiment ID: 20000070 Result: Down-regulated in Transcription
  misc_feature: MA Experiment 20000070 PARAMETER Experiment Name: At_100uM_ABA_Mutants_cDNA_P Parameter: Plant Line Value: CS24
  misc_feature: MA Experiment 20000070 PARAMETER Experiment Name: At_100uM_ABA_Mutants_cDNA_P Parameter: Timepoint (hr) Value: 6
  misc_feature: MA Experiment 20000070 PARAMETER Experiment Name: At_100uM_ABA_Mutants_cDNA_P Parameter: Tissue Value: Aerial
  misc_feature: MA Experiment 20000070 PARAMETER Experiment Name: At_100uM_ABA_Mutants_cDNA_P Parameter: Treatment Value: 100uM ABA vs. No Treatment
  misc_feature: MA Experiment ID: 20000071 Result: Down-regulated in Transcription
  misc_feature: MA Experiment 20000071 PARAMETER Experiment Name: At_100uM_ABA_Mutants_cDNA_P Parameter: Plant Line Value: CS8104
  misc_feature: MA Experiment 20000071 PARAMETER Experiment Name: At_100uM_ABA_Mutants_cDNA_P Parameter: Timepoint (hr) Value: 6
  misc_feature: MA Experiment 20000071 PARAMETER Experiment Name: At_100uM_ABA_Mutants_cDNA_P Parameter: Tissue Value: Aerial
  misc_feature: MA Experiment 20000071 PARAMETER Experiment Name: At_100uM_ABA_Mutants_cDNA_P Parameter: Treatment Value: 100uM ABA vs. No Treatment
  misc_feature: MA Experiment ID: 20000072 Result: Down-regulated in Transcription
  misc_feature: MA Experiment 20000072 PARAMETER Experiment Name: At_100uM_ABA_Mutants_cDNA_P Parameter: Plant Line Value: CS8105
  misc_feature: MA Experiment 20000072 PARAMETER Experiment Name: At_100uM_ABA_Mutants_cDNA_P Parameter: Timepoint (hr) Value: 6
  misc_feature: MA Experiment 20000072 PARAMETER Experiment Name: At_100uM_ABA_Mutants_cDNA_P Parameter: Tissue Value: Aerial
  misc_feature: MA Experiment 20000072 PARAMETER Experiment Name: At_100uM_ABA_Mutants_cDNA_P Parameter: Treatment Value: 100uM ABA vs. No Treatment
  misc_feature: MA Experiment ID: 20000086 Result: Down-regulated in Transcription
  misc_feature: MA Experiment 20000086 PARAMETER Experiment Name: At_100uM_ABA_Mutants_cDNA_P Parameter: Plant Line Value: CS22
  misc_feature: MA Experiment 20000086 PARAMETER Experiment Name: At_100uM_ABA_Mutants_cDNA_P Parameter: Timepoint (hr) Value: 6
  misc_feature: MA Experiment 20000086 PARAMETER Experiment Name: At_100uM_ABA_Mutants_cDNA_P Parameter: Tissue Value: Aerial
  misc_feature: MA Experiment 20000086 PARAMETER Experiment Name: At_100uM_ABA_Mutants_cDNA_P Parameter: Treatment Value: 100uM ABA vs. No Treatment
  misc_feature: MA Experiment ID: 20000087 Result: Down-regulated in Transcription
  misc_feature: MA Experiment 20000087 PARAMETER Experiment Name: At_100uM_ABA_Mutants_cDNA_P Parameter: Plant Line Value: WS
  misc_feature: MA Experiment 20000087 PARAMETER Experiment Name: At_100uM_ABA_Mutants_cDNA_P Parameter: Timepoint (hr) Value: 6
  misc_feature: MA Experiment 20000087 PARAMETER Experiment Name: At_100uM_ABA_Mutants_cDNA_P Parameter: Tissue Value: Aerial
  misc_feature: MA Experiment 20000087 PARAMETER Experiment Name: At_100uM_ABA_Mutants_cDNA_P Parameter: Treatment Value: 100uM ABA vs. No Treatment
  misc_feature: MA Experiment ID: 20000093 Result: Up-regulated in Transcription
  misc_feature: MA Experiment 20000093 PARAMETER Experiment Name: At_42deg_Heat_cDNA_P Parameter: Temperature (deg C) Value: 42 vs. 22
  misc_feature: MA Experiment 20000093 PARAMETER Experiment Name: At_42deg_Heat_cDNA_P Parameter: Timepoint (hr) Value: 0.5
  misc_feature: MA Experiment 20000093 PARAMETER Experiment Name: At_42deg_Heat_cDNA_P Parameter: Tissue Value: Aerial
  misc_feature: MA Experiment ID: 20000111 Result: Up-regulated in Transcription
  misc_feature: MA Experiment 20000111 PARAMETER Experiment Name: At_42deg_Heat_cDNA_P Parameter: Temperature (deg C) Value: 42 vs. 22
  misc_feature: MA Experiment 20000111 PARAMETER Experiment Name: At_42deg_Heat_cDNA_P Parameter: Timepoint (hr) Value: 6
  misc_feature: MA Experiment 20000111 PARAMETER Experiment Name: At_42deg_Heat_cDNA_P Parameter: Tissue Value: Aerial
  misc_feature: MA Experiment ID: 20000112 Result: Up-regulated in Transcription
  misc_feature: MA Experiment 20000112 PARAMETER Experiment Name: At_42deg_Heat_cDNA_P Parameter: Temperature (deg C) Value: 42 vs. 22
  misc_feature: MA Experiment 20000112 PARAMETER Experiment Name: At_42deg_Heat_cDNA_P Parameter: Timepoint (hr) Value: 2
  misc_feature: MA Experiment 20000112 PARAMETER Experiment Name: At_42deg_Heat_cDNA_P Parameter: Tissue Value: Aerial
  misc_feature: MA Experiment ID: 20000113 Result: Up-regulated in Transcription
  misc_feature: MA Experiment 20000113 PARAMETER Experiment Name: At_42deg_Heat_cDNA_P Parameter: Temperature (deg C) Value: 42 vs. 22
  misc_feature: MA Experiment 20000113 PARAMETER Experiment Name: At_42deg_Heat_cDNA_P Parameter: Timepoint (hr) Value: 8
  misc_feature: MA Experiment 20000113 PARAMETER Experiment Name: At_42deg_Heat_cDNA_P Parameter: Tissue Value: Aerial
  misc_feature: MA Experiment ID: 20000117 Result: Down-regulated in Transcription
  misc_feature: MA Experiment 20000117 PARAMETER Experiment Name: At_100uM_ABA_Mutants_cDNA_P Parameter: Plant Line Value: Columbia
  misc_feature: MA Experiment 20000117 PARAMETER Experiment Name: At_100uM_ABA_Mutants_cDNA_P Parameter: Timepoint (hr) Value: 6
  misc_feature: MA Experiment 20000117 PARAMETER Experiment Name: At_100uM_ABA_Mutants_cDNA_P Parameter: Tissue Value: Aerial
  misc_feature: MA Experiment 20000117 PARAMETER Experiment Name: At_100uM_ABA_Mutants_cDNA_P Parameter: Treatment Value: 100uM ABA vs. No Treatment
  misc_feature: MA Experiment ID: 20000144 Result: Up-regulated in Transcription
  misc_feature: MA Experiment 20000144 PARAMETER Experiment Name: At_42deg_Heat_cDNA_P Parameter: Temperature (deg C) Value: 42 vs. 22
  misc_feature: MA Experiment 20000144 PARAMETER Experiment Name: At_42deg_Heat_cDNA_P Parameter: Timepoint (hr) Value: 1
  misc_feature: MA Experiment 20000144 PARAMETER Experiment Name: At_42deg_Heat_cDNA_P Parameter: Tissue Value: Aerial
  misc_feature: MA Experiment ID: 20000315 Result: Up-regulated in Transcription
  misc_feature: MA Experiment 20000315 PARAMETER Experiment Name: At_14day_Shoots-Roots_Sub_P Parameter: Age (day) Value: 14
  misc_feature: MA Experiment 20000315 PARAMETER Experiment Name: At_14day_Shoots-Roots_Sub_P Parameter: Organism Value: A. thaliana
  misc_feature: MA Experiment 20000315 PARAMETER Experiment Name: At_14day_Shoots-Roots_Sub_P Parameter: Plant Line Value: WS
  misc_feature: MA Experiment 20000315 PARAMETER Experiment Name: At_14day_Shoots-Roots_Sub_P Parameter: Tissue Value: Shoots vs. Whole Plant
  misc_feature: MA Experiment ID: 20000327 Result: Up-regulated in Transcription
  misc_feature: MA Experiment 20000327 PARAMETER Experiment Name: At_42deg_Heat_Sub_P Parameter: Age (day) Value: 14
  misc_feature: MA Experiment 20000327 PARAMETER Experiment Name: At_42deg_Heat_Sub_P Parameter: Organism Value: A. thaliana
  misc_feature: MA Experiment 20000327 PARAMETER Experiment Name: At_42deg_Heat_Sub_P Parameter: Plant Line Value: WS
  misc_feature: MA Experiment 20000327 PARAMETER Experiment Name: At_42deg_Heat_Sub_P Parameter: Temperature (deg C) Value: 42 vs. 22
  misc_feature: MA Experiment 20000327 PARAMETER Experiment Name: At_42deg_Heat_Sub_P Parameter: Timepoint (hr) Value: 1
  misc_feature: MA Experiment 20000327 PARAMETER Experiment Name: At_42deg_Heat_Sub_P Parameter: Tissue Value: Aerial
  misc_feature: MA Experiment ID: 20000328 Result: Up-regulated in Transcription
  misc_feature: MA Experiment 20000328 PARAMETER Experiment Name: At_42deg_Heat_Sub_P Parameter: Age (day) Value: 14
  misc_feature: MA Experiment 20000328 PARAMETER Experiment Name: At_42deg_Heat_Sub_P Parameter: Organism Value: A. thaliana
  misc_feature: MA Experiment 20000328 PARAMETER Experiment Name: At_42deg_Heat_Sub_P Parameter: Plant Line Value: WS
  misc_feature: MA Experiment 20000328 PARAMETER Experiment Name: At_42deg_Heat_Sub_P Parameter: Temperature (deg C) Value: 42 vs. 22
  misc_feature: MA Experiment 20000328 PARAMETER Experiment Name: At_42deg_Heat_Sub_P Parameter: Timepoint (hr) Value: 6
  misc_feature: MA Experiment 20000328 PARAMETER Experiment Name: At_42deg_Heat_Sub_P Parameter: Tissue Value: Aerial
  misc_feature: MA Experiment ID: 20000347 Result: Down-regulated in Transcription
  misc_feature: MA Experiment 20000347 PARAMETER Experiment Name: At_2mM_SA_Sub_P Parameter: Age (day) Value: 14
  misc_feature: MA Experiment 20000347 PARAMETER Experiment Name: At_2mM_SA_Sub_P Parameter: Organism Value: A. thaliana
  misc_feature: MA Experiment 20000347 PARAMETER Experiment Name: At_2mM_SA_Sub_P Parameter: Plant Line Value: WS
  misc_feature: MA Experiment 20000347 PARAMETER Experiment Name: At_2mM_SA_Sub_P Parameter: Timepoint (hr) Value: 6
  misc_feature: MA Experiment 20000347 PARAMETER Experiment Name: At_2mM_SA_Sub_P Parameter: Tissue Value: Aerial
  misc_feature: MA Experiment 20000347 PARAMETER Experiment Name: At_2mM_SA_Sub_P Parameter: Treatment Value: 2mM SA vs. No Treatment
  misc_feature: MA Experiment ID: 20000349 Result: Down-regulated in Transcription
  misc_feature: MA Experiment 20000349 PARAMETER Experiment Name: At_100uM_ABA_Sub_P Parameter: Age (day) Value: 14
  misc_feature: MA Experiment 20000349 PARAMETER Experiment Name: At_100uM_ABA_Sub_P Parameter: Organism Value: A. thaliana
  misc_feature: MA Experiment 20000349 PARAMETER Experiment Name: At_100uM_ABA_Sub_P Parameter: Plant Line Value: WS
  misc_feature: MA Experiment 20000349 PARAMETER Experiment Name: At_100uM_ABA_Sub_P Parameter: Timepoint (hr) Value: 6
  misc_feature: MA Experiment 20000349 PARAMETER Experiment Name: At_100uM_ABA_Sub_P Parameter: Tissue Value: Aerial
  misc_feature: MA Experiment 20000349 PARAMETER Experiment Name: At_100uM_ABA_Sub_P Parameter: Treatment Value: 100uM ABA vs. No Treatment
  misc_feature: MA Experiment ID: 20000355 Result: Up-regulated in Transcription
  misc_feature: MA Experiment 20000355 PARAMETER Experiment Name: At_Siliques_Sub_P Parameter: Age (day) Value: 21
  misc_feature: MA Experiment 20000355 PARAMETER Experiment Name: At_Siliques_Sub_P Parameter: Organism Value: A. thaliana
  misc_feature: MA Experiment 20000355 PARAMETER Experiment Name: At_Siliques_Sub_P Parameter: Plant Line Value: WS
  misc_feature: MA Experiment 20000355 PARAMETER Experiment Name: At_Siliques_Sub_P Parameter: Tissue Value: Less Than 5mm Siliques vs. Whole Plant
  misc_feature: MA Experiment ID: 20001807 Result: Up-regulated in Transcription
  misc_feature: MA Experiment 20001807 PARAMETER Experiment Name: At_50mM_NH4NO3_L-to-H_Sub_P Parameter: Timepoint (hr) Value: 6
  misc_feature: MA Experiment 20001807 PARAMETER Experiment Name: At_50mM_NH4NO3_L-to-H_Sub_P Parameter: Tissue Value: Leaf
  misc_feature: MA Experiment 20001807 PARAMETER Experiment Name: At_50mM_NH4NO3_L-to-H_Sub_P Parameter: Treatment Value: 50mM NH4NO3 vs 100mM Mannitol
attcgtttacactaaccacttccttatccacaccaatccagaacgttcctcaaaaagctccctccttttctctcaaaatggcgtctgcaaacgctctctcttccgcctccgtcctctgttcttcccgtcagagtaagttgggaggaggaaatcagcagcaaggtcagagagttagctacaacaagaggacaatcagacgttttagtgttagagctaatgtaaaggaaatagcttttgaccagcactctagagctgctctacaagctggtattgataagcttgctgattgtgttggtctcactcttggccctagagggaggaatgttgtgttggatgaatttggaagtcctaaggttgtgaatgatggagtcaccattgctagagctattgagttacctaatgccatggaaaatgctggtgcagcgcttattcgtgaggttgcgagtaagactaatgactctgctggtgatgggacaaccactgcgtctatccttgctcgggagataatcaaacatggattgttgagcgtcacttctggtgcgaatcccgtttcactcaagaggggaattgataagactgttcaaggtctgatcgaagagcttcagaagaaagctaggcccgtgaaaggtcgtgatgacatcagagctgtggcttctatctctgctggaaatgatgaccttatagggtcaatgattgctgatgccatcgacaaagttggacctgatggtgttttgtccattgaatcttcatcttcttttgagaccacggtcgaagttgaagaagggatggagattgacagaggttacatctcgcctcagtttgttacaaaccctgagaaactactagctgagtttgagaatgctagggtattgatcactgatcagaagatcactgcgatcaaagacatcatccctattttggagaagaccactcagcttcgtgctccgttgttgattattgcagaggatgttactggtgaagccttagctacccttgtcgtgaacaagcttcgtggtgtcctcaatgttgttgccgttaaagcgccaggatttggagaaagaagaaaagccatgcttcaagatattgcaatcttgacaggagctgagtacctagccatggacatgagcttactggttgaaaacgcaaccatagatcaattgggtattgcccgaaaagtcacgattagcaaagattcgactaccctcattgcagatgcagcttccaaggacgaattacaagctcggattgctcagctgaagaaagaactattcgagactgattctgtgtatgactcagagaagctcgctgagagaattgcgaagctatctggaggtgttgctgtcattaaagtcggagcagcaactgaaactgagcttgaggaccgtaagcttcgtatcgaggatgcaaagaacgcaacatttgctgctatcgaggaaggcatagttccaggtggtggtgctgctttggtgcatctctccactgttattcccgccattaaggagacttttgaggatgctgatgaacgtttgggagctgacatagtacaaaaggcattgctgtcaccagctgctcttattgctcagaacgctggagttgaaggagaagttgttgtggaaaagattatgttcagcgattgggagaatgggtacaacgcaatgactgatacatatgagaatctgttcgaagctggagtgattgatccggctaaagtgacaagatgtgcgctacagaacgctgcttccgtagcaggaatggtactgaccactcaggccattgttgttgacaaaccgaaacccaaggctcctgctgctgctgctcctgagggtctcatggtgtaatcaaaacacaacatcttatcatcacaatggcatctttgtctttttgcacatttgtcatccccatttatctgcaatgtttttcttttttgggggaatatgagtagtttgttaacagtatcgagaaataattatcatcttttttgtccaatggaaattgc

SEQ ID NO: 22382 - protein, 611 aa, Arabidopsis thaliana
  peptide (1)..(611): Ceres Seq. ID no. 12703386
  misc_feature (93)..(596): Pfam Name: TCP-1/cpn60 chaperonin family Pfam Description: TCP-1/cpn60 chaperonin family
  misc_feature (83)..(577): Homolog of NCBI NO: 134101 NR Description: RUBISCO SUBUNIT BINDING-PROTEIN ALPHA SUBUNIT (60
  misc_feature (83)..(578): Homolog of NCBI NO: 5650721 NR Description: rubisco subunit binding-protein alpha subunit (
  misc_feature (71)..(608): Homolog of NCBI NO: 134102 NR Description: RuBisCO subunit binding-protein alpha subunit,
  misc_feature (26)..(611): Homolog of NCBI NO: 3790441 NR Description: chaperonin 60 alpha subunit [Canavalia lineata]
  misc_feature (26)..(611): Homolog of NCBI NO: 1710807 NR Description: RuBisCO subunit binding-protein alpha subunit,
  misc_feature (65)..(611): Homolog of NCBI NO: 99801 NR Description: chaperonine 60K alpha chain - rape (fragment)
  misc_feature (66)..(611): Homolog of NCBI NO: 1351030 NR Description: RuBisCO subunit binding-protein alpha subunit,
  misc_feature (26)..(611): Homolog of NCBI NO: 464727 NR Description: RuBisCO subunit binding-protein alpha subunit,
  misc_feature (26)..(611): Homolog of NCBI NO: 21554572 NR Description: putative rubisco subunit binding-protein alpha
  misc_feature (26)..(611): Homolog of NCBI NO: 15226314 NR Description: putative rubisco subunit binding-protein alpha
SFTLTTSLSTPIQNVPQKAPSFSLKMASANALSSASVLCSSRQSKLGGGNQQQGQRVSYNKRTIRRFSVRANVKEIAFDQHSRAALQAGIDKLADCVGLTLGPRGRNVVLDEFGSPKVVNDGVTIARAIELPNAMENAGAALIREVASKTNDSAGDGTTTASILAREIIKHGLLSVTSGANPVSLKRGIDKTVQGLIEELQKKARPVKGRDDIRAVASISAGNDDLIGSMIADAIDKVGPDGVLSIESSSSFETTVEVEEGMEIDRGYISPQFVTNPEKLLAEFENARVLITDQKITAIKDIIPILEKTTQLRAPLLIIAEDVTGEALATLVVNKLRGVLNVVAVKAPGFGERRKAMLQDIAILTGAEYLAMDMSLLVENATIDQLGIARKVTISKDSTTLIADAASKDELQARIAQLKKELFETDSVYDSEKLAERIAKLSGGVAVIKVGAATETELEDRKLRIEDAKNATFAAIEEGIVPGGGAALVHLSTVIPAIKETFEDADERLGADIVQKALLSPAALIAQNAGVEGEVVVEKIMFSDWENGYNAMTDTYENLFEAGVIDPAKVTRCALQNAASVAGMVLTTQAIVVDKPKPKAPAAAAPEGLMV

SEQ ID NO: 22383 - protein, 586 aa, Arabidopsis thaliana
  peptide (1)..(586): Ceres Seq. ID no. 12703387
  misc_feature (68)..(571): Pfam Name: TCP-1/cpn60 chaperonin family Pfam Description: TCP-1/cpn60 chaperonin family
  misc_feature (58)..(552): Homolog of NCBI NO: 134101 NR Description: RUBISCO SUBUNIT BINDING-PROTEIN ALPHA SUBUNIT (60
  misc_feature (58)..(553): Homolog of NCBI NO: 5650721 NR Description: rubisco subunit binding-protein alpha subunit (
  misc_feature (46)..(583): Homolog of NCBI NO: 134102 NR Description: RuBisCO subunit binding-protein alpha subunit,
  misc_feature (1)..(586): Homolog of NCBI NO: 3790441 NR Description: chaperonin 60 alpha subunit [Canavalia lineata]
  misc_feature (1)..(586): Homolog of NCBI NO: 1710807 NR Description: RuBisCO subunit binding-protein alpha subunit,
  misc_feature (40)..(586): Homolog of NCBI NO: 99801 NR Description: chaperonine 60K alpha chain - rape (fragment)
  misc_feature (41)..(586): Homolog of NCBI NO: 1351030 NR Description: RuBisCO subunit binding-protein alpha subunit,
  misc_feature (1)..(586): Homolog of NCBI NO: 464727 NR Description: RuBisCO subunit binding-protein alpha subunit,
  misc_feature (1)..(586): Homolog of NCBI NO: 21554572 NR Description: putative rubisco subunit binding-protein alpha
  misc_feature (1)..(586): Homolog of NCBI NO: 15226314 NR Description: putative rubisco subunit binding-protein alpha
MASANALSSASVLCSSRQSKLGGGNQQQGQRVSYNKRTIRRFSVRANVKEIAFDQHSRAALQAGIDKLADCVGLTLGPRGRNVVLDEFGSPKVVNDGVTIARAIELPNAMENAGAALIREVASKTNDSAGDGTTTASILAREIIKHGLLSVTSGANPVSLKRGIDKTVQGLIEELQKKARPVKGRDDIRAVASISAGNDDLIGSMIADAIDKVGPDGVLSIESSSSFETTVEVEEGMEIDRGYISPQFVTNPEKLLAEFENARVLITDQKITAIKDIIPILEKTTQLRAPLLIIAEDVTGEALATLVVNKLRGVLNVVAVKAPGFGERRKAMLQDIAILTGAEYLAMDMSLLVENATIDQLGIARKVTISKDSTTLIADAASKDELQARIAQLKKELFETDSVYDSEKLAERIAKLSGGVAVIKVGAATETELEDRKLRIEDAKNATFAAIEEGIVPGGGAALVHLSTVIPAIKETFEDADERLGADIVQKALLSPAALIAQNAGVEGEVVVEKIMFSDWENGYNAMTDTYENLFEAGVIDPAKVTRCALQNAASVAGMVLTTQAIVVDKPKPKAPAAAAPEGLMV

SEQ ID NO: 22384 - protein, 477 aa, Arabidopsis thaliana
  peptide (1)..(477): Ceres Seq. ID no. 12703388
  misc_feature (1)..(462): Pfam Name: TCP-1/cpn60 chaperonin family Pfam Description: TCP-1/cpn60 chaperonin family
  misc_feature (1)..(443): Homolog of NCBI NO: 134101 NR Description: RUBISCO SUBUNIT BINDING-PROTEIN ALPHA SUBUNIT (60
  misc_feature (1)..(444): Homolog of NCBI NO: 5650721 NR Description: rubisco subunit binding-protein alpha subunit (
  misc_feature (1)..(474): Homolog of NCBI NO: 134102 NR Description: RuBisCO subunit binding-protein alpha subunit,
  misc_feature (1)..(477): Homolog of NCBI NO: 3790441 NR Description: chaperonin 60 alpha subunit [Canavalia lineata]
  misc_feature (1)..(477): Homolog of NCBI NO: 1710807 NR Description: RuBisCO subunit binding-protein alpha subunit,
  misc_feature (1)..(477): Homolog of NCBI NO: 99801 NR Description: chaperonine 60K alpha chain - rape (fragment)
  misc_feature (1)..(477): Homolog of NCBI NO: 1351030 NR Description: RuBisCO subunit binding-protein alpha subunit,
  misc_feature (1)..(477): Homolog of NCBI NO: 464727 NR Description: RuBisCO subunit binding-protein alpha subunit,
  misc_feature (1)..(477): Homolog of NCBI NO: 21554572 NR Description: putative rubisco subunit binding-protein alpha
  misc_feature (1)..(477): Homolog of NCBI NO: 15226314 NR Description: putative rubisco subunit binding-protein alpha
MENAGAALIREVASKTNDSAGDGTTTASILAREIIKHGLLSVTSGANPVSLKRGIDKTVQGLIEELQKKARPVKGRDDIRAVASISAGNDDLIGSMIADAIDKVGPDGVLSIESSSSFETTVEVEEGMEIDRGYISPQFVTNPEKLLAEFENARVLITDQKITAIKDIIPILEKTTQLRAPLLIIAEDVTGEALATLVVNKLRGVLNVVAVKAPGFGERRKAMLQDIAILTGAEYLAMDMSLLVENATIDQLGIARKVTISKDSTTLIADAASKDELQARIAQLKKELFETDSVYDSEKLAERIAKLSGGVAVIKVGAATETELEDRKLRIEDAKNATFAAIEEGIVPGGGAALVHLSTVIPAIKETFEDADERLGADIVQKALLSPAALIAQNAGVEGEVVVEKIMFSDWENGYNAMTDTYENLFEAGVIDPAKVTRCALQNAASVAGMVLTTQAIVVDKPKPKAPAAAAPEGLMV

SEQ ID NO: 22385 - DNA, 1065 bp, Arabidopsis thaliana
  misc_feature (1)..(1065): Ceres Seq. ID no. 12329120
  misc_feature: MA Experiment ID: 108434 Result: Down-regulated in Transcription
  misc_feature: MA Experiment 108434 PARAMETER Experiment Name: At_Root_Tips_cDNA_P Parameter: Tissue Value: Root Tips
  misc_feature: MA Experiment ID: 108462 Result: Up-regulated in Transcription
  misc_feature: MA Experiment 108462 PARAMETER Experiment Name: At_Germinating_Seeds_cDNA_P Parameter: Age (day) Value: 2 vs. 0
  misc_feature: MA Experiment 108462 PARAMETER Experiment Name: At_Germinating_Seeds_cDNA_P Parameter: Tissue Value: Germinating Seeds
  misc_feature: MA Experiment ID: 108463 Result: Up-regulated in Transcription
  misc_feature: MA Experiment 108463 PARAMETER Experiment Name: At_Germinating_Seeds_cDNA_P Parameter: Age (day) Value: 3 vs. 0
  misc_feature: MA Experiment 108463 PARAMETER Experiment Name: At_Germinating_Seeds_cDNA_P Parameter: Tissue Value: Germinating Seeds
  misc_feature: MA Experiment ID: 20000179 Result: Up-regulated in Transcription
  misc_feature: MA Experiment 20000179 PARAMETER Experiment Name: At_Germinating_Seeds_P Parameter: Age (hr) Value: 6 vs. 0
  misc_feature: MA Experiment 20000179 PARAMETER Experiment Name: At_Germinating_Seeds_P Parameter: Tissue Value: Germinating Seeds
  misc_feature: MA Experiment ID: 20000180 Result: Up-regulated in Transcription
  misc_feature: MA Experiment 20000180 PARAMETER Experiment Name: At_Germinating_Seeds_P Parameter: Age (hr) Value: 24 vs. 0
  misc_feature: MA Experiment 20000180 PARAMETER Experiment Name: At_Germinating_Seeds_P Parameter: Tissue Value: Germinating Seeds
  misc_feature: MA Experiment ID: 20000184 Result: Down-regulated in Transcription
  misc_feature: MA Experiment 20000184 PARAMETER Experiment Name: At_Shoots__P Parameter: Age (day) Value: 7
  misc_feature: MA Experiment 20000184 PARAMETER Experiment Name: At_Shoots__P Parameter: Tissue Value: Shoots vs. Whole Plant
  misc_feature: MA Experiment ID: 20000224 Result: Up-regulated in Transcription
  misc_feature: MA Experiment ID: 20001911 Result: Up-regulated in Transcription
  misc_feature: MA Experiment 20001911 PARAMETER Experiment Name: At_Drought_Reproduction_P Parameter: Age (day) Value: 40
  misc_feature: MA Experiment 20001911 PARAMETER Experiment Name: At_Drought_Reproduction_P Parameter: Organism Value: A. thaliana
  misc_feature: MA Experiment 20001911 PARAMETER Experiment Name: At_Drought_Reproduction_P Parameter: Plant Line Value: WS
  misc_feature: MA Experiment 20001911 PARAMETER Experiment Name: At_Drought_Reproduction_P Parameter: Timepoint (day) Value: 10
  misc_feature: MA Experiment 20001911 PARAMETER Experiment Name: At_Drought_Reproduction_P Parameter: Tissue Value: Flowers
  misc_feature: MA Experiment 20001911 PARAMETER Experiment Name: At_Drought_Reproduction_P Parameter: Treatment Value: Drought vs. No Drought
atcatcactctctgagatcgaagagaaagcaaaatcaaagttgtgatgaaatctctattgatgagaaccggttcgatgccggttcttcaaaaccggttaatttcaggtggttcatcgcggaagatgacgcctatctccaggaccaactccgtcgaatcattatccagctacggcgagagattcgccggcgggaagatttcgatcgaggttaaggctaatgtagggatgcggagggtgttatcggaaagtgatgtgattagatctgagagaatgttgaaaagtgttggatctaagccttcgccggcgagaatcccggaggatgatgaagcgggggaggaagaaattaggtttgcagatggttgggggtctatgatctccggtggtttacctgtggaggagaaatgtttcacgggtggcggtgttggtggtggatctggttatagcggcggttatggaaacggaggaggaggcggttatgaagataagagcaagatcggtgattattatcgagagatgttgagatctaatcctaataattcgcttcttctgatgaattacggcaagtttttgtatgaggtggagaaagatgcagagggagctgaagagtactatggaagagcaatactggagaatccaggagatggagaagctttatccatgtatggaagattgatatgggaaacgaagagagatgagaagagagctcaaggttactttgatcaagctgttaatgcttctcctaatgattgtatggttttgggatcatatgcacgtttcatgtgggaggcagaggatgatgatgatgatgatgaagaagaagaagaagaagaagaagaatggatggctgcatcaccactcatggtttctgcagtttagagactaacacgacgaagatgaagaagaagtaatggagactaagattatgtatcaagtatcaacctttttttttgtctatttcactgtctttttactaacttttgctgtaataacctgaagagtaatgaaaacatgtatgtgaaagaaaacgaatgtaaccttattataagagaataaaagtgcttttgc

SEQ ID NO: 22386 - protein, 276 aa, Arabidopsis thaliana
  peptide (1)..(276): Ceres Seq. ID no. 12329121
  misc_feature (143)..(261): Homolog of NCBI NO: 21555875 NR Description: unknown [Arabidopsis thaliana]
  misc_feature (143)..(261): Homolog of NCBI NO: 18390404 NR Description: expressed protein
  misc_feature (98)..(262): Homolog of NCBI NO: 18412668 NR Description: expressed protein
  misc_feature (124)..(262): Homolog of NCBI NO: 15236755 NR Description: putative protein
  misc_feature (124)..(262): Homolog of NCBI NO: 14532728 NR Description: unknown protein [Arabidopsis thaliana]
  misc_feature (123)..(259): Homolog of NCBI NO: 37537130 NR Description: unknown protein [Oryza sativa (japonica
  misc_feature (4)..(263): Homolog of NCBI NO: 15241290 NR Description: putative protein; protein id: At5g20190.1
  misc_feature (27)..(276): Homolog of NCBI NO: 7487766 NR Description: hypothetical protein T6K21.120 - Arabidopsis
  misc_feature (11)..(276): Homolog of NCBI NO: 21592868 NR Description: unknown [Arabidopsis thaliana]
  misc_feature (1)..(276): Homolog of NCBI NO: 18414994 NR Description: putative protein
MKSLLMRTGSMPVLQNRLISGGSSRKMTPISRTNSVESLSSYGERFAGGKISIEVKANVGMRRVLSESDVIRSERMLKSVGSKPSPARIPEDDEAGEEEIRFADGWGSMISGGLPVEEKCFTGGGVGGGSGYSGGYGNGGGGGYEDKSKIGDYYREMLRSNPNNSLLLMNYGKFLYEVEKDAEGAEEYYGRAILENPGDGEALSMYGRLIWETKRDEKRAQGYFDQAVNASPNDCMVLGSYARFMWEAEDDDDDDEEEEEEEEEWMAASPLMVSAV

SEQ ID NO: 22387 - protein, 271 aa, Arabidopsis thaliana
  peptide (1)..(271): Ceres Seq. ID no. 12329122
  misc_feature (138)..(256): Homolog of NCBI NO: 21555875 NR Description: unknown [Arabidopsis thaliana]
  misc_feature (138)..(256): Homolog of NCBI NO: 18390404 NR Description: expressed protein
  misc_feature (93)..(257): Homolog of NCBI NO: 18412668 NR Description: expressed protein
  misc_feature (119)..(257): Homolog of NCBI NO: 15236755 NR Description: putative protein
  misc_feature (119)..(257): Homolog of NCBI NO: 14532728 NR Description: unknown protein [Arabidopsis thaliana]
  misc_feature (118)..(254): Homolog of NCBI NO: 37537130 NR Description: unknown protein [Oryza sativa (japonica
  misc_feature (1)..(258): Homolog of NCBI NO: 15241290 NR Description: putative protein; protein id: At5g20190.1
  misc_feature (22)..(271): Homolog of NCBI NO: 7487766 NR Description: hypothetical protein T6K21.120 - Arabidopsis
  misc_feature (6)..(271): Homolog of NCBI NO: 21592868 NR Description: unknown [Arabidopsis thaliana]
  misc_feature (1)..(271): Homolog of NCBI NO: 18414994 NR Description: putative protein
MRTGSMPVLQNRLISGGSSRKMTPISRTNSVESLSSYGERFAGGKISIEVKANVGMRRVLSESDVIRSERMLKSVGSKPSPARIPEDDEAGEEEIRFADGWGSMISGGLPVEEKCFTGGGVGGGSGYSGGYGNGGGGGYEDKSKIGDYYREMLRSNPNNSLLLMNYGKFLYEVEKDAEGAEEYYGRAILENPGDGEALSMYGRLIWETKRDEKRAQGYFDQAVNASPNDCMVLGSYARFMWEAEDDDDDDEEEEEEEEEWMAASPLMVSAV

SEQ ID NO: 22388 - protein, 266 aa, Arabidopsis thaliana
  peptide (1)..(266): Ceres Seq. ID no. 12329123
  misc_feature (133)..(251): Homolog of NCBI NO: 21555875 NR Description: unknown [Arabidopsis thaliana]
  misc_feature (133)..(251): Homolog of NCBI NO: 18390404 NR Description: expressed protein
  misc_feature (88)..(252): Homolog of NCBI NO: 18412668 NR Description: expressed protein
  misc_feature (114)..(252): Homolog of NCBI NO: 15236755 NR Description: putative protein
  misc_feature (114)..(252): Homolog of NCBI NO: 14532728 NR Description: unknown protein [Arabidopsis thaliana]
  misc_feature (113)..(249): Homolog of NCBI NO: 37537130 NR Description: unknown protein [Oryza sativa (japonica
  misc_feature (1)..(253): Homolog of NCBI NO: 15241290 NR Description: putative protein; protein id: At5g20190.1
  misc_feature (17)..(266): Homolog of NCBI NO: 7487766 NR Description: hypothetical protein T6K21.120 - Arabidopsis
  misc_feature (1)..(266): Homolog of NCBI NO: 21592868 NR Description: unknown [Arabidopsis thaliana]
  misc_feature (1)..(266): Homolog of NCBI NO: 18414994 NR Description: putative protein
MPVLQNRLISGGSSRKMTPISRTNSVESLSSYGERFAGGKISIEVKANVGMRRVLSESDVIRSERMLKSVGSKPSPARIPEDDEAGEEEIRFADGWGSMISGGLPVEEKCFTGGGVGGGSGYSGGYGNGGGGGYEDKSKIGDYYREMLRSNPNNSLLLMNYGKFLYEVEKDAEGAEEYYGRAILENPGDGEALSMYGRLIWETKRDEKRAQGYFDQAVNASPNDCMVLGSYARFMWEAEDDDDDDEEEEEEEEEWMAASPLMVSAV

SEQ ID NO: 22389 - DNA, 1840 bp, Arabidopsis thaliana
  misc_feature (1)..(1840): Ceres Seq. ID no. 13488395
  misc_feature: MA Experiment ID: 108433 Result: Up-regulated in Transcription
  misc_feature: MA Experiment 108433 PARAMETER Experiment Name: At_rhl_Mutant2_cDNA_P Parameter: Age (day) Value: 7
  misc_feature: MA Experiment 108433 PARAMETER Experiment Name: At_rhl_Mutant2_cDNA_P Parameter: Organism Value: A. thaliana
  misc_feature: MA Experiment 108433 PARAMETER Experiment Name: At_rhl_Mutant2_cDNA_P Parameter: Plant Line Value: rhl Mutant vs. wt landsburg
  misc_feature: MA Experiment 108433 PARAMETER Experiment Name: At_rhl_Mutant2_cDNA_P Parameter: Tissue Value: Roots
  misc_feature: MA Experiment ID: 108434 Result: Down-regulated in Transcription
  misc_feature: MA Experiment 108434 PARAMETER Experiment Name: At_Root_Tips_cDNA_P Parameter: Tissue Value: Root Tips
  misc_feature: MA Experiment ID: 108461 Result: Down-regulated in Transcription
  misc_feature: MA Experiment 108461 PARAMETER Experiment Name: At_Germinating_Seeds_cDNA_P Parameter: Age (day) Value: 1 vs. 0
  misc_feature: MA Experiment 108461 PARAMETER Experiment Name: At_Germinating_Seeds_cDNA_P Parameter: Tissue Value: Germinating Seeds
  misc_feature: MA Experiment ID: 108462 Result: Down-regulated in Transcription
  misc_feature: MA Experiment 108462 PARAMETER Experiment Name: At_Germinating_Seeds_cDNA_P Parameter: Age (day) Value: 2 vs. 0
  misc_feature: MA Experiment 108462 PARAMETER Experiment Name: At_Germinating_Seeds_cDNA_P Parameter: Tissue Value: Germinating Seeds
  misc_feature: MA Experiment ID: 108463 Result: Down-regulated in Transcription
  misc_feature: MA Experiment 108463 PARAMETER Experiment Name: At_Germinating_Seeds_cDNA_P Parameter: Age (day) Value: 3 vs. 0
  misc_feature: MA Experiment 108463 PARAMETER Experiment Name: At_Germinating_Seeds_cDNA_P Parameter: Tissue Value: Germinating Seeds
  misc_feature: MA Experiment ID: 108464 Result: Down-regulated in Transcription
  misc_feature: MA Experiment 108464 PARAMETER Experiment Name: At_Germinating_Seeds_cDNA_P Parameter: Age (day) Value: 4 vs. 0
  misc_feature: MA Experiment 108464 PARAMETER Experiment Name: At_Germinating_Seeds_cDNA_P Parameter: Tissue Value: Germinating Seeds
  misc_feature: MA Experiment ID: 108595 Result: Up-regulated in Transcription
  misc_feature: MA Experiment 108595 PARAMETER Experiment Name: At_Ler-pi_Ovule_cDNA_P Parameter: Plant Line Value: null
  misc_feature: MA Experiment ID: 20000070 Result: Up-regulated in Transcription
  misc_feature: MA Experiment 20000070 PARAMETER Experiment Name: At_100uM_ABA_Mutants_cDNA_P Parameter: Plant Line Value: CS24
  misc_feature: MA Experiment 20000070 PARAMETER Experiment Name: At_100uM_ABA_Mutants_cDNA_P Parameter: Timepoint (hr) Value: 6
  misc_feature: MA Experiment 20000070 PARAMETER Experiment Name: At_100uM_ABA_Mutants_cDNA_P Parameter: Tissue Value: Aerial
  misc_feature: MA Experiment 20000070 PARAMETER Experiment Name: At_100uM_ABA_Mutants_cDNA_P Parameter: Treatment Value: 100uM ABA vs. No Treatment
  misc_feature: MA Experiment ID: 20000071 Result: Up-regulated in Transcription
  misc_feature: MA Experiment 20000071 PARAMETER Experiment Name: At_100uM_ABA_Mutants_cDNA_P Parameter: Plant Line Value: CS8104
  misc_feature: MA Experiment 20000071 PARAMETER Experiment Name: At_100uM_ABA_Mutants_cDNA_P Parameter: Timepoint (hr) Value: 6
  misc_feature: MA Experiment 20000071 PARAMETER Experiment Name: At_100uM_ABA_Mutants_cDNA_P Parameter: Tissue Value: Aerial
  misc_feature: MA Experiment 20000071 PARAMETER Experiment Name: At_100uM_ABA_Mutants_cDNA_P Parameter: Treatment Value: 100uM ABA vs. No Treatment
  misc_feature: MA Experiment ID: 20000072 Result: Up-regulated in Transcription
  misc_feature: MA Experiment 20000072 PARAMETER Experiment Name: At_100uM_ABA_Mutants_cDNA_P Parameter: Plant Line Value: CS8105
  misc_feature: MA Experiment 20000072 PARAMETER Experiment Name: At_100uM_ABA_Mutants_cDNA_P Parameter: Timepoint (hr) Value: 6
  misc_feature: MA Experiment 20000072 PARAMETER Experiment Name: At_100uM_ABA_Mutants_cDNA_P Parameter: Tissue Value: Aerial
  misc_feature: MA Experiment 20000072 PARAMETER Experiment Name: At_100uM_ABA_Mutants_cDNA_P Parameter: Treatment Value: 100uM ABA vs. No Treatment
  misc_feature: MA Experiment ID: 20000086 Result: Up-regulated in Transcription
  misc_feature: MA Experiment 20000086 PARAMETER Experiment Name: At_100uM_ABA_Mutants_cDNA_P Parameter: Plant Line Value: CS22
  misc_feature: MA Experiment 20000086 PARAMETER Experiment Name: At_100uM_ABA_Mutants_cDNA_P Parameter: Timepoint (hr) Value: 6
  misc_feature: MA Experiment 20000086 PARAMETER Experiment Name: At_100uM_ABA_Mutants_cDNA_P Parameter: Tissue Value: Aerial
  misc_feature: MA Experiment 20000086 PARAMETER Experiment Name: At_100uM_ABA_Mutants_cDNA_P Parameter: Treatment Value: 100uM ABA vs. No Treatment
  misc_feature: MA Experiment ID: 20000088 Result: Up-regulated in Transcription
  misc_feature: MA Experiment 20000088 PARAMETER Experiment Name: At_100uM_ABA_Mutants_cDNA_P Parameter: Plant Line Value: Landsberg
  misc_feature: MA Experiment 20000088 PARAMETER Experiment Name: At_100uM_ABA_Mutants_cDNA_P Parameter: Timepoint (hr) Value: 6
  misc_feature: MA Experiment 20000088 PARAMETER Experiment Name: At_100uM_ABA_Mutants_cDNA_P Parameter: Tissue Value: Aerial
  misc_feature: MA Experiment 20000088 PARAMETER Experiment Name: At_100uM_ABA_Mutants_cDNA_P Parameter: Treatment Value: 100uM ABA vs. No Treatment
  misc_feature: MA Experiment ID: 20000111 Result: Down-regulated in Transcription
  misc_feature: MA Experiment 20000111 PARAMETER Experiment Name: At_42deg_Heat_cDNA_P Parameter: Temperature (deg C) Value: 42 vs. 22
  misc_feature: MA Experiment 20000111 PARAMETER Experiment Name: At_42deg_Heat_cDNA_P Parameter: Timepoint (hr) Value: 6
  misc_feature: MA Experiment 20000111 PARAMETER Experiment Name: At_42deg_Heat_cDNA_P Parameter: Tissue Value: Aerial
  misc_feature: MA Experiment ID: 20000113 Result: Down-regulated in Transcription
  misc_feature: MA Experiment 20000113 PARAMETER Experiment Name: At_42deg_Heat_cDNA_P Parameter: Temperature (deg C) Value: 42 vs. 22
  misc_feature: MA Experiment 20000113 PARAMETER Experiment Name: At_42deg_Heat_cDNA_P Parameter: Timepoint (hr) Value: 8
  misc_feature: MA Experiment 20000113 PARAMETER Experiment Name: At_42deg_Heat_cDNA_P Parameter: Tissue Value: Aerial
  misc_feature: MA Experiment ID: 20000117 Result: Up-regulated in Transcription
  misc_feature: MA Experiment 20000117 PARAMETER Experiment Name: At_100uM_ABA_Mutants_cDNA_P Parameter: Plant Line Value: Columbia
  misc_feature: MA Experiment 20000117 PARAMETER Experiment Name: At_100uM_ABA_Mutants_cDNA_P Parameter: Timepoint (hr) Value: 6
  misc_feature: MA Experiment 20000117 PARAMETER Experiment Name: At_100uM_ABA_Mutants_cDNA_P Parameter: Tissue Value: Aerial
  misc_feature: MA Experiment 20000117 PARAMETER Experiment Name: At_100uM_ABA_Mutants_cDNA_P Parameter: Treatment Value: 100uM ABA vs. No Treatment
  misc_feature: MA Experiment ID: 20000173 Result: Down-regulated in Transcription
  misc_feature: MA Experiment 20000173 PARAMETER Experiment Name: At_42deg_Heat_P Parameter: Age (day) Value: 14
  misc_feature: MA Experiment 20000173 PARAMETER Experiment Name: At_42deg_Heat_P Parameter: Organism Value: A. thaliana
  misc_feature: MA Experiment 20000173 PARAMETER Experiment Name: At_42deg_Heat_P Parameter: Plant Line Value: WS
  misc_feature: MA Experiment 20000173 PARAMETER Experiment Name: At_42deg_Heat_P Parameter: Temperature (deg C) Value: 42 vs. 22
  misc_feature: MA Experiment 20000173 PARAMETER Experiment Name: At_42deg_Heat_P Parameter: Timepoint (hr) Value: 6
  misc_feature: MA Experiment 20000173 PARAMETER Experiment Name: At_42deg_Heat_P Parameter: Tissue Value: Aerial
  misc_feature: MA Experiment ID: 20000179 Result: Up-regulated in Transcription
  misc_feature: MA Experiment 20000179 PARAMETER Experiment Name: At_Germinating_Seeds_P Parameter: Age (hr) Value: 6 vs. 0
  misc_feature: MA Experiment 20000179 PARAMETER Experiment Name: At_Germinating_Seeds_P Parameter: Tissue Value: Germinating Seeds
  misc_feature: MA Experiment ID: 20000184 Result: Down-regulated in Transcription
  misc_feature: MA Experiment 20000184 PARAMETER Experiment Name: At_Shoots__P Parameter: Age (day) Value: 7
  misc_feature: MA Experiment 20000184 PARAMETER Experiment Name: At_Shoots__P Parameter: Tissue Value: Shoots vs. Whole Plant
  misc_feature: MA Experiment ID: 20000234 Result: Up-regulated in Transcription
  misc_feature: MA Experiment 20000234 PARAMETER Experiment Name: At_Siliques_P Parameter: Age (day) Value: 21
  misc_feature: MA Experiment 20000234 PARAMETER Experiment Name: At_Siliques_P Parameter: Organism Value: A. thaliana
  misc_feature: MA Experiment 20000234 PARAMETER Experiment Name: At_Siliques_P Parameter: Plant Line Value: WS
  misc_feature: MA Experiment 20000234 PARAMETER Experiment Name: At_Siliques_P Parameter: Tissue Value: Less Than 5mm Siliques vs. Whole Plant
  misc_feature: MA Experiment ID: 20000235 Result: Up-regulated in Transcription
  misc_feature: MA Experiment 20000235 PARAMETER Experiment Name: At_Siliques_P Parameter: Age (day) Value: 21
  misc_feature: MA Experiment 20000235 PARAMETER Experiment Name: At_Siliques_P Parameter: Organism Value: A. thaliana
  misc_feature: MA Experiment 20000235 PARAMETER Experiment Name: At_Siliques_P Parameter: Plant Line Value: WS
  misc_feature: MA Experiment 20000235 PARAMETER Experiment Name: At_Siliques_P Parameter: Tissue Value: 5-10mm Siliques vs. Whole Plant
  misc_feature: MA Experiment ID: 20000495 Result: Up-regulated in Transcription
  misc_feature: MA Experiment 20000495 PARAMETER Experiment Name: At_Guard_Cells_P Parameter: Harvest Date Value: 8/2/2002
  misc_feature: MA Experiment 20000495 PARAMETER Experiment Name: At_Guard_Cells_P Parameter: Organism Value: A. thaliana
  misc_feature: MA Experiment 20000495 PARAMETER Experiment Name: At_Guard_Cells_P Parameter: Tissue Value: Guard Cells vs. Leaves
  misc_feature: MA Experiment ID: 20000573 Result: Down-regulated in Transcription
  misc_feature: MA Experiment 20000573 PARAMETER Experiment Name: At_100uM_ABA_Mutants__P Parameter: Organism Value: A. thaliana
  misc_feature: MA Experiment 20000573 PARAMETER Experiment Name: At_100uM_ABA_Mutants__P Parameter: Plant Line Value: CS22 vs. Ler wt
  misc_feature: MA Experiment 20000573 PARAMETER Experiment Name: At_100uM_ABA_Mutants__P Parameter: Timepoint (hr) Value: N/A
  misc_feature: MA Experiment 20000573 PARAMETER Experiment Name: At_100uM_ABA_Mutants__P Parameter: Tissue Value: Whole Plant
  misc_feature: MA Experiment 20000573 PARAMETER Experiment Name: At_100uM_ABA_Mutants__P Parameter: Treatment Value: None
  misc_feature: MA Experiment ID: 20000574 Result: Down-regulated in Transcription
  misc_feature: MA Experiment 20000574 PARAMETER Experiment Name: At_100uM_ABA_Mutants__P Parameter: Organism Value: A. thaliana
  misc_feature: MA Experiment 20000574 PARAMETER Experiment Name: At_100uM_ABA_Mutants__P Parameter: Plant Line Value: CS23 vs. Ler wt
  misc_feature: MA Experiment 20000574 PARAMETER Experiment Name: At_100uM_ABA_Mutants__P Parameter: Timepoint (hr) Value: N/A
  misc_feature: MA Experiment 20000574 PARAMETER Experiment Name: At_100uM_ABA_Mutants__P Parameter: Tissue Value: Whole Plant
  misc_feature: MA Experiment 20000574 PARAMETER Experiment Name: At_100uM_ABA_Mutants__P Parameter: Treatment Value: None
  misc_feature: MA Experiment ID: 20001247 Result: Down-regulated in Transcription
  misc_feature: MA Experiment 20001247 PARAMETER Experiment Name: At_Far-red-induction_P Parameter: Age (day) Value: 7
  misc_feature: MA Experiment 20001247 PARAMETER Experiment Name: At_Far-red-induction_P Parameter: Light Value: Far-red vs. White
  misc_feature: MA Experiment 20001247 PARAMETER Experiment Name: At_Far-red-induction_P Parameter: Organism Value: A. thaliana
  misc_feature: MA Experiment 20001247 PARAMETER Experiment Name: At_Far-red-induction_P Parameter: Plant Line Value: Columbia
  misc_feature: MA Experiment 20001247 PARAMETER Experiment Name: At_Far-red-induction_P Parameter: Timepoint (hr) Value: 1
  misc_feature: MA Experiment 20001247 PARAMETER Experiment Name: At_Far-red-induction_P Parameter: Tissue Value: Whole Plant
  misc_feature: MA Experiment ID: 20001248 Result: Down-regulated in Transcription
  misc_feature: MA Experiment 20001248 PARAMETER Experiment Name: At_Far-red-induction_P Parameter: Age (day) Value: 7
  misc_feature: MA Experiment 20001248 PARAMETER Experiment Name: At_Far-red-induction_P Parameter: Light Value: Far-red vs. White
  misc_feature: MA Experiment 20001248 PARAMETER Experiment Name: At_Far-red-induction_P Parameter: Organism Value: A. thaliana
  misc_feature: MA Experiment 20001248 PARAMETER Experiment Name: At_Far-red-induction_P Parameter: Plant Line Value: Columbia
  misc_feature: MA Experiment 20001248 PARAMETER Experiment Name: At_Far-red-induction_P Parameter: Timepoint (hr) Value: 4
  misc_feature: MA Experiment 20001248 PARAMETER Experiment Name: At_Far-red-induction_P Parameter: Tissue Value: Whole Plant
  misc_feature: MA Experiment ID: 20001450 Result: Down-regulated in Transcription
  misc_feature: MA Experiment 20001450 PARAMETER Experiment Name: At_Far-red-induction_P Parameter: Age (day) Value: 7
  misc_feature: MA Experiment 20001450 PARAMETER Experiment Name: At_Far-red-induction_P Parameter: Light Value: Far-red vs. White
  misc_feature: MA Experiment 20001450 PARAMETER Experiment Name: At_Far-red-induction_P Parameter: Organism Value: A. thaliana
  misc_feature: MA Experiment 20001450 PARAMETER Experiment Name: At_Far-red-induction_P Parameter: Plant Line Value: Columbia
  misc_feature: MA Experiment 20001450 PARAMETER Experiment Name: At_Far-red-induction_P Parameter: Timepoint (hr) Value: 8
  misc_feature: MA Experiment 20001450 PARAMETER Experiment Name: At_Far-red-induction_P Parameter: Tissue Value: Whole Plant
  misc_feature: MA Experiment ID: 20001558 Result: Down-regulated in Transcription
  misc_feature: MA Experiment 20001558 PARAMETER Experiment Name: At_Drought_Soil_Dry_P Parameter: Age (day) Value: 27
  misc_feature: MA Experiment 20001558 PARAMETER Experiment Name: At_Drought_Soil_Dry_P Parameter: Organism Value: A. thaliana
  misc_feature: MA Experiment 20001558 PARAMETER Experiment Name: At_Drought_Soil_Dry_P Parameter: Plant Line Value: WS
  misc_feature: MA Experiment 20001558 PARAMETER Experiment Name: At_Drought_Soil_Dry_P Parameter: Post Timepoint (hr) Value: 6
  misc_feature: MA Experiment 20001558 PARAMETER Experiment Name: At_Drought_Soil_Dry_P Parameter: Post-Treatment Value: Re-Water vs. No Drought
  misc_feature: MA Experiment 20001558 PARAMETER Experiment Name: At_Drought_Soil_Dry_P Parameter: Timepoint (day) Value: 13
  misc_feature: MA Experiment 20001558 PARAMETER Experiment Name: At_Drought_Soil_Dry_P Parameter: Treatment Value: Drought vs. No Drought
  misc_feature: MA Experiment ID: 20001560 Result: Down-regulated in Transcription
  misc_feature: MA Experiment 20001560 PARAMETER Experiment Name: At_Drought_Soil_Dry_P Parameter: Age (day) Value: 28
  misc_feature: MA Experiment 20001560 PARAMETER Experiment Name: At_Drought_Soil_Dry_P Parameter: Organism Value: A. thaliana
  misc_feature: MA Experiment 20001560 PARAMETER Experiment Name: At_Drought_Soil_Dry_P Parameter: Plant Line Value: WS
  misc_feature: MA Experiment 20001560 PARAMETER Experiment Name: At_Drought_Soil_Dry_P Parameter: Post Timepoint (hr) Value: None
  misc_feature: MA Experiment 20001560 PARAMETER Experiment Name: At_Drought_Soil_Dry_P Parameter: Post-Treatment Value: None
  misc_feature: MA Experiment 20001560 PARAMETER Experiment Name: At_Drought_Soil_Dry_P Parameter: Timepoint (day) Value: 14
  misc_feature: MA Experiment 20001560 PARAMETER Experiment Name: At_Drought_Soil_Dry_P Parameter: Treatment Value: Drought vs. No Drought
  misc_feature: MA Experiment ID: 20001911 Result: Up-regulated in Transcription
  misc_feature: MA Experiment 20001911 PARAMETER Experiment Name: At_Drought_Reproduction_P Parameter: Age (day) Value: 40
  misc_feature: MA Experiment 20001911 PARAMETER Experiment Name: At_Drought_Reproduction_P Parameter: Organism Value: A. thaliana
  misc_feature: MA Experiment 20001911 PARAMETER Experiment Name: At_Drought_Reproduction_P Parameter: Plant Line Value: WS
  misc_feature: MA Experiment 20001911 PARAMETER Experiment Name: At_Drought_Reproduction_P Parameter: Timepoint (day) Value: 10
  misc_feature: MA Experiment 20001911 PARAMETER Experiment Name: At_Drought_Reproduction_P Parameter: Tissue Value: Flowers
  misc_feature: MA Experiment 20001911 PARAMETER Experiment Name: At_Drought_Reproduction_P Parameter: Treatment Value: Drought vs. No Drought
aaaaaaatcaaaaaaattcatatcatctttttgtctttttttaccagaatttcatccttatttcgtgctaaatcattttccaaacattcataatactttttgttggtttatggccaactaacaaaatatcctctagattttcttctttgtgttagtctatataaagcaataccacagtgatcctcttttttaattcattctgtgtttatgtcaataatcacaatggtttggttaatgaaagtttttgtctttgtgacattactctctttagtgtttgtaataacagaatcagctcctgaatctgctcttatcaccaaacttcctggtttcgaaggcacttttccttcgaaacattactccgggtatgtgacaattgataaggaacatggaaagaatctatggtattactttattgaatcggagaagaatccatcgaaagatccggtggtgctttggctcaatggtggtccaggttgttcaagcatggatggatttgtgtatgagcatggtccattcaatttcgaactaccaaagaaaaacaatagtctcccactcttgcatcttaatccttatagttggtccaaggtctctaacattatataccttgattctcctgttggtgtgggattctcttactcaaacaataagtctgattacataaccggtgatattaaaaccgcggttgactctcacgcgttccttctcaagtggttccaaatgtttcctgagtttcaatcaaatccttttttcatctctggagaatcttacgccggagtttatgtcccaactcttgcttcagaagttgtcatagggaacaaaaatggagtaaagccggctcttaacttcaaggggtatttggttggaaatgtagttgcggatccgaagtttgatggaaatgcttttgtcccgtttgcacatgggatgggactaatctctgatgaactctttgagaacgttacaaaagcttgcaagggaaatttctatgaaatagagggactcgagtgcgaggaacagtatacgaaagttaacgatgatactaaccagttgaatatatacaacattcttgagccatgttaccacggaacatcgctatctgcattcgacattagatcgcttccttcaagtctccttcagctaggcaaaactgaaaaacggttacctataagaaaaagaatgtttggtcgagcgtggccagttcgtgcgcctgttcatccaggcattgtccctagctggtctcaacttcttgccgacgtcactgttccttgcattgatgatagagttgcaacagcgtggttgaacgatccagagattaggaaagctattcatactaaagaggagagcgagattggaaggtgggaactttgcagtgggaaactctcattctatcacgacgcaggaagcatgatcgatttccatagaaaccttacactaagtggatatagagctctcatttacagcggggatcacgatatgtgtgttccgtttactggctcggaagcttggacaaaatctcttggatacaaagttattgatgaatggagggcatggatatcaaatgaccaagtcgcggggtatacgcaaggatatgcaaacaatctcacatttttaaccatcaagggtgcaggacatacggttcctgagtacaaaccgcgggaggctttagacttctatagccgatttctagaaggaagcaagatttaagagagctgtctcatcagtttcatattctgtgctgtatttaaaagtgatcatcttatagcaatatagaatcttgattgatttgaataagaaagatatattcttcaactcattattcaacatagtaaaaatcatttacctt

SEQ ID NO: 22390 - protein, 497 aa, Arabidopsis thaliana
  peptide (1)..(497): Ceres Seq. ID no. 13488396
  misc_feature (28)..(497): Homolog of NCBI NO: 2815493 NR Description: Serine carboxypeptidase I precursor
  misc_feature (14)..(497): Homolog of NCBI NO: 7271957 NR Description: wound-inducible carboxypeptidase [Lycopersicon
  misc_feature (9)..(497): Homolog of NCBI NO: 15230836 NR Description: serine carboxypeptidase -related [Arabidopsis
  misc_feature (9)..(497): Homolog of NCBI NO: 9279723 NR Description: serine carboxypeptidase I [Arabidopsis thaliana]
  misc_feature (275)..(478): Homolog of NCBI NO: 25289790 NR Description: hypothetical protein AT4g12910 [imported] -
  misc_feature (6)..(261): Homolog of NCBI NO: 25289790 NR Description: hypothetical protein AT4g12910 [imported] -
  misc_feature (1)..(478): Homolog of NCBI NO: 30682276 NR Description: serine carboxypeptidase -related [Arabidopsis
  misc_feature (1)..(497): Homolog of NCBI NO: 22531054 NR Description: serine carboxypeptidase 1 precursor-like protein
  misc_feature (19)..(497): Homolog of NCBI NO: 38346978 NR Description: OSJNBb0062H02.3 [Oryza sativa (japonica
  misc_feature (25)..(497): Homolog of NCBI NO: 584892 NR Description: Serine carboxypeptidase I precursor
MSIITMVWLMKVFVFVTLLSLVFVITESAPESALITKLPGFEGTFPSKHYSGYVTIDKEHGKNLWYYFIESEKNPSKDPVVLWLNGGPGCSSMDGFVYEHGPFNFELPKKNNSLPLLHLNPYSWSKVSNIIYLDSPVGVGFSYSNNKSDYITGDIKTAVDSHAFLLKWFQMFPEFQSNPFFISGESYAGVYVPTLASEVVIGNKNGVKPALNFKGYLVGNVVADPKFDGNAFVPFAHGMGLISDELFENVTKACKGNFYEIEGLECEEQYTKVNDDTNQLNIYNILEPCYHGTSLSAFDIRSLPSSLLQLGKTEKRLPIRKRMFGRAWPVRAPVHPGIVPSWSQLLADVTVPCIDDRVATAWLNDPEIRKAIHTKEESEIGRWELCSGKLSFYHDAGSMIDFHRNLTLSGYRALIYSGDHDMCVPFTGSEAWTKSLGYKVIDEWRAWISNDQVAGYTQGYANNLTFLTIKGAGHTVPEYKPREALDFYSRFLEGSKI

SEQ ID NO: 22391 - protein, 492 aa, Arabidopsis thaliana
  peptide (1)..(492): Ceres Seq. ID no. 13488397
  misc_feature (14)..(492): Homolog of NCBI NO: 38346978 NR Description: OSJNBb0062H02.3 [Oryza sativa (japonica
  misc_feature (20)..(492): Homolog of NCBI NO: 584892 NR Description: Serine carboxypeptidase I precursor
  misc_feature (23)..(492): Homolog of NCBI NO: 2815493 NR Description: Serine carboxypeptidase I precursor
  misc_feature (9)..(492): Homolog of NCBI NO: 7271957 NR Description: wound-inducible carboxypeptidase [Lycopersicon
  misc_feature (4)..(492): Homolog of NCBI NO: 15230836 NR Description: serine carboxypeptidase -related [Arabidopsis
  misc_feature (4)..(492): Homolog of NCBI NO: 9279723 NR Description: serine carboxypeptidase I [Arabidopsis thaliana]
  misc_feature (270)..(473): Homolog of NCBI NO: 25289790 NR Description: hypothetical protein AT4g12910 [imported] -
  misc_feature (1)..(256): Homolog of NCBI NO: 25289790 NR Description: hypothetical protein AT4g12910 [imported] -
  misc_feature (1)..(473): Homolog of NCBI NO: 30682276 NR Description: serine carboxypeptidase -related [Arabidopsis
  misc_feature (1)..(492): Homolog of NCBI NO: 22531054 NR Description: serine carboxypeptidase 1 precursor-like protein
MVWLMKVFVFVTLLSLVFVITESAPESALITKLPGFEGTFPSKHYSGYVTIDKEHGKNLWYYFIESEKNPSKDPVVLWLNGGPGCSSMDGFVYEHGPFNFELPKKNNSLPLLHLNPYSWSKVSNIIYLDSPVGVGFSYSNNKSDYITGDIKTAVDSHAFLLKWFQMFPEFQSNPFFISGESYAGVYVPTLASEVVIGNKNGVKPALNFKGYLVGNVVADPKFDGNAFVPFAHGMGLISDELFENVTKACKGNFYEIEGLECEEQYTKVNDDTNQLNIYNILEPCYHGTSLSAFDIRSLPSSLLQLGKTEKRLPIRKRMFGRAWPVRAPVHPGIVPSWSQLLADVTVPCIDDRVATAWLNDPEIRKAIHTKEESEIGRWELCSGKLSFYHDAGSMIDFHRNLTLSGYRALIYSGDHDMCVPFTGSEAWTKSLGYKVIDEWRAWISNDQVAGYTQGYANNLTFLTIKGAGHTVPEYKPREALDFYSRFLEGSKI

SEQ ID NO: 22392 - protein, 488 aa, Arabidopsis thaliana
  peptide (1)..(488): Ceres Seq. ID no. 13488398
  misc_feature (10)..(488): Homolog of NCBI NO: 38346978 NR Description: OSJNBb0062H02.3 [Oryza sativa (japonica
  misc_feature (16)..(488): Homolog of NCBI NO: 584892 NR Description: Serine carboxypeptidase I precursor
  misc_feature (19)..(488): Homolog of NCBI NO: 2815493 NR Description: Serine carboxypeptidase I precursor
  misc_feature (5)..(488): Homolog of NCBI NO: 7271957 NR Description: wound-inducible carboxypeptidase [Lycopersicon
  misc_feature (1)..(488): Homolog of NCBI NO: 15230836 NR Description: serine carboxypeptidase -related [Arabidopsis
  misc_feature (1)..(488): Homolog of NCBI NO: 9279723 NR Description: serine carboxypeptidase I [Arabidopsis thaliana]
  misc_feature (266)..(469): Homolog of NCBI NO: 25289790 NR Description: hypothetical protein AT4g12910 [imported] -
  misc_feature (1)..(252): Homolog of NCBI NO: 25289790 NR Description: hypothetical protein AT4g12910 [imported] -
  misc_feature (1)..(469): Homolog of NCBI NO: 30682276 NR Description: serine carboxypeptidase -related [Arabidopsis
  misc_feature (1)..(488): Homolog of NCBI NO: 22531054 NR Description: serine carboxypeptidase 1 precursor-like protein
MKVFVFVTLLSLVFVITESAPESALITKLPGFEGTFPSKHYSGYVTIDKEHGKNLWYYFIESEKNPSKDPVVLWLNGGPGCSSMDGFVYEHGPFNFELPKKNNSLPLLHLNPYSWSKVSNIIYLDSPVGVGFSYSNNKSDYITGDIKTAVDSHAFLLKWFQMFPEFQSNPFFISGESYAGVYVPTLASEVVIGNKNGVKPALNFKGYLVGNVVADPKFDGNAFVPFAHGMGLISDELFENVTKACKGNFYEIEGLECEEQYTKVNDDTNQLNIYNILEPCYHGTSLSAFDIRSLPSSLLQLGKTEKRLPIRKRMFGRAWPVRAPVHPGIVPSWSQLLADVTVPCIDDRVATAWLNDPEIRKAIHTKEESEIGRWELCSGKLSFYHDAGSMIDFHRNLTLSGYRALIYSGDHDMCVPFTGSEAWTKSLGYKVIDEWRAWISNDQVAGYTQGYANNLTFLTIKGAGHTVPEYKPREALDFYSRFLEGSKI

SEQ ID NO: 22393 - DNA, 1166 bp, Arabidopsis thaliana
  misc_feature (1)..(1166): Ceres Seq. ID no. 13487903
  misc_feature: MA Experiment ID: 108573 Result: Up-regulated in Transcription
  misc_feature: MA Experiment 108573 PARAMETER Experiment Name: At_Drought_cDNA_P Parameter: Timepoint (hr) Value: 6
  misc_feature: MA Experiment 108573 PARAMETER Experiment Name: At_Drought_cDNA_P Parameter: Tissue Value: Aerial
  misc_feature: MA Experiment 108573 PARAMETER Experiment Name: At_Drought_cDNA_P Parameter: Treatment Value: Drought vs. No Drought
  misc_feature: MA Experiment ID: 108579 Result: Down-regulated in Transcription
  misc_feature: MA Experiment 108579 PARAMETER Experiment Name: At_4deg_Cold_cDNA_P Parameter: Temperature (deg C) Value: 4 vs. 22
  misc_feature: MA Experiment 108579 PARAMETER Experiment Name: At_4deg_Cold_cDNA_P Parameter: Timepoint (hr) Value: 6
  misc_feature: MA Experiment 108579 PARAMETER Experiment Name: At_4deg_Cold_cDNA_P Parameter: Tissue Value: Aerial
  misc_feature: MA Experiment ID: 20000224 Result: Down-regulated in Transcription
  misc_feature: MA Experiment ID: 20000437 Result: Up-regulated in Transcription
  misc_feature: MA Experiment 20000437 PARAMETER Experiment Name: At_Drought_P Parameter: Age (day) Value: 8
  misc_feature: MA Experiment 20000437 PARAMETER Experiment Name: At_Drought_P Parameter: Organism Value: A. thaliana
  misc_feature: MA Experiment 20000437 PARAMETER Experiment Name: At_Drought_P Parameter: Plant Line Value: WS
  misc_feature: MA Experiment 20000437 PARAMETER Experiment Name: At_Drought_P Parameter: Timepoint (hr) Value: 24
  misc_feature: MA Experiment 20000437 PARAMETER Experiment Name: At_Drought_P Parameter: Tissue Value: Whole Plant
  misc_feature: MA Experiment 20000437 PARAMETER Experiment Name: At_Drought_P Parameter: Treatment Value: Drought vs. No Drought
  misc_feature: MA Experiment ID: 20001451 Result: Up-regulated in Transcription
  misc_feature: MA Experiment 20001451 PARAMETER Experiment Name: At_Far-red-induction_P Parameter: Age (day) Value: 7
  misc_feature: MA Experiment 20001451 PARAMETER Experiment Name: At_Far-red-induction_P Parameter: Light Value: Far-red vs. White
  misc_feature: MA Experiment 20001451 PARAMETER Experiment Name: At_Far-red-induction_P Parameter: Organism Value: A. thaliana
  misc_feature: MA Experiment 20001451 PARAMETER Experiment Name: At_Far-red-induction_P Parameter: Plant Line Value: Columbia
  misc_feature: MA Experiment 20001451 PARAMETER Experiment Name: At_Far-red-induction_P Parameter: Timepoint (hr) Value: 24
  misc_feature: MA Experiment 20001451 PARAMETER Experiment Name: At_Far-red-induction_P Parameter: Tissue Value: Whole Plant
aaatacaaaaaaaactctcttctcaagtctctccttcttctccgtccttctcaattcttccgttcaaacaaatttctccaaacccaaaccctaatttcctccgtctgtgaaatcaagggttttctctgatctgggttttgatcagaaatcagatctaggtttaattttcgaaatcaaattatgaggaagagagaaagagagaacccttgttcgatttgtgggcattaccataagtacgaggaaggagaagtatgtggagtctgtggtcactgtatgcctgtttcttccgatacggtggcgccgcaacaagtccacgtcagtgcttttccgtcggagattctccctgagtttctttacctcggtagttacgacaacgcttctcgctctgagcttcttaagactcaaggaatctctcgtgttcttaatacggttcctatgtgccagaatctctacaggaattcattcacttatcatggtcttgataatgaaaaagttttacagtttgatgatgctattaagttcttagaccaatgtgagaaggacaaggcacgtgttcttgtgcattgcatgtctgggaaaagtagatcaccagcggttgttgtagcgtacttgatgaaacgaaaagggtggagactcgctgagagtcatcagtgggttaaacaacggagaccaagcactgacataagtccagagttttaccaacaactgcaggagtttgagcaggggatattcggatctgagatgatgtcggcgatgaatattaatgatgctccaacgtttgggtttggtttccctaagattgataatcaagcacaagctcctgtgttcaacaatgctcctacttcttctatattttcatctcctgcttcaagtatccctcctcaggagttcacttttggagcaactccaccaaagccaacaactggtggtgatattgcaatggatggctcttagaaccagataatcatatactcttgcaagaattttcatcaacaaatatactgttgtgagaatgtttctttttcttttttgtacatggagattggtgcattgcttgagagagtttggggtttgagaacatgagattggaagcatctttgtctggtttattcctcactctcccacaattctgtatcgatctttacagcgaaatatactattaaacc

SEQ ID NO: 22394 - protein, 257 aa, Arabidopsis thaliana
  peptide (1)..(257): Ceres Seq. ID no. 13487904
  misc_feature (50)..(233): Homolog of NCBI NO: 14715265 NR Description: MAP kinase phosphatase XCL100(beta) protein
  misc_feature (50)..(233): Homolog of NCBI NO: 4758204 NR Description: dual specificity phosphatase 1
  misc_feature (50)..(233): Homolog of NCBI NO: 28277750 NR Description: Similar to dual specificity phosphatase 1 [Danio
  misc_feature (50)..(231): Homolog of NCBI NO: 2582561 NR Description: MAP kinase phosphatase-1 [Gallus gallus]
  misc_feature (44)..(233): Homolog of NCBI NO: 16950652 NR Description: dual specificity phosphatase 4 isoform 2
  misc_feature (41)..(230): Homolog of NCBI NO: 30851156 NR Description: Unknown (protein for MGC:55423) [Danio rerio]
  misc_feature (27)..(233): Homolog of NCBI NO: 1050849 NR Description: MAP kinase phosphatase [Xenopus laevis]
  misc_feature (171)..(257): Homolog of NCBI NO: 15228155 NR Description: protein phosphatase -related [Arabidopsis
  misc_feature (1)..(173): Homolog of NCBI NO: 15228155 NR Description: protein phosphatase -related [Arabidopsis
  misc_feature (1)..(257): Homolog of NCBI NO: 28393745 NR Description: putative protein phosphatase [Arabidopsis
MRKRERENPCSICGHYHKYEEGEVCGVCGHCMPVSSDTVAPQQVHVSAFPSEILPEFLYLGSYDNASRSELLKTQGISRVLNTVPMCQNLYRNSFTYHGLDNEKVLQFDDAIKFLDQCEKDKARVLVHCMSGKSRSPAVVVAYLMKRKGWRLAESHQWVKQRRPSTDISPEFYQQLQEFEQGIFGSEMMSAMNINDAPTFGFGFPKIDNQAQAPVFNNAPTSSIFSSPASSIPPQEFTFGATPPKPTTGGDIAMDGS

SEQ ID NO: 22395 - protein, 226 aa, Arabidopsis thaliana
  peptide (1)..(226): Ceres Seq. ID no. 13487905
  misc_feature (19)..(202): Homolog of NCBI NO: 14715265 NR Description: MAP kinase phosphatase XCL100(beta) protein
  misc_feature (19)..(202): Homolog of NCBI NO: 4758204 NR Description: dual specificity phosphatase 1
  misc_feature (19)..(202): Homolog of NCBI NO: 28277750 NR Description: Similar to dual specificity phosphatase 1 [Danio
  misc_feature (19)..(200): Homolog of NCBI NO: 2582561 NR Description: MAP kinase phosphatase-1 [Gallus gallus]
  misc_feature (13)..(202): Homolog of NCBI NO: 16950652 NR Description: dual specificity phosphatase 4 isoform 2
  misc_feature (10)..(199): Homolog of NCBI NO: 30851156 NR Description: Unknown (protein for MGC:55423) [Danio rerio]
  misc_feature (1)..(202): Homolog of NCBI NO: 1050849 NR Description: MAP kinase phosphatase [Xenopus laevis]
  misc_feature (140)..(226): Homolog of NCBI NO: 15228155 NR Description: protein phosphatase -related [Arabidopsis
  misc_feature (1)..(142): Homolog of NCBI NO: 15228155 NR Description: protein phosphatase -related [Arabidopsis
  misc_feature (1)..(226): Homolog of NCBI NO: 28393745 NR Description: putative protein phosphatase [Arabidopsis
MPVSSDTVAPQQVHVSAFPSEILPEFLYLGSYDNASRSELLKTQGISRVLNTVPMCQNLYRNSFTYHGLDNEKVLQFDDAIKFLDQCEKDKARVLVHCMSGKSRSPAVVVAYLMKRKGWRLAESHQWVKQRRPSTDISPEFYQQLQEFEQGIFGSEMMSAMNINDAPTFGFGFPKIDNQAQAPVFNNAPTSSIFSSPASSIPPQEFTFGATPPKPTTGGDIAMDGS

SEQ ID NO: 22396 - protein, 172 aa, Arabidopsis thaliana
  peptide (1)..(172): Ceres Seq. ID no. 13487906
  misc_feature (1)..(148): Homolog of NCBI NO: 14715265 NR Description: MAP kinase phosphatase XCL100(beta) protein
  misc_feature (1)..(148): Homolog of NCBI NO: 4758204 NR Description: dual specificity phosphatase 1
  misc_feature (1)..(148): Homolog of NCBI NO: 28277750 NR Description: Similar to dual specificity phosphatase 1 [Danio
  misc_feature (1)..(146): Homolog of NCBI NO: 2582561 NR Description: MAP kinase phosphatase-1 [Gallus gallus]
  misc_feature (1)..(148): Homolog of NCBI NO: 16950652 NR Description: dual specificity phosphatase 4 isoform 2
  misc_feature (1)..(145): Homolog of NCBI NO: 30851156 NR Description: Unknown (protein for MGC:55423) [Danio rerio]
  misc_feature (1)..(148): Homolog of NCBI NO: 1050849 NR Description: MAP kinase phosphatase [Xenopus laevis]
  misc_feature (86)..(172): Homolog of NCBI NO: 15228155 NR Description: protein phosphatase -related [Arabidopsis
  misc_feature (1)..(88): Homolog of NCBI NO: 15228155 NR Description: protein phosphatase -related [Arabidopsis
  misc_feature (1)..(172): Homolog of NCBI NO: 28393745 NR Description: putative protein phosphatase [Arabidopsis
MCQNLYRNSFTYHGLDNEKVLQFDDAIKFLDQCEKDKARVLVHCMSGKSRSPAVVVAYLMKRKGWRLAESHQWVKQRRPSTDISPEFYQQLQEFEQGIFGSEMMSAMNINDAPTFGFGFPKIDNQAQAPVFNNAPTSSIFSSPASSIPPQEFTFGATPPKPTTGGDIAMDGS

SEQ ID NO: 22397 - DNA, 1692 bp, Arabidopsis thaliana
  misc_feature (1)..(1692): Ceres Seq. ID no. 12581370
  misc_feature: MA Experiment ID: 108434 Result: Up-regulated in Transcription
  misc_feature: MA Experiment 108434 PARAMETER Experiment Name: At_Root_Tips_cDNA_P Parameter: Tissue Value: Root Tips
  misc_feature: MA Experiment ID: 108461 Result: Up-regulated in Transcription
  misc_feature: MA Experiment 108461 PARAMETER Experiment Name: At_Germinating_Seeds_cDNA_P Parameter: Age (day) Value: 1 vs. 0
  misc_feature: MA Experiment 108461 PARAMETER Experiment Name: At_Germinating_Seeds_cDNA_P Parameter: Tissue Value: Germinating Seeds
  misc_feature: MA Experiment ID: 108462 Result: Up-regulated in Transcription
  misc_feature: MA Experiment 108462 PARAMETER Experiment Name: At_Germinating_Seeds_cDNA_P Parameter: Age (day) Value: 2 vs. 0
  misc_feature: MA Experiment 108462 PARAMETER Experiment Name: At_Germinating_Seeds_cDNA_P Parameter: Tissue Value: Germinating Seeds
  misc_feature: MA Experiment ID: 20000179 Result: Up-regulated in Transcription
  misc_feature: MA Experiment 20000179 PARAMETER Experiment Name: At_Germinating_Seeds_P Parameter: Age (hr) Value: 6 vs. 0
  misc_feature: MA Experiment 20000179 PARAMETER Experiment Name: At_Germinating_Seeds_P Parameter: Tissue Value: Germinating Seeds
  misc_feature: MA Experiment ID: 20000180 Result: Up-regulated in Transcription
  misc_feature: MA Experiment 20000180 PARAMETER Experiment Name: At_Germinating_Seeds_P Parameter: Age (hr) Value: 24 vs. 0
  misc_feature: MA Experiment 20000180 PARAMETER Experiment Name: At_Germinating_Seeds_P Parameter: Tissue Value: Germinating Seeds
  misc_feature: MA Experiment ID: 20000794 Result: Up-regulated in Transcription
  misc_feature: MA Experiment 20000794 PARAMETER Experiment Name: At_Petals_P Parameter: Age (day) Value: 23-25 days
  misc_feature: MA Experiment 20000794 PARAMETER Experiment Name: At_Petals_P Parameter: Plant Line Value: WS
  misc_feature: MA Experiment 20000794 PARAMETER Experiment Name: At_Petals_P Parameter: Tissue Value: Petals vs. Whole plant
  misc_feature: MA Experiment ID: 20001451 Result: Down-regulated in Transcription
  misc_feature: MA Experiment 20001451 PARAMETER Experiment Name: At_Far-red-induction_P Parameter: Age (day) Value: 7
  misc_feature: MA Experiment 20001451 PARAMETER Experiment Name: At_Far-red-induction_P Parameter: Light Value: Far-red vs. White
  misc_feature: MA Experiment 20001451 PARAMETER Experiment Name: At_Far-red-induction_P Parameter: Organism Value: A. thaliana
  misc_feature: MA Experiment 20001451 PARAMETER Experiment Name: At_Far-red-induction_P Parameter: Plant Line Value: Columbia
  misc_feature: MA Experiment 20001451 PARAMETER Experiment Name: At_Far-red-induction_P Parameter: Timepoint (hr) Value: 24
  misc_feature: MA Experiment 20001451 PARAMETER Experiment Name: At_Far-red-induction_P Parameter: Tissue Value: Whole Plant
  misc_feature: MA Experiment ID: 20001556 Result: Up-regulated in Transcription
  misc_feature: MA Experiment 20001556 PARAMETER Experiment Name: At_Drought_Soil_Dry_P Parameter: Age (day) Value: 26
  misc_feature: MA Experiment 20001556 PARAMETER Experiment Name: At_Drought_Soil_Dry_P Parameter: Organism Value: A. thaliana
  misc_feature: MA Experiment 20001556 PARAMETER Experiment Name: At_Drought_Soil_Dry_P Parameter: Plant Line Value: WS
  misc_feature: MA Experiment 20001556 PARAMETER Experiment Name: At_Drought_Soil_Dry_P Parameter: Post Timepoint (hr) Value: None
  misc_feature: MA Experiment 20001556 PARAMETER Experiment Name: At_Drought_Soil_Dry_P Parameter: Post-Treatment Value: None
  misc_feature: MA Experiment 20001556 PARAMETER Experiment Name: At_Drought_Soil_Dry_P Parameter: Timepoint (day) Value: 12
  misc_feature: MA Experiment 20001556 PARAMETER Experiment Name: At_Drought_Soil_Dry_P Parameter: Treatment Value: Drought vs. No Drought
gttgaatccttgttaatctttttcttcaatctctcgatctgatcgttatcgaaacctcgcgattctaaccaagtccagttaattttgtgctccatagcgattccatggcttctttaatgttatctctcggttccacttctctgttaccgcgcgagattaacaaggataagctaaagcttggaacttctgcttcgaacccgttcctaaaagcaaagtcttttagcagagtgactatgacggttgcagtgaagccttctcgtttcgagggtataactatggctccaccagaccctattcttggagtcagtgaagcattcaaagctgacactaacgggatgaaactcaatcttggtgttggtgcttatcgtactgaggaactccagccttatgtgcttaatgttgttaaaaaggcggagaatttgatgttggagagaggagataacaaagagtatcttccaattgaggggttggcagcattcaacaaggctactgctgagttgctatttggagctggtcatcctgttattaaggaacaaagagtagcaacaattcagggtctttcgggaacaggttcactgcgattagcagcggctcctatagagcgttatttccctggagcaaaagttgtgatctcatcaccaacctggggtaatcacaagaatatcttcaatgatgccaaagttccgtggtccgaataccgctactatgatccaaaaacaattggtttggattttgagggaatgatagcagatataaaggaagctccagaaggatccttcatcttgcttcacggatgtgctcacaacccaactggaattgacccaacaccagaacagtaggtaaaaattgctgatgtcattcaggaaaagaaccatatcccatttttcgatgttgcataccagggctttgctagtggaagccttgatgaagatgcagcatctgtgagattatttgctgagcggggaatggagttttttgttgctcagtcatatagtaaaaatttaggtttgtatgcagaaagaattggggcaatcaatgtcgtgtgctcctcagctgatgctgctacaagggtcaagagccagttgaaaaggattgctcggcctatgtactcgaatccaccagttcatggggcgagaatcgtggccaatgtagtgggtgatgtaactatgttcagtgaatggaaagcagagatggaaatgatggcaggaagaataaagacggttagacaagagctgtatgatagcctcgtttcaaaagacaagagcgggaaggactggtccttcattctgaagcaaattggcatgttctctttcaccggcctaaacaaagctcagagcgataacatgacggacaaatggcatgtgtatatgactaaagacgggaggatatcattggccggattatctctggccaaatgcgagtatcttgctgatgcgatcatcgactcataccataacgtaagctgagcttccatctcagtagatgacaataagaaacagttttatataccctttttagcttcttcttgatctttgattgaaaccagatggctaaattaataagctagcatcacactatgattgctagacaattttcaaggaaacttttgatttgatcgtgtttgacaggccttgttgtattgggagactcccatcgagttatagaagaacttgttacgattgtattttacgt

SEQ ID NO: 22398 - protein, 244 aa, Arabidopsis thaliana
  peptide (1)..(244): Ceres Seq. ID no. 12581371
  misc_feature (131)..(244): Pfam Name: Aminotransferase class I and II Pfam Description: Aminotransferase class I and II
  misc_feature (1)..(244): Homolog of NCBI NO: 485495 NR Description: aspartate transaminase (EC 2.6.1.1) AAT5
  misc_feature (2)..(244): Homolog of NCBI NO: 2605932 NR Description: aspartate aminotransferase [Lotus corniculatus]
  misc_feature (1)..(244): Homolog of NCBI NO: 25990362 NR Description: aspartate aminotransferase [Phaseolus vulgaris]
  misc_feature (1)..(244): Homolog of NCBI NO: 445118 NR Description: Asp aminotransferase
  misc_feature (1)..(244): Homolog of NCBI NO: 1076500 NR Description: aspartate transaminase (EC 2.6.1.1) - alfalfa
  misc_feature (1)..(244): Homolog of NCBI NO: 21618222 NR Description: aspartate aminotransferase [Arabidopsis thaliana]
  misc_feature (1)..(244): Homolog of NCBI NO: 531555 NR Description: aspartate aminotransferase [Arabidopsis thaliana]
  misc_feature (1)..(244): Homolog of NCBI NO: 15236129 NR Description: aspartate aminotransferase
MASLMLSLGSTSLLPREINKDKLKLGTSASNPFLKAKSFSRVTMTVAVKPSRFEGITMAPPDPILGVSEAFKADTNGMKLNLGVGAYRTEELQPYVLNVVKKAENLMLERGDNKEYLPIEGLAAFNKATAELLFGAGHPVIKEQRVATIQGLSGTGSLRLAAAPIERYFPGAKVVISSPTWGNHKNIFNDAKVPWSEYRYYDPKTIGLDFEGMIADIKEAPEGSFILLHGCAHNPTGIDPTPEQ

SEQ ID NO: 22399 - protein, 240 aa, Arabidopsis thaliana
  peptide (1)..(240): Ceres Seq. ID no. 12581372
  misc_feature (127)..(240): Pfam Name: Aminotransferase class I and II Pfam Description: Aminotransferase class I and II
  misc_feature (1)..(240): Homolog of NCBI NO: 485495 NR Description: aspartate transaminase (EC 2.6.1.1) AAT5
  misc_feature (1)..(240): Homolog of NCBI NO: 2605932 NR Description: aspartate aminotransferase [Lotus corniculatus]
  misc_feature (1)..(240): Homolog of NCBI NO: 25990362 NR Description: aspartate aminotransferase [Phaseolus vulgaris]
  misc_feature (1)..(240): Homolog of NCBI NO: 445118 NR Description: Asp aminotransferase
  misc_feature (1)..(240): Homolog of NCBI NO: 1076500 NR Description: aspartate transaminase (EC 2.6.1.1) - alfalfa
  misc_feature (1)..(240): Homolog of NCBI NO: 21618222 NR Description: aspartate aminotransferase [Arabidopsis thaliana]
  misc_feature (1)..(240): Homolog of NCBI NO: 531555 NR Description: aspartate aminotransferase [Arabidopsis thaliana]
  misc_feature (1)..(240): Homolog of NCBI NO: 15236129 NR Description: aspartate aminotransferase
MLSLGSTSLLPREINKDKLKLGTSASNPFLKAKSFSRVTMTVAVKPSRFEGITMAPPDPILGVSEAFKADTNGMKLNLGVGAYRTEELQPYVLNVVKKAENLMLERGDNKEYLPIEGLAAFNKATAELLFGAGHPVIKEQRVATIQGLSGTGSLRLAAAPIERYFPGAKVVISSPTWGNHKNIFNDAKVPWSEYRYYDPKTIGLDFEGMIADIKEAPEGSFILLHGCAHNPTGIDPTPEQ

SEQ ID NO: 22400 - protein, 201 aa, Arabidopsis thaliana
  peptide (1)..(201): Ceres Seq. ID no. 12581373
  misc_feature (88)..(201): Pfam Name: Aminotransferase class I and II Pfam Description: Aminotransferase class I and II
  misc_feature (1)..(201): Homolog of NCBI NO: 485495 NR Description: aspartate transaminase (EC 2.6.1.1) AAT5
  misc_feature (1)..(201): Homolog of NCBI NO: 2605932 NR Description: aspartate aminotransferase [Lotus corniculatus]
  misc_feature (1)..(201): Homolog of NCBI NO: 25990362 NR Description: aspartate aminotransferase [Phaseolus vulgaris]
  misc_feature (1)..(201): Homolog of NCBI NO: 445118 NR Description: Asp aminotransferase
  misc_feature (1)..(201): Homolog of NCBI NO: 1076500 NR Description: aspartate transaminase (EC 2.6.1.1) - alfalfa
  misc_feature (1)..(201): Homolog of NCBI NO: 21618222 NR Description: aspartate aminotransferase [Arabidopsis thaliana]
  misc_feature (1)..(201): Homolog of NCBI NO: 531555 NR Description: aspartate aminotransferase [Arabidopsis thaliana]
  misc_feature (1)..(201): Homolog of NCBI NO: 15236129 NR Description: aspartate aminotransferase
MTVAVKPSRFEGITMAPPDPILGVSEAFKADTNGMKLNLGVGAYRTEELQPYVLNVVKKAENLMLERGDNKEYLPIEGLAAFNKATAELLFGAGHPVIKEQRVATIQGLSGTGSLRLAAAPIERYFPGAKVVISSPTWGNHKNIFNDAKVPWSEYRYYDPKTIGLDFEGMIADIKEAPEGSFILLHGCAHNPTGIDPTPEQ

SEQ ID NO: 22401 - DNA, 1271 bp, Arabidopsis thaliana
  misc_feature (1)..(1271): Ceres Seq. ID no. 12324458
  misc_feature: MA Experiment ID: 108573 Result: Down-regulated in Transcription
  misc_feature: MA Experiment 108573 PARAMETER Experiment Name: At_Drought_cDNA_P Parameter: Timepoint (hr) Value: 6
  misc_feature: MA Experiment 108573 PARAMETER Experiment Name: At_Drought_cDNA_P Parameter: Tissue Value: Aerial
  misc_feature: MA Experiment 108573 PARAMETER Experiment Name: At_Drought_cDNA_P Parameter: Treatment Value: Drought vs. No Drought
  misc_feature: MA Experiment ID: 108576 Result: Down-regulated in Transcription
  misc_feature: MA Experiment 108576 PARAMETER Experiment Name: At_42deg_Heat_cDNA_P Parameter: Temperature (deg C) Value: 42 vs. 22
  misc_feature: MA Experiment 108576 PARAMETER Experiment Name: At_42deg_Heat_cDNA_P Parameter: Timepoint (hr) Value: 1
  misc_feature: MA Experiment 108576 PARAMETER Experiment Name: At_42deg_Heat_cDNA_P Parameter: Tissue Value: Aerial
  misc_feature: MA Experiment ID: 108577 Result: Down-regulated in Transcription
  misc_feature: MA Experiment 108577 PARAMETER Experiment Name: At_42deg_Heat_cDNA_P Parameter: Temperature (deg C) Value: 42 vs. 22
  misc_feature: MA Experiment 108577 PARAMETER Experiment Name: At_42deg_Heat_cDNA_P Parameter: Timepoint (hr) Value: 6
  misc_feature: MA Experiment 108577 PARAMETER Experiment Name: At_42deg_Heat_cDNA_P Parameter: Tissue Value: Aerial
  misc_feature: MA Experiment ID: 20000173 Result: Down-regulated in Transcription
  misc_feature: MA Experiment 20000173 PARAMETER Experiment Name: At_42deg_Heat_P Parameter: Age (day) Value: 14
  misc_feature: MA Experiment 20000173 PARAMETER Experiment Name: At_42deg_Heat_P Parameter: Organism Value: A. thaliana
  misc_feature: MA Experiment 20000173 PARAMETER Experiment Name: At_42deg_Heat_P Parameter: Plant Line Value: WS
  misc_feature: MA Experiment 20000173 PARAMETER Experiment Name: At_42deg_Heat_P Parameter: Temperature (deg C) Value: 42 vs. 22
  misc_feature: MA Experiment 20000173 PARAMETER Experiment Name: At_42deg_Heat_P Parameter: Timepoint (hr) Value: 6
  misc_feature: MA Experiment 20000173 PARAMETER Experiment Name: At_42deg_Heat_P Parameter: Tissue Value: Aerial
  misc_feature: MA Experiment ID: 20000180 Result: Down-regulated in Transcription
  misc_feature: MA Experiment 20000180 PARAMETER Experiment Name: At_Germinating_Seeds_P Parameter: Age (hr) Value: 24 vs. 0
  misc_feature: MA Experiment 20000180 PARAMETER Experiment Name: At_Germinating_Seeds_P Parameter: Tissue Value: Germinating Seeds
  misc_feature: MA Experiment ID: 20000182 Result: Down-regulated in Transcription
  misc_feature: MA Experiment 20000182 PARAMETER Experiment Name: At_2mM_SA_P Parameter: Age (day) Value: 14
  misc_feature: MA Experiment 20000182 PARAMETER Experiment Name: At_2mM_SA_P Parameter: Organism Value: A. thaliana
  misc_feature: MA Experiment 20000182 PARAMETER Experiment Name: At_2mM_SA_P Parameter: Plant Line Value: WS
  misc_feature: MA Experiment 20000182 PARAMETER Experiment Name: At_2mM_SA_P Parameter: Timepoint (hr) Value: 6
  misc_feature: MA Experiment 20000182 PARAMETER Experiment Name: At_2mM_SA_P Parameter: Tissue Value: Aerial
  misc_feature: MA Experiment 20000182 PARAMETER Experiment Name: At_2mM_SA_P Parameter: Treatment Value: 2mM SA vs. No Treatment
  misc_feature: MA Experiment ID: 20000185 Result: Down-regulated in Transcription
  misc_feature: MA Experiment 20000185 PARAMETER Experiment Name: At_Roots__P Parameter: Age (day) Value: 7 vs. 21
  misc_feature: MA Experiment 20000185 PARAMETER Experiment Name: At_Roots__P Parameter: Organism Value: A. thaliana
  misc_feature: MA Experiment 20000185 PARAMETER Experiment Name: At_Roots__P Parameter: Tissue Value: Roots vs. Whole Plant
  misc_feature: MA Experiment ID: 20000227 Result: Down-regulated in Transcription
  misc_feature: MA Experiment 20000227 PARAMETER Experiment Name: At_Root-Tips-vs-Tops_P Parameter: Tissue Value: Root Tips vs. Root Tops
  misc_feature: MA Experiment ID: 20000268 Result: Down-regulated in Transcription
  misc_feature: MA Experiment 20000268 PARAMETER Experiment Name: At_100mM_NaCl__P Parameter: Age (day) Value: 14
  misc_feature: MA Experiment 20000268 PARAMETER Experiment Name: At_100mM_NaCl__P Parameter: Organism Value: A. thaliana
  misc_feature: MA Experiment 20000268 PARAMETER Experiment Name: At_100mM_NaCl__P Parameter: Plant Line Value: WS
  misc_feature: MA Experiment 20000268 PARAMETER Experiment Name: At_100mM_NaCl__P Parameter: Timepoint (hr) Value: 6
  misc_feature: MA Experiment 20000268 PARAMETER Experiment Name: At_100mM_NaCl__P Parameter: Tissue Value: Whole Plant
  misc_feature: MA Experiment 20000268 PARAMETER Experiment Name: At_100mM_NaCl__P Parameter: Treatment Value: 100mM NaCl vs. No Treatment
  misc_feature: MA Experiment ID: 20000437 Result: Down-regulated in Transcription
  misc_feature: MA Experiment 20000437 PARAMETER Experiment Name: At_Drought_P Parameter: Age (day) Value: 8
  misc_feature: MA Experiment 20000437 PARAMETER Experiment Name: At_Drought_P Parameter: Organism Value: A. thaliana
  misc_feature: MA Experiment 20000437 PARAMETER Experiment Name: At_Drought_P Parameter: Plant Line Value: WS
  misc_feature: MA Experiment 20000437 PARAMETER Experiment Name: At_Drought_P Parameter: Timepoint (hr) Value: 24
  misc_feature: MA Experiment 20000437 PARAMETER Experiment Name: At_Drought_P Parameter: Tissue Value: Whole Plant
  misc_feature: MA Experiment 20000437 PARAMETER Experiment Name: At_Drought_P Parameter: Treatment Value: Drought vs. No Drought
  misc_feature: MA Experiment ID: 20000438 Result: Down-regulated in Transcription
  misc_feature: MA Experiment 20000438 PARAMETER Experiment Name: At_Shoots__P Parameter: Age (day) Value: 14
  misc_feature: MA Experiment 20000438 PARAMETER Experiment Name: At_Shoots__P Parameter: Tissue Value: Shoots vs. Whole Plant
  misc_feature: MA Experiment ID: 20000439 Result: Down-regulated in Transcription
  misc_feature: MA Experiment 20000439 PARAMETER Experiment Name: At_Roots__P Parameter: Age (day) Value: 14 vs. 21
  misc_feature: MA Experiment 20000439 PARAMETER Experiment Name: At_Roots__P Parameter: Organism Value: A. thaliana
  misc_feature: MA Experiment 20000439 PARAMETER Experiment Name: At_Roots__P Parameter: Tissue Value: Roots vs. Whole Plant
  misc_feature: MA Experiment ID: 20000445 Result: Down-regulated in Transcription
  misc_feature: MA Experiment 20000445 PARAMETER Experiment Name: At_100uM_NAA__P Parameter: Age (day) Value: 14
  misc_feature: MA Experiment 20000445 PARAMETER Experiment Name: At_100uM_NAA__P Parameter: Organism Value: A. thaliana
  misc_feature: MA Experiment 20000445 PARAMETER Experiment Name: At_100uM_NAA__P Parameter: Plant Line Value: WS
  misc_feature: MA Experiment 20000445 PARAMETER Experiment Name: At_100uM_NAA__P Parameter: Timepoint (hr) Value: 6
  misc_feature: MA Experiment 20000445 PARAMETER Experiment Name: At_100uM_NAA__P Parameter: Tissue Value: Aerial
  misc_feature: MA Experiment 20000445 PARAMETER Experiment Name: At_100uM_NAA__P Parameter: Treatment Value: 100uM NAA vs. No Treatment
  misc_feature: MA Experiment ID: 20000606 Result: Up-regulated in Transcription
  misc_feature: MA Experiment 20000606 PARAMETER Experiment Name: At_CS8548_Mutant_P Parameter: Age (day) Value: 14
  misc_feature: MA Experiment 20000606 PARAMETER Experiment Name: At_CS8548_Mutant_P Parameter: Plant Line Value: CS8548 vs. wt
  misc_feature: MA Experiment 20000606 PARAMETER Experiment Name: At_CS8548_Mutant_P Parameter: Tissue Value: Whole Plant
  misc_feature: MA Experiment ID: 20000794 Result: Down-regulated in Transcription
  misc_feature: MA Experiment 20000794 PARAMETER Experiment Name: At_Petals_P Parameter: Age (day) Value: 23-25 days
  misc_feature: MA Experiment 20000794 PARAMETER Experiment Name: At_Petals_P Parameter: Plant Line Value: WS
  misc_feature: MA Experiment 20000794 PARAMETER Experiment Name: At_Petals_P Parameter: Tissue Value: Petals vs. Whole plant
  misc_feature: MA Experiment ID: 20001247 Result: Up-regulated in Transcription
  misc_feature: MA Experiment 20001247 PARAMETER Experiment Name: At_Far-red-induction_P Parameter: Age (day) Value: 7
  misc_feature: MA Experiment 20001247 PARAMETER Experiment Name: At_Far-red-induction_P Parameter: Light Value: Far-red vs. White
  misc_feature: MA Experiment 20001247 PARAMETER Experiment Name: At_Far-red-induction_P Parameter: Organism Value: A. thaliana
  misc_feature: MA Experiment 20001247 PARAMETER Experiment Name: At_Far-red-induction_P Parameter: Plant Line Value: Columbia
  misc_feature: MA Experiment 20001247 PARAMETER Experiment Name: At_Far-red-induction_P Parameter: Timepoint (hr) Value: 1
  misc_feature: MA Experiment 20001247 PARAMETER Experiment Name: At_Far-red-induction_P Parameter: Tissue Value: Whole Plant
  misc_feature: MA Experiment ID: 20001555 Result: Down-regulated in Transcription
  misc_feature: MA Experiment 20001555 PARAMETER Experiment Name: At_Drought_Soil_Dry_P Parameter: Age (day) Value: 24
  misc_feature: MA Experiment 20001555 PARAMETER Experiment Name: At_Drought_Soil_Dry_P Parameter: Organism Value: A. thaliana
  misc_feature: MA Experiment 20001555 PARAMETER Experiment Name: At_Drought_Soil_Dry_P Parameter: Plant Line Value: WS
  misc_feature: MA Experiment 20001555 PARAMETER Experiment Name: At_Drought_Soil_Dry_P Parameter: Post Timepoint (hr) Value: None
  misc_feature: MA Experiment 20001555 PARAMETER Experiment Name: At_Drought_Soil_Dry_P Parameter: Post-Treatment Value: None
  misc_feature: MA Experiment 20001555 PARAMETER Experiment Name: At_Drought_Soil_Dry_P Parameter: Timepoint (day) Value: 10
  misc_feature: MA Experiment 20001555 PARAMETER Experiment Name: At_Drought_Soil_Dry_P Parameter: Treatment Value: Drought vs. No Drought
  misc_feature: MA Experiment ID: 20001556 Result: Down-regulated in Transcription
  misc_feature: MA Experiment 20001556 PARAMETER Experiment Name: At_Drought_Soil_Dry_P Parameter: Age (day) Value: 26
  misc_feature: MA Experiment 20001556 PARAMETER Experiment Name: At_Drought_Soil_Dry_P Parameter: Organism Value: A. thaliana
  misc_feature: MA Experiment 20001556 PARAMETER Experiment Name: At_Drought_Soil_Dry_P Parameter: Plant Line Value: WS
  misc_feature: MA Experiment 20001556 PARAMETER Experiment Name: At_Drought_Soil_Dry_P Parameter: Post Timepoint (hr) Value: None
  misc_feature: MA Experiment 20001556 PARAMETER Experiment Name: At_Drought_Soil_Dry_P Parameter: Post-Treatment Value: None
  misc_feature: MA Experiment 20001556 PARAMETER Experiment Name: At_Drought_Soil_Dry_P Parameter: Timepoint (day) Value: 12
  misc_feature: MA Experiment 20001556 PARAMETER Experiment Name: At_Drought_Soil_Dry_P Parameter: Treatment Value: Drought vs. No Drought
  misc_feature: MA Experiment ID: 20001557 Result: Up-regulated in Transcription
  misc_feature: MA Experiment 20001557 PARAMETER Experiment Name: At_Drought_Soil_Dry_P Parameter: Age (day) Value: 27
  misc_feature: MA Experiment 20001557 PARAMETER Experiment Name: At_Drought_Soil_Dry_P Parameter: Organism Value: A. thaliana
  misc_feature: MA Experiment 20001557 PARAMETER Experiment Name: At_Drought_Soil_Dry_P Parameter: Plant Line Value: WS
  misc_feature: MA Experiment 20001557 PARAMETER Experiment Name: At_Drought_Soil_Dry_P Parameter: Post Timepoint (hr) Value: 3
  misc_feature: MA Experiment 20001557 PARAMETER Experiment Name: At_Drought_Soil_Dry_P Parameter: Post-Treatment Value: Re-Water vs. No Drought
  misc_feature: MA Experiment 20001557 PARAMETER Experiment Name: At_Drought_Soil_Dry_P Parameter: Timepoint (day) Value: 13
  misc_feature: MA Experiment 20001557 PARAMETER Experiment Name: At_Drought_Soil_Dry_P Parameter: Treatment Value: Drought vs. No Drought
  misc_feature: MA Experiment ID: 20001559 Result: Down-regulated in Transcription
  misc_feature: MA Experiment 20001559 PARAMETER Experiment Name: At_Drought_Soil_Dry_P Parameter: Age (day) Value: 28
  misc_feature: MA Experiment 20001559 PARAMETER Experiment Name: At_Drought_Soil_Dry_P Parameter: Organism Value: A. thaliana
  misc_feature: MA Experiment 20001559 PARAMETER Experiment Name: At_Drought_Soil_Dry_P Parameter: Plant Line Value: WS
  misc_feature: MA Experiment 20001559 PARAMETER Experiment Name: At_Drought_Soil_Dry_P Parameter: Post Timepoint (hr) Value: 29
  misc_feature: MA Experiment 20001559 PARAMETER Experiment Name: At_Drought_Soil_Dry_P Parameter: Post-Treatment Value: Re-Water vs. No Drought
  misc_feature: MA Experiment 20001559 PARAMETER Experiment Name: At_Drought_Soil_Dry_P Parameter: Timepoint (day) Value: 14
  misc_feature: MA Experiment 20001559 PARAMETER Experiment Name: At_Drought_Soil_Dry_P Parameter: Treatment Value: Drought vs. No Drought
  misc_feature: MA Experiment ID: 20001757 Result: Up-regulated in Transcription
  misc_feature: MA Experiment 20001757 PARAMETER Experiment Name: At_50mM_NH4NO3_L-to-H_P Parameter: Timepoint (hr) Value: 6
  misc_feature: MA Experiment 20001757 PARAMETER Experiment Name: At_50mM_NH4NO3_L-to-H_P Parameter: Tissue Value: Leaf
  misc_feature: MA Experiment 20001757 PARAMETER Experiment Name: At_50mM_NH4NO3_L-to-H_P Parameter: Treatment Value: 50mM NH4NO3 vs 100mM Mannitol
  misc_feature: MA Experiment ID: 20001904 Result: Down-regulated in Transcription
  misc_feature: MA Experiment 20001904 PARAMETER Experiment Name: At_Drought_Reproduction_P Parameter: Age (day) Value: 37
  misc_feature: MA Experiment 20001904 PARAMETER Experiment Name: At_Drought_Reproduction_P Parameter: Organism Value: A. thaliana
  misc_feature: MA Experiment 20001904 PARAMETER Experiment Name: At_Drought_Reproduction_P Parameter: Plant Line Value: WS
  misc_feature: MA Experiment 20001904 PARAMETER Experiment Name: At_Drought_Reproduction_P Parameter: Timepoint (day) Value: 7
  misc_feature: MA Experiment 20001904 PARAMETER Experiment Name: At_Drought_Reproduction_P Parameter: Tissue Value: Rosettes
  misc_feature: MA Experiment 20001904 PARAMETER Experiment Name: At_Drought_Reproduction_P Parameter: Treatment Value: Drought vs. No Drought
  misc_feature: MA Experiment ID: 20001905 Result: Down-regulated in Transcription
  misc_feature: MA Experiment 20001905 PARAMETER Experiment Name: At_Drought_Reproduction_P Parameter: Age (day) Value: 40
  misc_feature: MA Experiment 20001905 PARAMETER Experiment Name: At_Drought_Reproduction_P Parameter: Organism Value: A. thaliana
  misc_feature: MA Experiment 20001905 PARAMETER Experiment Name: At_Drought_Reproduction_P Parameter: Plant Line Value: WS
  misc_feature: MA Experiment 20001905 PARAMETER Experiment Name: At_Drought_Reproduction_P Parameter: Timepoint (day) Value: 10
  misc_feature: MA Experiment 20001905 PARAMETER Experiment Name: At_Drought_Reproduction_P Parameter: Tissue Value: Rosettes
  misc_feature: MA Experiment 20001905 PARAMETER Experiment Name: At_Drought_Reproduction_P Parameter: Treatment Value: Drought vs. No Drought
  misc_feature: MA Experiment ID: 20001906 Result: Down-regulated in Transcription
  misc_feature: MA Experiment 20001906 PARAMETER Experiment Name: At_Drought_Reproduction_P Parameter: Age (day) Value: 35
  misc_feature: MA Experiment 20001906 PARAMETER Experiment Name: At_Drought_Reproduction_P Parameter: Organism Value: A. thaliana
  misc_feature: MA Experiment 20001906 PARAMETER Experiment Name: At_Drought_Reproduction_P Parameter: Plant Line Value: WS
  misc_feature: MA Experiment 20001906 PARAMETER Experiment Name: At_Drought_Reproduction_P Parameter: Timepoint (day) Value: 5
  misc_feature: MA Experiment 20001906 PARAMETER Experiment Name: At_Drought_Reproduction_P Parameter: Tissue Value: Siliques
  misc_feature: MA Experiment 20001906 PARAMETER Experiment Name: At_Drought_Reproduction_P Parameter: Treatment Value: Drought vs. No Drought
  misc_feature: MA Experiment ID: 20001908 Result: Down-regulated in Transcription
  misc_feature: MA Experiment 20001908 PARAMETER Experiment Name: At_Drought_Reproduction_P Parameter: Age (day) Value: 40
  misc_feature: MA Experiment 20001908 PARAMETER Experiment Name: At_Drought_Reproduction_P Parameter: Organism Value: A. thaliana
  misc_feature: MA Experiment 20001908 PARAMETER Experiment Name: At_Drought_Reproduction_P Parameter: Plant Line Value: WS
  misc_feature: MA Experiment 20001908 PARAMETER Experiment Name: At_Drought_Reproduction_P Parameter: Timepoint (day) Value: 10
  misc_feature: MA Experiment 20001908 PARAMETER Experiment Name: At_Drought_Reproduction_P Parameter: Tissue Value: Siliques
  misc_feature: MA Experiment 20001908 PARAMETER Experiment Name: At_Drought_Reproduction_P Parameter: Treatment Value: Drought vs. No Drought
  misc_feature: MA Experiment ID: 20001911 Result: Down-regulated in Transcription
  misc_feature: MA Experiment 20001911 PARAMETER Experiment Name: At_Drought_Reproduction_P Parameter: Age (day) Value: 40
  misc_feature: MA Experiment 20001911 PARAMETER Experiment Name: At_Drought_Reproduction_P Parameter: Organism Value: A. thaliana
  misc_feature: MA Experiment 20001911 PARAMETER Experiment Name: At_Drought_Reproduction_P Parameter: Plant Line Value: WS
  misc_feature: MA Experiment 20001911 PARAMETER Experiment Name: At_Drought_Reproduction_P Parameter: Timepoint (day) Value: 10
  misc_feature: MA Experiment 20001911 PARAMETER Experiment Name: At_Drought_Reproduction_P Parameter: Tissue Value: Flowers
  misc_feature: MA Experiment 20001911 PARAMETER Experiment Name: At_Drought_Reproduction_P Parameter: Treatment Value: Drought vs. No Drought
ttcagacaagtcggtccactaattcaaattttctccattctctcgttccaattattatttacttttttcacccaataaaaaaaaaaccatgcattcacttccggtgaatctcgtcctcaccgtacttacggtgttcctaacatcaccggcgcaagttatcggataccgtccatatccaccaaaaaccaacggctccgatcaaatcttcgacgcttcaaaaaaattcgaaggctcatcgaatctcgtccgcctccgttaccacatgggtccagtcttaaccaacaacatcaccgttcacccaatctggtacggcacgtggcaaaaatcccagaagaaaatcatccgtgagttcattaactcaatctcagccgttggatctaaacacccttcagtctccggttggtggaaaaccgtacagctttacactgaccaaactggatctaacattaccggtacggttcgtctcggtgaagagaaaaacgaccggttttattctcatggtaaatcacttacccggttatcgattcaatccgtgataaaatccgccgtcacttctaggtctcgcccgttgccggttaatcccaaaagcggtttatatcttctcctcaccgccgatgatgtctacgtgcaagatttttgcggccaggtttgtggatttcactatttcacgtttccgtcgattgttggattcacgttaccgtacgcttgggttggaaactcggcgaagctttgtcccggagtttgtgcttatccgttcgccgtaccggcgtttataccgggattaaaaccggttaaatcgcctaacggagatgttggagtagatgggatgataagtgtgatagctcacgagattgctgagctggcgacgaatccgttggttaatgcttggtacgcaggacccgacccggtagctccggttgagatagcggatctttgtgagggtatttatggaacaggaggtggtggttcgtacacaggacagatgttgaacgatcatagtggtgccacgtataatgttaatgggatccgacggcggtatttgatccagtggttatggagccacgttgttagttactgtaccggacccaatgcgcttgattagtgaatgaatggtatggtttgtgtttaaatttgggaagggtaattttgtcttttggaatttgagctcgacattgtggaattattatgatcaagaatgggtttgttgtgtcgatgcataattaaaattagttaatgatagttatgaggaaaggcacgtatgttgcttatcc

SEQ ID NO: 22402 - protein, 337 aa, Arabidopsis thaliana
  peptide (1)..(337): Ceres Seq. ID no. 12324459
  misc_feature (55)..(334): Pfam Name: Phosphate-induced protein 1 conserved region Pfam Description: Phosphate-induced protein 1 conserved region
  misc_feature (56)..(331): Homolog of NCBI NO: 15219504 NR Description: phosphate-induced (phi-1) protein, putative
  misc_feature (33)..(335): Homolog of NCBI NO: 34901824 NR Description: putative phi-1(phosphate-induced protein 1)
  misc_feature (33)..(337): Homolog of NCBI NO: 25408357 NR Description: hypothetical protein At2g35150 [imported] -
  misc_feature (33)..(337): Homolog of NCBI NO: 18403760 NR Description: Expressed protein
  misc_feature (1)..(337): Homolog of NCBI NO: 21594010 NR Description: unknown [Arabidopsis thaliana]
  misc_feature (1)..(337): Homolog of NCBI NO: 18398352 NR Description: expressed protein
  misc_feature (10)..(337): Homolog of NCBI NO: 11875173 NR Description: contains ESTs
  misc_feature (1)..(337): Homolog of NCBI NO: 21592873 NR Description: unknown [Arabidopsis thaliana]
  misc_feature (1)..(337): Homolog of NCBI NO: 16604527 NR Description: AT5g51550/K17N15_10 [Arabidopsis thaliana]
  misc_feature (1)..(337): Homolog of NCBI NO: 15242118 NR Description: putative protein
MHSLPVNLVLTVLTVFLTSPAQVIGYRPYPPKTNGSDQIFDASKKFEGSSNLVRLRYHMGPVLTNNITVHPIWYGTWQKSQKKIIREFINSISAVGSKHPSVSGWWKTVQLYTDQTGSNITGTVRLGEEKNDRFYSHGKSLTRLSIQSVIKSAVTSRSRPLPVNPKSGLYLLLTADDVYVQDFCGQVCGFHYFTFPSIVGFTLPYAWVGNSAKLCPGVCAYPFAVPAFIPGLKPVKSPNGDVGVDGMISVIAHEIAELATNPLVNAWYAGPDPVAPVEIADLCEGIYGTGGGGSYTGQMLNDHSGATYNVNGIRRRYLIQWLWSHVVSYCTGPNALD

SEQ ID NO: 22403 - protein, 279 aa, Arabidopsis thaliana
  peptide (1)..(279): Ceres Seq. ID no. 12324460
  misc_feature (1)..(276): Pfam Name: Phosphate-induced protein 1 conserved region Pfam Description: Phosphate-induced protein 1 conserved region
  misc_feature (1)..(273): Homolog of NCBI NO: 15219504 NR Description: phosphate-induced (phi-1) protein, putative
  misc_feature (1)..(277): Homolog of NCBI NO: 34901824 NR Description: putative phi-1(phosphate-induced protein 1)
  misc_feature (1)..(279): Homolog of NCBI NO: 25408357 NR Description: hypothetical protein At2g35150 [imported] -
  misc_feature (1)..(279): Homolog of NCBI NO: 18403760 NR Description: Expressed protein
  misc_feature (1)..(279): Homolog of NCBI NO: 21594010 NR Description: unknown [Arabidopsis thaliana]
  misc_feature (1)..(279): Homolog of NCBI NO: 18398352 NR Description: expressed protein
  misc_feature (1)..(279): Homolog of NCBI NO: 11875173 NR Description: contains ESTs
  misc_feature (1)..(279): Homolog of NCBI NO: 21592873 NR Description: unknown [Arabidopsis thaliana]
  misc_feature (1)..(279): Homolog of NCBI NO: 16604527 NR Description: AT5g51550/K17N15_10 [Arabidopsis thaliana]
  misc_feature (1)..(279): Homolog of NCBI NO: 15242118 NR Description: putative protein
MGPVLTNNITVHPIWYGTWQKSQKKIIREFINSISAVGSKHPSVSGWWKTVQLYTDQTGSNITGTVRLGEEKNDRFYSHGKSLTRLSIQSVIKSAVTSRSRPLPVNPKSGLYLLLTADDVYVQDFCGQVCGFHYFTFPSIVGFTLPYAWVGNSAKLCPGVCAYPFAVPAFIPGLKPVKSPNGDVGVDGMISVIAHEIAELATNPLVNAWYAGPDPVAPVEIADLCEGIYGTGGGGSYTGQMLNDHSGATYNVNGIRRRYLIQWLWSHVVSYCTGPNALD

SEQ ID NO: 22404 - DNA, 1258 bp, Arabidopsis thaliana
  misc_feature (1)..(1258): Ceres Seq. ID no. 13648379
  misc_feature: MA Experiment ID: 108434 Result: Up-regulated in Transcription
  misc_feature: MA Experiment 108434 PARAMETER Experiment Name: At_Root_Tips_cDNA_P Parameter: Tissue Value: Root Tips
  misc_feature: MA Experiment ID: 20000111 Result: Down-regulated in Transcription
  misc_feature: MA Experiment 20000111 PARAMETER Experiment Name: At_42deg_Heat_cDNA_P Parameter: Temperature (deg C) Value: 42 vs. 22
  misc_feature: MA Experiment 20000111 PARAMETER Experiment Name: At_42deg_Heat_cDNA_P Parameter: Timepoint (hr) Value: 6
  misc_feature: MA Experiment 20000111 PARAMETER Experiment Name: At_42deg_Heat_cDNA_P Parameter: Tissue Value: Aerial
  misc_feature: MA Experiment ID: 20000113 Result: Down-regulated in Transcription
  misc_feature: MA Experiment 20000113 PARAMETER Experiment Name: At_42deg_Heat_cDNA_P Parameter: Temperature (deg C) Value: 42 vs. 22
  misc_feature: MA Experiment 20000113 PARAMETER Experiment Name: At_42deg_Heat_cDNA_P Parameter: Timepoint (hr) Value: 8
  misc_feature: MA Experiment 20000113 PARAMETER Experiment Name: At_42deg_Heat_cDNA_P Parameter: Tissue Value: Aerial
  misc_feature: MA Experiment ID: 20000234 Result: Up-regulated in Transcription
  misc_feature: MA Experiment 20000234 PARAMETER Experiment Name: At_Siliques_P Parameter: Age (day) Value: 21
  misc_feature: MA Experiment 20000234 PARAMETER Experiment Name: At_Siliques_P Parameter: Organism Value: A. thaliana
  misc_feature: MA Experiment 20000234 PARAMETER Experiment Name: At_Siliques_P Parameter: Plant Line Value: WS
  misc_feature: MA Experiment 20000234 PARAMETER Experiment Name: At_Siliques_P Parameter: Tissue Value: Less Than 5mm Siliques vs. Whole Plant
  misc_feature: MA Experiment ID: 20000286 Result: Up-regulated in Transcription
  misc_feature: MA Experiment 20000286 PARAMETER Experiment Name: At_Open_Flower_P Parameter: Age (day) Value: 21
  misc_feature: MA Experiment 20000286 PARAMETER Experiment Name: At_Open_Flower_P Parameter: Plant Line Value: WS
  misc_feature: MA Experiment 20000286 PARAMETER Experiment Name: At_Open_Flower_P Parameter: Tissue Value: Half Open vs. Whole Plant
  misc_feature: MA Experiment ID: 20001451 Result: Down-regulated in Transcription
  misc_feature: MA Experiment 20001451 PARAMETER Experiment Name: At_Far-red-induction_P Parameter: Age (day) Value: 7
  misc_feature: MA Experiment 20001451 PARAMETER Experiment Name: At_Far-red-induction_P Parameter: Light Value: Far-red vs. White
  misc_feature: MA Experiment 20001451 PARAMETER Experiment Name: At_Far-red-induction_P Parameter: Organism Value: A. thaliana
  misc_feature: MA Experiment 20001451 PARAMETER Experiment Name: At_Far-red-induction_P Parameter: Plant Line Value: Columbia
  misc_feature: MA Experiment 20001451 PARAMETER Experiment Name: At_Far-red-induction_P Parameter: Timepoint (hr) Value: 24
  misc_feature: MA Experiment 20001451 PARAMETER Experiment Name: At_Far-red-induction_P Parameter: Tissue Value: Whole Plant
aagcaaaacaatcggagaaagttgatggaggagatgttcgttttgtgaacgcttcaatggcataaatttccggccatcacatttcttctactttctctttctctctcccttgttgttgttctctagaattcgattcatcgttgttaacgtcgtccattcttcttctttgatcccttctttgatctctcacatttccgattccaatttagggtttcctctcttttcacatttctagggtttttcttgttccctttgtaccggagatggtgaattgaaaggaaaaataaaacgcttttgagagcttatatttgaggttgtttcctcaagttttgtagatctgaggttgctatttttgaattagagattctttttttttttcaaaattttgtttgttgtgatcatacatagacgtacgtagctccatttctggtggagaaggaagaagaagagaaatgagcgcttcgaggttcataaagtgtgtcaccgttggcgacggagctgttggtaaaacctgtttgctgatttcttacaccagcaacacttttcctacggattatgtaccgactgttttcgataactttagcgcaaatgtggttgttaatggagccactgtgaatcttgggctatgggataccgcagggcaggaggattataacagattaagacctttgagttaccgcggtgctgatgttttcatcttagcattctctcttatcagtaaggctagttatgagaatgtctccaagaagtggatcccagagctgaagcattatgcccctggtgtccctatagttcttgttggaaccaaactagatcttcgggatgacaaacagttcttcattgaccaccctggcgctgtaccaattactactgctcagggagaggaactgaagaaactaattggagctcccgcatacatcgagtgcagttcaaaaacacaagagaacgtgaaaggagtatttgatgcagcgatccgagtggttcttcaacctccaaagcagaagaaaaagaaaagcaaagcacaaaaagcctgctccattttgtaatttctctacgcttctcttacgtatctctctctgtctctctgtctcttccactcttctagtgaaggcttaagaagaaaacacattgggcttaaaaattgttccagagttcgttgtgataagctctcttaatccttaaaaaaacgattatttctgtttattgatgaatagtttccagctttagctgagacctaatattgcacttaccacttctc

SEQ ID NO: 22405 - protein, 197 aa, Arabidopsis thaliana
  peptide (1)..(197): Ceres Seq. ID no. 13648380
  misc_feature (8)..(179): Pfam Name: Ras family Pfam Description: Ras family
  misc_feature (1)..(197): Homolog of NCBI NO: 4097581 NR Description: NTGP2 [Nicotiana tabacum]
  misc_feature (1)..(196): Homolog of NCBI NO: 27413411 NR Description: putative ROP family GTPase [Brassica napus]
  misc_feature (1)..(197): Homolog of NCBI NO: 20269985 NR Description: small G-protein ROP6 [Medicago truncatula]
  misc_feature (1)..(197): Homolog of NCBI NO: 14278856 NR Description: Rac-like GTPase 1 [Nicotiana tabacum]
  misc_feature (1)..(197): Homolog of NCBI NO: 2500199 NR Description: RAC-LIKE GTP BINDING PROTEIN RHO1
  misc_feature (1)..(197): Homolog of NCBI NO: 27413417 NR Description: putative ROP family GTPase [Brassica napus]
  misc_feature (1)..(197): Homolog of NCBI NO: 15230443 NR Description: GTP binding protein, putative [Arabidopsis
  misc_feature (1)..(197): Homolog of NCBI NO: 2500195 NR Description: RAC-LIKE GTP BINDING PROTEIN RHO1
  misc_feature (1)..(197): Homolog of NCBI NO: 15233418 NR Description: GTP-binding protein, putative [Arabidopsis
  misc_feature (1)..(197): Homolog of NCBI NO: 15227902 NR Description: Rac-like GTP-binding protein (ARAC1) [Arabidopsis
MSASRFIKCVTVGDGAVGKTCLLISYTSNTFPTDYVPTVFDNFSANVVVNGATVNLGLWDTAGQEDYNRLRPLSYRGADVFILAFSLISKASYENVSKKWIPELKHYAPGVPIVLVGTKLDLRDDKQFFIDHPGAVPITTAQGEELKKLIGAPAYIECSSKTQENVKGVFDAAIRVVLQPPKQKKKKSKAQKACSIL

SEQ ID NO: 22406 - DNA, 1277 bp, Arabidopsis thaliana
  misc_feature (1)..(1277): Ceres Seq. ID no. 13490586
  misc_feature: MA Experiment ID: 108434 Result: Down-regulated in Transcription
  misc_feature: MA Experiment 108434 PARAMETER Experiment Name: At_Root_Tips_cDNA_P Parameter: Tissue Value: Root Tips
  misc_feature: MA Experiment ID: 108464 Result: Up-regulated in Transcription
  misc_feature: MA Experiment 108464 PARAMETER Experiment Name: At_Germinating_Seeds_cDNA_P Parameter: Age (day) Value: 4 vs. 0
  misc_feature: MA Experiment 108464 PARAMETER Experiment Name: At_Germinating_Seeds_cDNA_P Parameter: Tissue Value: Germinating Seeds
  misc_feature: MA Experiment ID: 108573 Result: Up-regulated in Transcription
  misc_feature: MA Experiment 108573 PARAMETER Experiment Name: At_Drought_cDNA_P Parameter: Timepoint (hr) Value: 6
  misc_feature: MA Experiment 108573 PARAMETER Experiment Name: At_Drought_cDNA_P Parameter: Tissue Value: Aerial
  misc_feature: MA Experiment 108573 PARAMETER Experiment Name: At_Drought_cDNA_P Parameter: Treatment Value: Drought vs. No Drought
  misc_feature: MA Experiment ID: 108579 Result: Up-regulated in Transcription
  misc_feature: MA Experiment 108579 PARAMETER Experiment Name: At_4deg_Cold_cDNA_P Parameter: Temperature (deg C) Value: 4 vs. 22
  misc_feature: MA Experiment 108579 PARAMETER Experiment Name: At_4deg_Cold_cDNA_P Parameter: Timepoint (hr) Value: 6
  misc_feature: MA Experiment 108579 PARAMETER Experiment Name: At_4deg_Cold_cDNA_P Parameter: Tissue Value: Aerial
  misc_feature: MA Experiment ID: 20000069 Result: Up-regulated in Transcription
  misc_feature: MA Experiment 20000069 PARAMETER Experiment Name: At_100uM_ABA_Mutants_cDNA_P Parameter: Plant Line Value: CS23
  misc_feature: MA Experiment 20000069 PARAMETER Experiment Name: At_100uM_ABA_Mutants_cDNA_P Parameter: Timepoint (hr) Value: 6
  misc_feature: MA Experiment 20000069 PARAMETER Experiment Name: At_100uM_ABA_Mutants_cDNA_P Parameter: Tissue Value: Aerial
  misc_feature: MA Experiment 20000069 PARAMETER Experiment Name: At_100uM_ABA_Mutants_cDNA_P Parameter: Treatment Value: 100uM ABA vs. No Treatment
  misc_feature: MA Experiment ID: 20000070 Result: Up-regulated in Transcription
  misc_feature: MA Experiment 20000070 PARAMETER Experiment Name: At_100uM_ABA_Mutants_cDNA_P Parameter: Plant Line Value: CS24
  misc_feature: MA Experiment 20000070 PARAMETER Experiment Name: At_100uM_ABA_Mutants_cDNA_P Parameter: Timepoint (hr) Value: 6
  misc_feature: MA Experiment 20000070 PARAMETER Experiment Name: At_100uM_ABA_Mutants_cDNA_P Parameter: Tissue Value: Aerial
  misc_feature: MA Experiment 20000070 PARAMETER Experiment Name: At_100uM_ABA_Mutants_cDNA_P Parameter: Treatment Value: 100uM ABA vs. No Treatment
  misc_feature: MA Experiment ID: 20000071 Result: Up-regulated in Transcription
  misc_feature: MA Experiment 20000071 PARAMETER Experiment Name: At_100uM_ABA_Mutants_cDNA_P Parameter: Plant Line Value: CS8104
  misc_feature: MA Experiment 20000071 PARAMETER Experiment Name: At_100uM_ABA_Mutants_cDNA_P Parameter: Timepoint (hr) Value: 6
  misc_feature: MA Experiment 20000071 PARAMETER Experiment Name: At_100uM_ABA_Mutants_cDNA_P Parameter: Tissue Value: Aerial
  misc_feature: MA Experiment 20000071 PARAMETER Experiment Name: At_100uM_ABA_Mutants_cDNA_P Parameter: Treatment Value: 100uM ABA vs. No Treatment
  misc_feature: MA Experiment ID: 20000072 Result: Up-regulated in Transcription
  misc_feature: MA Experiment 20000072 PARAMETER Experiment Name: At_100uM_ABA_Mutants_cDNA_P Parameter: Plant Line Value: CS8105
  misc_feature: MA Experiment 20000072 PARAMETER Experiment Name: At_100uM_ABA_Mutants_cDNA_P Parameter: Timepoint (hr) Value: 6
  misc_feature: MA Experiment 20000072 PARAMETER Experiment Name: At_100uM_ABA_Mutants_cDNA_P Parameter: Tissue Value: Aerial
  misc_feature: MA Experiment 20000072 PARAMETER Experiment Name: At_100uM_ABA_Mutants_cDNA_P Parameter: Treatment Value: 100uM ABA vs. No Treatment
  misc_feature: MA Experiment ID: 20000086 Result: Up-regulated in Transcription
  misc_feature: MA Experiment 20000086 PARAMETER Experiment Name: At_100uM_ABA_Mutants_cDNA_P Parameter: Plant Line Value: CS22
  misc_feature: MA Experiment 20000086 PARAMETER Experiment Name: At_100uM_ABA_Mutants_cDNA_P Parameter: Timepoint (hr) Value: 6
  misc_feature: MA Experiment 20000086 PARAMETER Experiment Name: At_100uM_ABA_Mutants_cDNA_P Parameter: Tissue Value: Aerial
  misc_feature: MA Experiment 20000086 PARAMETER Experiment Name: At_100uM_ABA_Mutants_cDNA_P Parameter: Treatment Value: 100uM ABA vs. No Treatment
  misc_feature: MA Experiment ID: 20000087 Result: Up-regulated in Transcription
  misc_feature: MA Experiment 20000087 PARAMETER Experiment Name: At_100uM_ABA_Mutants_cDNA_P Parameter: Plant Line Value: WS
  misc_feature: MA Experiment 20000087 PARAMETER Experiment Name: At_100uM_ABA_Mutants_cDNA_P Parameter: Timepoint (hr) Value: 6
  misc_feature: MA Experiment 20000087 PARAMETER Experiment Name: At_100uM_ABA_Mutants_cDNA_P Parameter: Tissue Value: Aerial
  misc_feature: MA Experiment 20000087 PARAMETER Experiment Name: At_100uM_ABA_Mutants_cDNA_P Parameter: Treatment Value: 100uM ABA vs. No Treatment
  misc_feature: MA Experiment ID: 20000088 Result: Up-regulated in Transcription
  misc_feature: MA Experiment 20000088 PARAMETER Experiment Name: At_100uM_ABA_Mutants_cDNA_P Parameter: Plant Line Value: Landsberg
  misc_feature: MA Experiment 20000088 PARAMETER Experiment Name: At_100uM_ABA_Mutants_cDNA_P Parameter: Timepoint (hr) Value: 6
  misc_feature: MA Experiment 20000088 PARAMETER Experiment Name: At_100uM_ABA_Mutants_cDNA_P Parameter: Tissue Value: Aerial
  misc_feature: MA Experiment 20000088 PARAMETER Experiment Name: At_100uM_ABA_Mutants_cDNA_P Parameter: Treatment Value: 100uM ABA vs. No Treatment
  misc_feature: MA Experiment ID: 20000089 Result: Up-regulated in Transcription
  misc_feature: MA Experiment ID: 20000090 Result: Up-regulated in Transcription
  misc_feature: MA Experiment ID: 20000117 Result: Up-regulated in Transcription
  misc_feature: MA Experiment 20000117 PARAMETER Experiment Name: At_100uM_ABA_Mutants_cDNA_P Parameter: Plant Line Value: Columbia
  misc_feature: MA Experiment 20000117 PARAMETER Experiment Name: At_100uM_ABA_Mutants_cDNA_P Parameter: Timepoint (hr) Value: 6
  misc_feature: MA Experiment 20000117 PARAMETER Experiment Name: At_100uM_ABA_Mutants_cDNA_P Parameter: Tissue Value: Aerial
  misc_feature: MA Experiment 20000117 PARAMETER Experiment Name: At_100uM_ABA_Mutants_cDNA_P Parameter: Treatment Value: 100uM ABA vs. No Treatment
  misc_feature: MA Experiment ID: 20000171 Result: Up-regulated in Transcription
  misc_feature: MA Experiment 20000171 PARAMETER Experiment Name: At_42deg_Heat_P Parameter: Age (day) Value: 14
  misc_feature: MA Experiment 20000171 PARAMETER Experiment Name: At_42deg_Heat_P Parameter: Organism Value: A. thaliana
  misc_feature: MA Experiment 20000171 PARAMETER Experiment Name: At_42deg_Heat_P Parameter: Plant Line Value: WS
  misc_feature: MA Experiment 20000171 PARAMETER Experiment Name: At_42deg_Heat_P Parameter: Temperature (deg C) Value: 42 vs. 22
  misc_feature: MA Experiment 20000171 PARAMETER Experiment Name: At_42deg_Heat_P Parameter: Timepoint (hr) Value: 1
  misc_feature: MA Experiment 20000171 PARAMETER Experiment Name: At_42deg_Heat_P Parameter: Tissue Value: Aerial
  misc_feature: MA Experiment ID: 20000185 Result: Down-regulated in Transcription
  misc_feature: MA Experiment 20000185 PARAMETER Experiment Name: At_Roots__P Parameter: Age (day) Value: 7 vs. 21
  misc_feature: MA Experiment 20000185 PARAMETER Experiment Name: At_Roots__P Parameter: Organism Value: A. thaliana
  misc_feature: MA Experiment 20000185 PARAMETER Experiment Name: At_Roots__P Parameter: Tissue Value: Roots vs. Whole Plant
  misc_feature: MA Experiment ID: 20000213 Result: Up-regulated in Transcription
  misc_feature: MA Experiment 20000213 PARAMETER Experiment Name: At_4deg_Cold_P Parameter: Timepoint (hr) Value: 2
  misc_feature: MA Experiment ID: 20000224 Result: Down-regulated in Transcription
  misc_feature: MA Experiment ID: 20000265 Result: Down-regulated in Transcription
  misc_feature: MA Experiment 20000265 PARAMETER Experiment Name: At_Open_Flower_P Parameter: Age (day) Value: 21
  misc_feature: MA Experiment 20000265 PARAMETER Experiment Name: At_Open_Flower_P Parameter: Plant Line Value: WS
  misc_feature: MA Experiment 20000265 PARAMETER Experiment Name: At_Open_Flower_P Parameter: Tissue Value: Closed Flower vs. Whole Plant
  misc_feature: MA Experiment ID: 20000286 Result: Down-regulated in Transcription
  misc_feature: MA Experiment 20000286 PARAMETER Experiment Name: At_Open_Flower_P Parameter: Age (day) Value: 21
  misc_feature: MA Experiment 20000286 PARAMETER Experiment Name: At_Open_Flower_P Parameter: Plant Line Value: WS
  misc_feature: MA Experiment 20000286 PARAMETER Experiment Name: At_Open_Flower_P Parameter: Tissue Value: Half Open vs. Whole Plant
  misc_feature: MA Experiment ID: 20000437 Result: Up-regulated in Transcription
  misc_feature: MA Experiment 20000437 PARAMETER Experiment Name: At_Drought_P Parameter: Age (day) Value: 8
  misc_feature: MA Experiment 20000437 PARAMETER Experiment Name: At_Drought_P Parameter: Organism Value: A. thaliana
  misc_feature: MA Experiment 20000437 PARAMETER Experiment Name: At_Drought_P Parameter: Plant Line Value: WS
  misc_feature: MA Experiment 20000437 PARAMETER Experiment Name: At_Drought_P Parameter: Timepoint (hr) Value: 24
  misc_feature: MA Experiment 20000437 PARAMETER Experiment Name: At_Drought_P Parameter: Tissue Value: Whole Plant
  misc_feature: MA Experiment 20000437 PARAMETER Experiment Name: At_Drought_P Parameter: Treatment Value: Drought vs. No Drought
  misc_feature: MA Experiment ID: 20000438 Result: Down-regulated in Transcription
  misc_feature: MA Experiment 20000438 PARAMETER Experiment Name: At_Shoots__P Parameter: Age (day) Value: 14
  misc_feature: MA Experiment 20000438 PARAMETER Experiment Name: At_Shoots__P Parameter: Tissue Value: Shoots vs. Whole Plant
  misc_feature: MA Experiment ID: 20000439 Result: Down-regulated in Transcription
  misc_feature: MA Experiment 20000439 PARAMETER Experiment Name: At_Roots__P Parameter: Age (day) Value: 14 vs. 21
  misc_feature: MA Experiment 20000439 PARAMETER Experiment Name: At_Roots__P Parameter: Organism Value: A. thaliana
  misc_feature: MA Experiment 20000439 PARAMETER Experiment Name: At_Roots__P Parameter: Tissue Value: Roots vs. Whole Plant
  misc_feature: MA Experiment ID: 20000456 Result: Down-regulated in Transcription
  misc_feature: MA Experiment 20000456 PARAMETER Experiment Name: At_100uM_BA_P Parameter: Age (day) Value: 14
  misc_feature: MA Experiment 20000456 PARAMETER Experiment Name: At_100uM_BA_P Parameter: Organism Value: A. thaliana
  misc_feature: MA Experiment 20000456 PARAMETER Experiment Name: At_100uM_BA_P Parameter: Plant Line Value: WS
  misc_feature: MA Experiment 20000456 PARAMETER Experiment Name: At_100uM_BA_P Parameter: Timepoint (hr) Value: 6
  misc_feature: MA Experiment 20000456 PARAMETER Experiment Name: At_100uM_BA_P Parameter: Tissue Value: Aerial
  misc_feature: MA Experiment 20000456 PARAMETER Experiment Name: At_100uM_BA_P Parameter: Treatment Value: 100uM BA vs. No Treatment
  misc_feature: MA Experiment ID: 20000495 Result: Down-regulated in Transcription
  misc_feature: MA Experiment 20000495 PARAMETER Experiment Name: At_Guard_Cells_P Parameter: Harvest Date Value: 8/2/2002
  misc_feature: MA Experiment 20000495 PARAMETER Experiment Name: At_Guard_Cells_P Parameter: Organism Value: A. thaliana
  misc_feature: MA Experiment 20000495 PARAMETER Experiment Name: At_Guard_Cells_P Parameter: Tissue Value: Guard Cells vs. Leaves
  misc_feature: MA Experiment ID: 20000527 Result: Up-regulated in Transcription
  misc_feature: MA Experiment 20000527 PARAMETER Experiment Name: At_10percent_PEG_P Parameter: Age (day) Value: 20
  misc_feature: MA Experiment 20000527 PARAMETER Experiment Name: At_10percent_PEG_P Parameter: Organism Value: A. thaliana
  misc_feature: MA Experiment 20000527 PARAMETER Experiment Name: At_10percent_PEG_P Parameter: Plant Line Value: WS
  misc_feature: MA Experiment 20000527 PARAMETER Experiment Name: At_10percent_PEG_P Parameter: Timepoint (day) Value: 20
  misc_feature: MA Experiment 20000527 PARAMETER Experiment Name: At_10percent_PEG_P Parameter: Tissue Value: Whole Plant
  misc_feature: MA Experiment 20000527 PARAMETER Experiment Name: At_10percent_PEG_P Parameter: Treatment Value: 10percent PEG vs. No Treatment
  misc_feature: MA Experiment ID: 20001248 Result: Up-regulated in Transcription
  misc_feature: MA Experiment 20001248 PARAMETER Experiment Name: At_Far-red-induction_P Parameter: Age (day) Value: 7
  misc_feature: MA Experiment 20001248 PARAMETER Experiment Name: At_Far-red-induction_P Parameter: Light Value: Far-red vs. White
  misc_feature: MA Experiment 20001248 PARAMETER Experiment Name: At_Far-red-induction_P Parameter: Organism Value: A. thaliana
  misc_feature: MA Experiment 20001248 PARAMETER Experiment Name: At_Far-red-induction_P Parameter: Plant Line Value: Columbia
  misc_feature: MA Experiment 20001248 PARAMETER Experiment Name: At_Far-red-induction_P Parameter: Timepoint (hr) Value: 4
  misc_feature: MA Experiment 20001248 PARAMETER Experiment Name: At_Far-red-induction_P Parameter: Tissue Value: Whole Plant
  misc_feature: MA Experiment ID: 20001451 Result: Up-regulated in Transcription
  misc_feature: MA Experiment 20001451 PARAMETER Experiment Name: At_Far-red-induction_P Parameter: Age (day) Value: 7
  misc_feature: MA Experiment 20001451 PARAMETER Experiment Name: At_Far-red-induction_P Parameter: Light Value: Far-red vs. White
  misc_feature: MA Experiment 20001451 PARAMETER Experiment Name: At_Far-red-induction_P Parameter: Organism Value: A. thaliana
  misc_feature: MA Experiment 20001451 PARAMETER Experiment Name: At_Far-red-induction_P Parameter: Plant Line Value: Columbia
  misc_feature: MA Experiment 20001451 PARAMETER Experiment Name: At_Far-red-induction_P Parameter: Timepoint (hr) Value: 24
  misc_feature: MA Experiment 20001451 PARAMETER Experiment Name: At_Far-red-induction_P Parameter: Tissue Value: Whole Plant
  misc_feature: MA Experiment ID: 20001557 Result: Up-regulated in Transcription
  misc_feature: MA Experiment 20001557 PARAMETER Experiment Name: At_Drought_Soil_Dry_P Parameter: Age (day) Value: 27
  misc_feature: MA Experiment 20001557 PARAMETER Experiment Name: At_Drought_Soil_Dry_P Parameter: Organism Value: A. thaliana
  misc_feature: MA Experiment 20001557 PARAMETER Experiment Name: At_Drought_Soil_Dry_P Parameter: Plant Line Value: WS
  misc_feature: MA Experiment 20001557 PARAMETER Experiment Name: At_Drought_Soil_Dry_P Parameter: Post Timepoint (hr) Value: 3
  misc_feature: MA Experiment 20001557 PARAMETER Experiment Name: At_Drought_Soil_Dry_P Parameter: Post-Treatment Value: Re-Water vs. No Drought
  misc_feature: MA Experiment 20001557 PARAMETER Experiment Name: At_Drought_Soil_Dry_P Parameter: Timepoint (day) Value: 13
  misc_feature: MA Experiment 20001557 PARAMETER Experiment Name: At_Drought_Soil_Dry_P Parameter: Treatment Value: Drought vs. No Drought
  misc_feature: MA Experiment ID: 20001904 Result: Down-regulated in Transcription
  misc_feature: MA Experiment 20001904 PARAMETER Experiment Name: At_Drought_Reproduction_P Parameter: Age (day) Value: 37
  misc_feature: MA Experiment 20001904 PARAMETER Experiment Name: At_Drought_Reproduction_P Parameter: Organism Value: A. thaliana
  misc_feature: MA Experiment 20001904 PARAMETER Experiment Name: At_Drought_Reproduction_P Parameter: Plant Line Value: WS
  misc_feature: MA Experiment 20001904 PARAMETER Experiment Name: At_Drought_Reproduction_P Parameter: Timepoint (day) Value: 7
  misc_feature: MA Experiment 20001904 PARAMETER Experiment Name: At_Drought_Reproduction_P Parameter: Tissue Value: Rosettes
  misc_feature: MA Experiment 20001904 PARAMETER Experiment Name: At_Drought_Reproduction_P Parameter: Treatment Value: Drought vs. No Drought
ctctccactctctcaatctcttaacttaaacaaaaccaacaattatcaatcttcaatgacgcatctcaacaaaaaacagaggttagagaataaccataacaatactgtgaacaaccatttcgaagacttacatgacgatctcatcatctctatcctccgcaaactcgctacctccgcttcttctccttccgatttcctcaccgttctctccacatgcaagagattgaatcggttaggattacatcctctggttttatctaaagccggtactcaaaccctagccgtcacggcggagaaatggtcagattcttctcataaattcctcaaactctgtgttaatgccggaaacatcgacgcttcgtactctctcggaatgatccgattttactgtctacaaaatccagtgagcggcgcgtcattaatggctaaagcggcgattaaatcacacgcgccggcgctttattcgttatcggtgattcagtttaacggaagcggcggttcaaaaaccgataagaatctacgcgccggcgttgctctttgtgcacgctctgcttatttaggccacgtcgatgcgttacgagagcttggtcactgtcttcaagacggttacggtgttcctcgtgacgtctccgaaggtcgtcgtcttttgattcaagctaacgcgcgtgagctcgcgtgttctctacgctcttacctctctctgaaatctggggacgagaacgagaccttaactgatttaagcgtggttccggttcaggagattcatccggttaaccggtttttaaaagagtggtttagttcgggtcgggttgatttagcggaagggttaaggatgtgttcgcatggtggttgtggaaggccggagactcgggctcatgagtttcggcgatgttctgtttgtgggaaggttaattattgctcgcgtggttgtcaggcgttggattggagagcgaagcataaggttgaatgtacgccgttggatttgtgggttgcggcagcggcggagattggcgacgacggtgaagcggtggcggtggagattgatgataatcatggtgagcggtaacggctctaacgctttttttcaaggaaatgactgaaatgccaacagtttctttgactgttgagtttttttttttttttgggttatttaattatgttttaaaaaatttaatgttaatttcttctcttaattaattagttttggctaatggcgtttctgaatcttctgatactaaactggcatgttattttaaataatatagttttttgccgtt

SEQ ID NO: 22407 - protein, 354 aa, Arabidopsis thaliana
  peptide (1)..(354): Ceres Seq. ID no. 13490587
  misc_feature (279)..(323): Pfam Name: MYND finger Pfam Description: MYND finger
  misc_feature (266)..(335): Homolog of NCBI NO: 19386803 NR Description: OJ1485_B09.11 [Oryza sativa (japonica
  misc_feature (38)..(267): Homolog of NCBI NO: 19386803 NR Description: OJ1485_B09.11 [Oryza sativa (japonica
  misc_feature (267)..(344): Homolog of NCBI NO: 32489984 NR Description: OSJNBa0044M19.1 [Oryza sativa (japonica
  misc_feature (37)..(267): Homolog of NCBI NO: 32489984 NR Description: OSJNBa0044M19.1 [Oryza sativa (japonica
  misc_feature (243)..(350): Homolog of NCBI NO: 18408746 NR Description: F-box protein family [Arabidopsis thaliana]
  misc_feature (33)..(236): Homolog of NCBI NO: 18408746 NR Description: F-box protein family [Arabidopsis thaliana]
  misc_feature (19)..(354): Homolog of NCBI NO: 15240674 NR Description: expressed protein [Arabidopsis thaliana]
SPLSQSLNLNKTNNYQSSMTHLNKKQRLENNHNNTVNNHFEDLHDDLIISILRKLATSASSPSDFLTVLSTCKRLNRLGLHPLVLSKAGTQTLAVTAEKWSDSSHKFLKLCVNAGNIDASYSLGMIRFYCLQNPVSGASLMAKAAIKSHAPALYSLSVIQFNGSGGSKTDKNLRAGVALCARSAYLGHVDALRELGHCLQDGYGVPRDVSEGRRLLIQANARELACSLRSYLSLKSGDENETLTDLSVVPVQEIHPVNRFLKEWFSSGRVDLAEGLRMCSHGGCGRPETRAHEFRRCSVCGKVNYCSRGCQALDWRAKHKVECTPLDLWVAAAAEIGDDGEAVAVEIDDNHGER

SEQ ID NO: 22408 - protein, 336 aa, Arabidopsis thaliana
  peptide (1)..(336): Ceres Seq. ID no. 13490588
  misc_feature (261)..(305): Pfam Name: MYND finger Pfam Description: MYND finger
  misc_feature (248)..(317): Homolog of NCBI NO: 19386803 NR Description: OJ1485_B09.11 [Oryza sativa (japonica
  misc_feature (20)..(249): Homolog of NCBI NO: 19386803 NR Description: OJ1485_B09.11 [Oryza sativa (japonica
  misc_feature (249)..(326): Homolog of NCBI NO: 32489984 NR Description: OSJNBa0044M19.1 [Oryza sativa (japonica
  misc_feature (19)..(249): Homolog of NCBI NO: 32489984 NR Description: OSJNBa0044M19.1 [Oryza sativa (japonica
  misc_feature (225)..(332): Homolog of NCBI NO: 18408746 NR Description: F-box protein family [Arabidopsis thaliana]
  misc_feature (15)..(218): Homolog of NCBI NO: 18408746 NR Description: F-box protein family [Arabidopsis thaliana]
  misc_feature (1)..(336): Homolog of NCBI NO: 15240674 NR Description: expressed protein [Arabidopsis thaliana]
MTHLNKKQRLENNHNNTVNNHFEDLHDDLIISILRKLATSASSPSDFLTVLSTCKRLNRLGLHPLVLSKAGTQTLAVTAEKWSDSSHKFLKLCVNAGNIDASYSLGMIRFYCLQNPVSGASLMAKAAIKSHAPALYSLSVIQFNGSGGSKTDKNLRAGVALCARSAYLGHVDALRELGHCLQDGYGVPRDVSEGRRLLIQANARELACSLRSYLSLKSGDENETLTDLSVVPVQEIHPVNRFLKEWFSSGRVDLAEGLRMCSHGGCGRPETRAHEFRRCSVCGKVNYCSRGCQALDWRAKHKVECTPLDLWVAAAAEIGDDGEAVAVEIDDNHGER

SEQ ID NO: 22409 - protein, 230 aa, Arabidopsis thaliana
  peptide (1)..(230): Ceres Seq. ID no. 13490589
  misc_feature (155)..(199): Pfam Name: MYND finger Pfam Description: MYND finger
  misc_feature (142)..(211): Homolog of NCBI NO: 19386803 NR Description: OJ1485_B09.11 [Oryza sativa (japonica
  misc_feature (1)..(143): Homolog of NCBI NO: 19386803 NR Description: OJ1485_B09.11 [Oryza sativa (japonica
  misc_feature (143)..(220): Homolog of NCBI NO: 32489984 NR Description: OSJNBa0044M19.1 [Oryza sativa (japonica
  misc_feature (1)..(143): Homolog of NCBI NO: 32489984 NR Description: OSJNBa0044M19.1 [Oryza sativa (japonica
  misc_feature (119)..(226): Homolog of NCBI NO: 18408746 NR Description: F-box protein family [Arabidopsis thaliana]
  misc_feature (1)..(112): Homolog of NCBI NO: 18408746 NR Description: F-box protein family [Arabidopsis thaliana]
  misc_feature (1)..(230): Homolog of NCBI NO: 15240674 NR Description: expressed protein [Arabidopsis thaliana]
MIRFYCLQNPVSGASLMAKAAIKSHAPALYSLSVIQFNGSGGSKTDKNLRAGVALCARSAYLGHVDALRELGHCLQDGYGVPRDVSEGRRLLIQANARELACSLRSYLSLKSGDENETLTDLSVVPVQEIHPVNRFLKEWFSSGRVDLAEGLRMCSHGGCGRPETRAHEFRRCSVCGKVNYCSRGCQALDWRAKHKVECTPLDLWVAAAAEIGDDGEAVAVEIDDNHGER

SEQ ID NO: 22410 - DNA, 1060 bp, Arabidopsis thaliana
  misc_feature (1)..(1060): Ceres Seq. ID no. 13487931
  misc_feature: MA Experiment ID: 108577 Result: Down-regulated in Transcription
  misc_feature: MA Experiment 108577 PARAMETER Experiment Name: At_42deg_Heat_cDNA_P Parameter: Temperature (deg C) Value: 42 vs. 22
  misc_feature: MA Experiment 108577 PARAMETER Experiment Name: At_42deg_Heat_cDNA_P Parameter: Timepoint (hr) Value: 6
  misc_feature: MA Experiment 108577 PARAMETER Experiment Name: At_42deg_Heat_cDNA_P Parameter: Tissue Value: Aerial
  misc_feature: MA Experiment ID: 20000180 Result: Down-regulated in Transcription
  misc_feature: MA Experiment 20000180 PARAMETER Experiment Name: At_Germinating_Seeds_P Parameter: Age (hr) Value: 24 vs. 0
  misc_feature: MA Experiment 20000180 PARAMETER Experiment Name: At_Germinating_Seeds_P Parameter: Tissue Value: Germinating Seeds
  misc_feature: MA Experiment ID: 20000227 Result: Down-regulated in Transcription
  misc_feature: MA Experiment 20000227 PARAMETER Experiment Name: At_Root-Tips-vs-Tops_P Parameter: Tissue Value: Root Tips vs. Root Tops
  misc_feature: MA Experiment ID: 20000794 Result: Up-regulated in Transcription
  misc_feature: MA Experiment 20000794 PARAMETER Experiment Name: At_Petals_P Parameter: Age (day) Value: 23-25 days
  misc_feature: MA Experiment 20000794 PARAMETER Experiment Name: At_Petals_P Parameter: Plant Line Value: WS
  misc_feature: MA Experiment 20000794 PARAMETER Experiment Name: At_Petals_P Parameter: Tissue Value: Petals vs. Whole plant
  misc_feature: MA Experiment ID: 20001905 Result: Up-regulated in Transcription
  misc_feature: MA Experiment 20001905 PARAMETER Experiment Name: At_Drought_Reproduction_P Parameter: Age (day) Value: 40
  misc_feature: MA Experiment 20001905 PARAMETER Experiment Name: At_Drought_Reproduction_P Parameter: Organism Value: A. thaliana
  misc_feature: MA Experiment 20001905 PARAMETER Experiment Name: At_Drought_Reproduction_P Parameter: Plant Line Value: WS
  misc_feature: MA Experiment 20001905 PARAMETER Experiment Name: At_Drought_Reproduction_P Parameter: Timepoint (day) Value: 10
  misc_feature: MA Experiment 20001905 PARAMETER Experiment Name: At_Drought_Reproduction_P Parameter: Tissue Value: Rosettes
  misc_feature: MA Experiment 20001905 PARAMETER Experiment Name: At_Drought_Reproduction_P Parameter: Treatment Value: Drought vs. No Drought
aaaaatttgttcgattctcattcttcttctcacagtcgtaaaccctaaaaaaaaaaacagagaaatcaaatttcaatctcgaaggatctacaaagaagcatgacgaccggagatctcgttaatatccatcctactgagcttaaattcccctttgagttgaagaaacaaagttcgtgttcgatgcaattgaccaacaagacaactactcaatgtgtcgcttttaaggttaaaacaaccaatcctcgcaaatactgtgttcgtcctaacactggtgttgtcttgcccggtgattcctgcaatgttacagtgacgatgcaagcccagaaagaggcaccacttgatatgcaatgcaaagacaagttccttgttcagactgttgttgtctctgatggtactacttccaaagaagtcctcgctgaaatgttcaacaaggaggctggtagagtgattgaggatttcaaactgcgagttgtttacattcctgctaatcctccttcacctgtccctgaaggttctgaagaaggcaactctcctatggcttccctcaacgatattgcctctcaatctgcctcactctttgatgacgtgtcaagaacgtttgaagaaacaagtgagaaatcttcagaggcatggtctatgatttccaaattgacggaggagaagacttctgctactcaacaaagtcagaagctccgtctcgaactggaaatgctgaggaaagaaacaagcaagaagcagtcgggtggtcattccttgctcttgatgctgctggtgggtctgctcggttgcgtgattggctacttattgaaccggatataaacgccatggggttagcttcatcatccttttaatcatcaaatcttgcaaagttcttaagatttttgaccagattttcgtaaaatggaggtggtttttttttaaaagtttcatatttaagctgtaaaatcagtagctgtagcacaggaacaggtgtgattttgtggcaggtttcttgttattgatttaaacacactttcgagtctgtagtaagatctcaagagtcgttcttatgattggaatt

SEQ ID NO: 22411 - protein, 239 aa, Arabidopsis thaliana
  peptide (1)..(239): Ceres Seq. ID no. 13487932
  misc_feature (138)..(238): Homolog of NCBI NO: 37535894 NR Description: putative vesicle-associated membrane protein
  misc_feature (5)..(145): Homolog of NCBI NO: 37535894 NR Description: putative vesicle-associated membrane protein
  misc_feature (1)..(238): Homolog of NCBI NO: 11288305 NR Description: hypothetical protein T4C21.10 - Arabidopsis
  misc_feature (3)..(238): Homolog of NCBI NO: 15225415 NR Description: VAMP (vesicle-associated membrane
  misc_feature (1)..(238): Homolog of NCBI NO: 21554053 NR Description: putative VAMP-associated protein [Arabidopsis
  misc_feature (1)..(238): Homolog of NCBI NO: 18411661 NR Description: VAMP (vesicle-associated membrane
  misc_feature (4)..(238): Homolog of NCBI NO: 11288307 NR Description: 27k vesicle-associated membrane
  misc_feature (1)..(226): Homolog of NCBI NO: 7486542 NR Description: hypothetical protein F6N15.21 - Arabidopsis
  misc_feature (1)..(239): Homolog of NCBI NO: 21592874 NR Description: putative proline-rich protein [Arabidopsis
  misc_feature (1)..(239): Homolog of NCBI NO: 18411240 NR Description: VAMP (vesicle-associated membrane
MTTGDLVNIHPTELKFPFELKKQSSCSMQLTNKTTTQCVAFKVKTTNPRKYCVRPNTGVVLPGDSCNVTVTMQAQKEAPLDMQCKDKFLVQTVVVSDGTTSKEVLAEMFNKEAGRVIEDFKLRVVYIPANPPSPVPEGSEEGNSPMASLNDIASQSASLFDDVSRTFEETSEKSSEAWSMISKLTEEKTSATQQSQKLRLELEMLRKETSKKQSGGHSLLLMLLVGLLGCVIGYLLNRI

SEQ ID NO: 22412 - protein, 212 aa, Arabidopsis thaliana
  peptide (1)..(212): Ceres Seq. ID no. 13487933
  misc_feature (111)..(211): Homolog of NCBI NO: 37535894 NR Description: putative vesicle-associated membrane protein
  misc_feature (1)..(118): Homolog of NCBI NO: 37535894 NR Description: putative vesicle-associated membrane protein
  misc_feature (1)..(211): Homolog of NCBI NO: 11288305 NR Description: hypothetical protein T4C21.10 - Arabidopsis
  misc_feature (1)..(211): Homolog of NCBI NO: 15225415 NR Description: VAMP (vesicle-associated membrane
  misc_feature (1)..(211): Homolog of NCBI NO: 21554053 NR Description: putative VAMP-associated protein [Arabidopsis
  misc_feature (1)..(211): Homolog of NCBI NO: 18411661 NR Description: VAMP (vesicle-associated membrane
  misc_feature (1)..(211): Homolog of NCBI NO: 11288307 NR Description: 27k vesicle-associated membrane
  misc_feature (1)..(199): Homolog of NCBI NO: 7486542 NR Description: hypothetical protein F6N15.21 - Arabidopsis
  misc_feature (1)..(212): Homolog of NCBI NO: 21592874 NR Description: putative proline-rich protein [Arabidopsis
  misc_feature (1)..(212): Homolog of NCBI NO: 18411240 NR Description: VAMP (vesicle-associated membrane
MQLTNKTTTQCVAFKVKTTNPRKYCVRPNTGVVLPGDSCNVTVTMQAQKEAPLDMQCKDKFLVQTVVVSDGTTSKEVLAEMFNKEAGRVIEDFKLRVVYIPANPPSPVPEGSEEGNSPMASLNDIASQSASLFDDVSRTFEETSEKSSEAWSMISKLTEEKTSATQQSQKLRLELEMLRKETSKKQSGGHSLLLMLLVGLLGCVIGYLLNRI

SEQ ID NO: 22413 - protein, 168 aa, Arabidopsis thaliana
  peptide (1)..(168): Ceres Seq. ID no. 13487934
  misc_feature (67)..(167): Homolog of NCBI NO: 37535894 NR Description: putative vesicle-associated membrane protein
  misc_feature (1)..(74): Homolog of NCBI NO: 37535894 NR Description: putative vesicle-associated membrane protein
  misc_feature (1)..(167): Homolog of NCBI NO: 11288305 NR Description: hypothetical protein T4C21.10 - Arabidopsis
  misc_feature (1)..(167): Homolog of NCBI NO: 15225415 NR Description: VAMP (vesicle-associated membrane
  misc_feature (1)..(167): Homolog of NCBI NO: 21554053 NR Description: putative VAMP-associated protein [Arabidopsis
  misc_feature (1)..(167): Homolog of NCBI NO: 18411661 NR Description: VAMP (vesicle-associated membrane
  misc_feature (1)..(167): Homolog of NCBI NO: 11288307 NR Description: 27k vesicle-associated membrane
  misc_feature (1)..(155): Homolog of NCBI NO: 7486542 NR Description: hypothetical protein F6N15.21 - Arabidopsis
  misc_feature (1)..(168): Homolog of NCBI NO: 21592874 NR Description: putative proline-rich protein [Arabidopsis
  misc_feature (1)..(168): Homolog of NCBI NO: 18411240 NR Description: VAMP (vesicle-associated membrane
MQAQKEAPLDMQCKDKFLVQTVVVSDGTTSKEVLAEMFNKEAGRVIEDFKLRVVYIPANPPSPVPEGSEEGNSPMASLNDIASQSASLFDDVSRTFEETSEKSSEAWSMISKLTEEKTSATQQSQKLRLELEMLRKETSKKQSGGHSLLLMLLVGLLGCVIGYLLNRI

SEQ ID NO: 22414 - DNA, 1343 bp, Arabidopsis thaliana
  misc_feature (1)..(1343): Ceres Seq. ID no. 12325220
  misc_feature: MA Experiment ID: 108462 Result: Down-regulated in Transcription
  misc_feature: MA Experiment 108462 PARAMETER Experiment Name: At_Germinating_Seeds_cDNA_P Parameter: Age (day) Value: 2 vs. 0
  misc_feature: MA Experiment 108462 PARAMETER Experiment Name: At_Germinating_Seeds_cDNA_P Parameter: Tissue Value: Germinating Seeds
  misc_feature: MA Experiment ID: 108463 Result: Down-regulated in Transcription
  misc_feature: MA Experiment 108463 PARAMETER Experiment Name: At_Germinating_Seeds_cDNA_P Parameter: Age (day) Value: 3 vs. 0
  misc_feature: MA Experiment 108463 PARAMETER Experiment Name: At_Germinating_Seeds_cDNA_P Parameter: Tissue Value: Germinating Seeds
  misc_feature: MA Experiment ID: 108464 Result: Down-regulated in Transcription
  misc_feature: MA Experiment 108464 PARAMETER Experiment Name: At_Germinating_Seeds_cDNA_P Parameter: Age (day) Value: 4 vs. 0
  misc_feature: MA Experiment 108464 PARAMETER Experiment Name: At_Germinating_Seeds_cDNA_P Parameter: Tissue Value: Germinating Seeds
  misc_feature: MA Experiment ID: 108469 Result: Up-regulated in Transcription
  misc_feature: MA Experiment ID: 108488 Result: Up-regulated in Transcription
  misc_feature: MA Experiment ID: 108489 Result: Up-regulated in Transcription
  misc_feature: MA Experiment ID: 108585 Result: Up-regulated in Transcription
  misc_feature: MA Experiment 108585 PARAMETER Experiment Name: At_5mM_NaNP_cDNA_P Parameter: Timepoint (hr) Value: 6
  misc_feature: MA Experiment 108585 PARAMETER Experiment Name: At_5mM_NaNP_cDNA_P Parameter: Tissue Value: Aerial
  misc_feature: MA Experiment 108585 PARAMETER Experiment Name: At_5mM_NaNP_cDNA_P Parameter: Treatment Value: null
  misc_feature: MA Experiment ID: 108594 Result: Down-regulated in Transcription
  misc_feature: MA Experiment 108594 PARAMETER Experiment Name: At_Ler-rhl_Root_cDNA_P Parameter: Plant Line Value: null
  misc_feature: MA Experiment ID: 108595 Result: Up-regulated in Transcription
  misc_feature: MA Experiment 108595 PARAMETER Experiment Name: At_Ler-pi_Ovule_cDNA_P Parameter: Plant Line Value: null
  misc_feature: MA Experiment ID: 108668 Result: Up-regulated in Transcription
  misc_feature: MA Experiment 108668 PARAMETER Experiment Name: At_2mM_SA_cDNA_P Parameter: Plant Line Value: WS
  misc_feature: MA Experiment 108668 PARAMETER Experiment Name: At_2mM_SA_cDNA_P Parameter: Timepoint (hr) Value: 6
  misc_feature: MA Experiment 108668 PARAMETER Experiment Name: At_2mM_SA_cDNA_P Parameter: Treatment Value: 2mM SA vs. No Treatment
  misc_feature: MA Experiment ID: 20000179 Result: Up-regulated in Transcription
  misc_feature: MA Experiment 20000179 PARAMETER Experiment Name: At_Germinating_Seeds_P Parameter: Age (hr) Value: 6 vs. 0
  misc_feature: MA Experiment 20000179 PARAMETER Experiment Name: At_Germinating_Seeds_P Parameter: Tissue Value: Germinating Seeds
  misc_feature: MA Experiment ID: 20000182 Result: Up-regulated in Transcription
  misc_feature: MA Experiment 20000182 PARAMETER Experiment Name: At_2mM_SA_P Parameter: Age (day) Value: 14
  misc_feature: MA Experiment 20000182 PARAMETER Experiment Name: At_2mM_SA_P Parameter: Organism Value: A. thaliana
  misc_feature: MA Experiment 20000182 PARAMETER Experiment Name: At_2mM_SA_P Parameter: Plant Line Value: WS
  misc_feature: MA Experiment 20000182 PARAMETER Experiment Name: At_2mM_SA_P Parameter: Timepoint (hr) Value: 6
  misc_feature: MA Experiment 20000182 PARAMETER Experiment Name: At_2mM_SA_P Parameter: Tissue Value: Aerial
  misc_feature: MA Experiment 20000182 PARAMETER Experiment Name: At_2mM_SA_P Parameter: Treatment Value: 2mM SA vs. No Treatment
  misc_feature: MA Experiment ID: 20000184 Result: Down-regulated in Transcription
  misc_feature: MA Experiment 20000184 PARAMETER Experiment Name: At_Shoots__P Parameter: Age (day) Value: 7
  misc_feature: MA Experiment 20000184 PARAMETER Experiment Name: At_Shoots__P Parameter: Tissue Value: Shoots vs. Whole Plant
  misc_feature: MA Experiment ID: 20000185 Result: Up-regulated in Transcription
  misc_feature: MA Experiment 20000185 PARAMETER Experiment Name: At_Roots__P Parameter: Age (day) Value: 7 vs. 21
  misc_feature: MA Experiment 20000185 PARAMETER Experiment Name: At_Roots__P Parameter: Organism Value: A. thaliana
  misc_feature: MA Experiment 20000185 PARAMETER Experiment Name: At_Roots__P Parameter: Tissue Value: Roots vs. Whole Plant
  misc_feature: MA Experiment ID: 20000234 Result: Up-regulated in Transcription
  misc_feature: MA Experiment 20000234 PARAMETER Experiment Name: At_Siliques_P Parameter: Age (day) Value: 21
  misc_feature: MA Experiment 20000234 PARAMETER Experiment Name: At_Siliques_P Parameter: Organism Value: A. thaliana
  misc_feature: MA Experiment 20000234 PARAMETER Experiment Name: At_Siliques_P Parameter: Plant Line Value: WS
  misc_feature: MA Experiment 20000234 PARAMETER Experiment Name: At_Siliques_P Parameter: Tissue Value: Less Than 5mm Siliques vs. Whole Plant
  misc_feature: MA Experiment ID: 20000437 Result: Down-regulated in Transcription
  misc_feature: MA Experiment 20000437 PARAMETER Experiment Name: At_Drought_P Parameter: Age (day) Value: 8
  misc_feature: MA Experiment 20000437 PARAMETER Experiment Name: At_Drought_P Parameter: Organism Value: A. thaliana
  misc_feature: MA Experiment 20000437 PARAMETER Experiment Name: At_Drought_P Parameter: Plant Line Value: WS
  misc_feature: MA Experiment 20000437 PARAMETER Experiment Name: At_Drought_P Parameter: Timepoint (hr) Value: 24
  misc_feature: MA Experiment 20000437 PARAMETER Experiment Name: At_Drought_P Parameter: Tissue Value: Whole Plant
  misc_feature: MA Experiment 20000437 PARAMETER Experiment Name: At_Drought_P Parameter: Treatment Value: Drought vs. No Drought
  misc_feature: MA Experiment ID: 20000439 Result: Up-regulated in Transcription
  misc_feature: MA Experiment 20000439 PARAMETER Experiment Name: At_Roots__P Parameter: Age (day) Value: 14 vs. 21
  misc_feature: MA Experiment 20000439 PARAMETER Experiment Name: At_Roots__P Parameter: Organism Value: A. thaliana
  misc_feature: MA Experiment 20000439 PARAMETER Experiment Name: At_Roots__P Parameter: Tissue Value: Roots vs. Whole Plant
  misc_feature: MA Experiment ID: 20000451 Result: Up-regulated in Transcription
  misc_feature: MA Experiment 20000451 PARAMETER Experiment Name: At_CS6879_Shoots-Roots_P Parameter: Age (day) Value: 14
  misc_feature: MA Experiment 20000451 PARAMETER Experiment Name: At_CS6879_Shoots-Roots_P Parameter: Organism Value: A. thaliana
  misc_feature: MA Experiment 20000451 PARAMETER Experiment Name: At_CS6879_Shoots-Roots_P Parameter: Plant Line Value: CS6879 vs. WS
  misc_feature: MA Experiment 20000451 PARAMETER Experiment Name: At_CS6879_Shoots-Roots_P Parameter: Tissue Value: Roots
  misc_feature: MA Experiment ID: 20000452 Result: Up-regulated in Transcription
  misc_feature: MA Experiment 20000452 PARAMETER Experiment Name: At_CS6879_Shoots-Roots_P Parameter: Age (day) Value: 14
  misc_feature: MA Experiment 20000452 PARAMETER Experiment Name: At_CS6879_Shoots-Roots_P Parameter: Organism Value: A. thaliana
  misc_feature: MA Experiment 20000452 PARAMETER Experiment Name: At_CS6879_Shoots-Roots_P Parameter: Plant Line Value: CS6879 vs. WS
  misc_feature: MA Experiment 20000452 PARAMETER Experiment Name: At_CS6879_Shoots-Roots_P Parameter: Tissue Value: Shoots
  misc_feature: MA Experiment ID: 20000495 Result: Up-regulated in Transcription
  misc_feature: MA Experiment 20000495 PARAMETER Experiment Name: At_Guard_Cells_P Parameter: Harvest Date Value: 8/2/2002
  misc_feature: MA Experiment 20000495 PARAMETER Experiment Name: At_Guard_Cells_P Parameter: Organism Value: A. thaliana
  misc_feature: MA Experiment 20000495 PARAMETER Experiment Name: At_Guard_Cells_P Parameter: Tissue Value: Guard Cells vs. Leaves
  misc_feature: MA Experiment ID: 20000573 Result: Up-regulated in Transcription
  misc_feature: MA Experiment 20000573 PARAMETER Experiment Name: At_100uM_ABA_Mutants__P Parameter: Organism Value: A. thaliana
  misc_feature: MA Experiment 20000573 PARAMETER Experiment Name: At_100uM_ABA_Mutants__P Parameter: Plant Line Value: CS22 vs. Ler wt
  misc_feature: MA Experiment 20000573 PARAMETER Experiment Name: At_100uM_ABA_Mutants__P Parameter: Timepoint (hr) Value: N/A
  misc_feature: MA Experiment 20000573 PARAMETER Experiment Name: At_100uM_ABA_Mutants__P Parameter: Tissue Value: Whole Plant
  misc_feature: MA Experiment 20000573 PARAMETER Experiment Name: At_100uM_ABA_Mutants__P Parameter: Treatment Value: None
  misc_feature: MA Experiment ID: 20000574 Result: Up-regulated in Transcription
  misc_feature: MA Experiment 20000574 PARAMETER Experiment Name: At_100uM_ABA_Mutants__P Parameter: Organism Value: A. thaliana
  misc_feature: MA Experiment 20000574 PARAMETER Experiment Name: At_100uM_ABA_Mutants__P Parameter: Plant Line Value: CS23 vs. Ler wt
  misc_feature: MA Experiment 20000574 PARAMETER Experiment Name: At_100uM_ABA_Mutants__P Parameter: Timepoint (hr) Value: N/A
  misc_feature: MA Experiment 20000574 PARAMETER Experiment Name: At_100uM_ABA_Mutants__P Parameter: Tissue Value: Whole Plant
  misc_feature: MA Experiment 20000574 PARAMETER Experiment Name: At_100uM_ABA_Mutants__P Parameter: Treatment Value: None
  misc_feature: MA Experiment ID: 20000709 Result: Up-regulated in Transcription
  misc_feature: MA Experiment 20000709 PARAMETER Experiment Name: At_15mM_NH4NO3_L-to-H_P Parameter: Age (hr) Value: 14
  misc_feature: MA Experiment 20000709 PARAMETER Experiment Name: At_15mM_NH4NO3_L-to-H_P Parameter: Organism Value: A. thaliana
  misc_feature: MA Experiment 20000709 PARAMETER Experiment Name: At_15mM_NH4NO3_L-to-H_P Parameter: Plant Line Value: WS
  misc_feature: MA Experiment 20000709 PARAMETER Experiment Name: At_15mM_NH4NO3_L-to-H_P Parameter: Timepoint (hr) Value: 4
  misc_feature: MA Experiment 20000709 PARAMETER Experiment Name: At_15mM_NH4NO3_L-to-H_P Parameter: Tissue Value: Aerial
  misc_feature: MA Experiment 20000709 PARAMETER Experiment Name: At_15mM_NH4NO3_L-to-H_P Parameter: Treatment Value: 15mM NH4NO3 vs. 30mM Mannitol
  misc_feature: MA Experiment ID: 20000794 Result: Up-regulated in Transcription
  misc_feature: MA Experiment 20000794 PARAMETER Experiment Name: At_Petals_P Parameter: Age (day) Value: 23-25 days
  misc_feature: MA Experiment 20000794 PARAMETER Experiment Name: At_Petals_P Parameter: Plant Line Value: WS
  misc_feature: MA Experiment 20000794 PARAMETER Experiment Name: At_Petals_P Parameter: Tissue Value: Petals vs. Whole plant
  misc_feature: MA Experiment ID: 20001247 Result: Down-regulated in Transcription
  misc_feature: MA Experiment 20001247 PARAMETER Experiment Name: At_Far-red-induction_P Parameter: Age (day) Value: 7
  misc_feature: MA Experiment 20001247 PARAMETER Experiment Name: At_Far-red-induction_P Parameter: Light Value: Far-red vs. White
  misc_feature: MA Experiment 20001247 PARAMETER Experiment Name: At_Far-red-induction_P Parameter: Organism Value: A. thaliana
  misc_feature: MA Experiment 20001247 PARAMETER Experiment Name: At_Far-red-induction_P Parameter: Plant Line Value: Columbia
  misc_feature: MA Experiment 20001247 PARAMETER Experiment Name: At_Far-red-induction_P Parameter: Timepoint (hr) Value: 1
  misc_feature: MA Experiment 20001247 PARAMETER Experiment Name: At_Far-red-induction_P Parameter: Tissue Value: Whole Plant
  misc_feature: MA Experiment ID: 20001457 Result: Up-regulated in Transcription
  misc_feature: MA Experiment 20001457 PARAMETER Experiment Name: At_50mM_NH4NO3_L-to-H_P Parameter: Age (day) Value: Undefined
  misc_feature: MA Experiment 20001457 PARAMETER Experiment Name: At_50mM_NH4NO3_L-to-H_P Parameter: Organism Value: Undefined
  misc_feature: MA Experiment 20001457 PARAMETER Experiment Name: At_50mM_NH4NO3_L-to-H_P Parameter: Plant Line Value: Undefined
  misc_feature: MA Experiment 20001457 PARAMETER Experiment Name: At_50mM_NH4NO3_L-to-H_P Parameter: Timepoint (hr) Value: 0.5
  misc_feature: MA Experiment 20001457 PARAMETER Experiment Name: At_50mM_NH4NO3_L-to-H_P Parameter: Tissue Value: Siliques
  misc_feature: MA Experiment 20001457 PARAMETER Experiment Name: At_50mM_NH4NO3_L-to-H_P Parameter: Treatment Value: 50mM NH4NO3 vs. 100mM Manitol
  misc_feature: MA Experiment ID: 20001458 Result: Up-regulated in Transcription
  misc_feature: MA Experiment 20001458 PARAMETER Experiment Name: At_50mM_NH4NO3_L-to-H_P Parameter: Age (day) Value: Undefined
  misc_feature: MA Experiment 20001458 PARAMETER Experiment Name: At_50mM_NH4NO3_L-to-H_P Parameter: Organism Value: Undefined
  misc_feature: MA Experiment 20001458 PARAMETER Experiment Name: At_50mM_NH4NO3_L-to-H_P Parameter: Plant Line Value: Undefined
  misc_feature: MA Experiment 20001458 PARAMETER Experiment Name: At_50mM_NH4NO3_L-to-H_P Parameter: Timepoint (hr) Value: 2
  misc_feature: MA Experiment 20001458 PARAMETER Experiment Name: At_50mM_NH4NO3_L-to-H_P Parameter: Tissue Value: Siliques
  misc_feature: MA Experiment 20001458 PARAMETER Experiment Name: At_50mM_NH4NO3_L-to-H_P Parameter: Treatment Value: 50mM NH4NO3 vs. 100mM Manitol
  misc_feature: MA Experiment ID: 20001459 Result: Up-regulated in Transcription
  misc_feature: MA Experiment 20001459 PARAMETER Experiment Name: At_50mM_NH4NO3_L-to-H_P Parameter: Age (day) Value: Undefined
  misc_feature: MA Experiment 20001459 PARAMETER Experiment Name: At_50mM_NH4NO3_L-to-H_P Parameter: Organism Value: Undefined
  misc_feature: MA Experiment 20001459 PARAMETER Experiment Name: At_50mM_NH4NO3_L-to-H_P Parameter: Plant Line Value: Undefined
  misc_feature: MA Experiment 20001459 PARAMETER Experiment Name: At_50mM_NH4NO3_L-to-H_P Parameter: Timepoint (hr) Value: 4
  misc_feature: MA Experiment 20001459 PARAMETER Experiment Name: At_50mM_NH4NO3_L-to-H_P Parameter: Tissue Value: Siliques
  misc_feature: MA Experiment 20001459 PARAMETER Experiment Name: At_50mM_NH4NO3_L-to-H_P Parameter: Treatment Value: 50mM NH4NO3 vs. 100mM Manitol
  misc_feature: MA Experiment ID: 20001557 Result: Up-regulated in Transcription
  misc_feature: MA Experiment 20001557 PARAMETER Experiment Name: At_Drought_Soil_Dry_P Parameter: Age (day) Value: 27
  misc_feature: MA Experiment 20001557 PARAMETER Experiment Name: At_Drought_Soil_Dry_P Parameter: Organism Value: A. thaliana
  misc_feature: MA Experiment 20001557 PARAMETER Experiment Name: At_Drought_Soil_Dry_P Parameter: Plant Line Value: WS
  misc_feature: MA Experiment 20001557 PARAMETER Experiment Name: At_Drought_Soil_Dry_P Parameter: Post Timepoint (hr) Value: 3
  misc_feature: MA Experiment 20001557 PARAMETER Experiment Name: At_Drought_Soil_Dry_P Parameter: Post-Treatment Value: Re-Water vs. No Drought
  misc_feature: MA Experiment 20001557 PARAMETER Experiment Name: At_Drought_Soil_Dry_P Parameter: Timepoint (day) Value: 13
  misc_feature: MA Experiment 20001557 PARAMETER Experiment Name: At_Drought_Soil_Dry_P Parameter: Treatment Value: Drought vs. No Drought
  misc_feature: MA Experiment ID: 20001558 Result: Up-regulated in Transcription
  misc_feature: MA Experiment 20001558 PARAMETER Experiment Name: At_Drought_Soil_Dry_P Parameter: Age (day) Value: 27
  misc_feature: MA Experiment 20001558 PARAMETER Experiment Name: At_Drought_Soil_Dry_P Parameter: Organism Value: A. thaliana
  misc_feature: MA Experiment 20001558 PARAMETER Experiment Name: At_Drought_Soil_Dry_P Parameter: Plant Line Value: WS
  misc_feature: MA Experiment 20001558 PARAMETER Experiment Name: At_Drought_Soil_Dry_P Parameter: Post Timepoint (hr) Value: 6
  misc_feature: MA Experiment 20001558 PARAMETER Experiment Name: At_Drought_Soil_Dry_P Parameter: Post-Treatment Value: Re-Water vs. No Drought
  misc_feature: MA Experiment 20001558 PARAMETER Experiment Name: At_Drought_Soil_Dry_P Parameter: Timepoint (day) Value: 13
  misc_feature: MA Experiment 20001558 PARAMETER Experiment Name: At_Drought_Soil_Dry_P Parameter: Treatment Value: Drought vs. No Drought
  misc_feature: MA Experiment ID: 20001560 Result: Up-regulated in Transcription
  misc_feature: MA Experiment 20001560 PARAMETER Experiment Name: At_Drought_Soil_Dry_P Parameter: Age (day) Value: 28
  misc_feature: MA Experiment 20001560 PARAMETER Experiment Name: At_Drought_Soil_Dry_P Parameter: Organism Value: A. thaliana
  misc_feature: MA Experiment 20001560 PARAMETER Experiment Name: At_Drought_Soil_Dry_P Parameter: Plant Line Value: WS
  misc_feature: MA Experiment 20001560 PARAMETER Experiment Name: At_Drought_Soil_Dry_P Parameter: Post Timepoint (hr) Value: None
  misc_feature: MA Experiment 20001560 PARAMETER Experiment Name: At_Drought_Soil_Dry_P Parameter: Post-Treatment Value: None
  misc_feature: MA Experiment 20001560 PARAMETER Experiment Name: At_Drought_Soil_Dry_P Parameter: Timepoint (day) Value: 14
  misc_feature: MA Experiment 20001560 PARAMETER Experiment Name: At_Drought_Soil_Dry_P Parameter: Treatment Value: Drought vs. No Drought
  misc_feature: MA Experiment ID: 20001756 Result: Up-regulated in Transcription
  misc_feature: MA Experiment 20001756 PARAMETER Experiment Name: At_50mM_NH4NO3_L-to-H_P Parameter: Timepoint (hr) Value: 4
  misc_feature: MA Experiment 20001756 PARAMETER Experiment Name: At_50mM_NH4NO3_L-to-H_P Parameter: Tissue Value: Leaf
  misc_feature: MA Experiment 20001756 PARAMETER Experiment Name: At_50mM_NH4NO3_L-to-H_P Parameter: Treatment Value: 50mM NH4NO3 vs 100mM Mannitol
  misc_feature: MA Experiment ID: 20001757 Result: Up-regulated in Transcription
  misc_feature: MA Experiment 20001757 PARAMETER Experiment Name: At_50mM_NH4NO3_L-to-H_P Parameter: Timepoint (hr) Value: 6
  misc_feature: MA Experiment 20001757 PARAMETER Experiment Name: At_50mM_NH4NO3_L-to-H_P Parameter: Tissue Value: Leaf
  misc_feature: MA Experiment 20001757 PARAMETER Experiment Name: At_50mM_NH4NO3_L-to-H_P Parameter: Treatment Value: 50mM NH4NO3 vs 100mM Mannitol
ctcaaatcatttttttcctctcgattgtgagatcaattattaatattcatctggagaattatcgtctcttttctccattgctatggctctctcaactactccttctcagatgtccgttgcacttccaactagaattgatgggtcgagccgatctatgattaaggttcaaagtataagcttcactgataagtcatggggtcctcctctgctgagactagattcgaaatctagaagcttaggtgtgaaaaaaaggtccacaatatgcatgtcacttcagcaatcaagcaaatccaaagtcttggttactcctctagaacttgaagatcccaaagagactcccttaaacttgtttaggcctaaggagccttatactgcaactattgtttcggttgagagaattgttggtccacaagcacctggagagacttgccacattgttattgatcatgatggtaatgttccttactgggaaggacaaagctatggagtcattcctcctggtgagaatcccaagaaacctggtgcacctcataacgttcgcctttattcgattgcatcaacacggtatggagattcttttgatggcaaaacagctagtctatgtgtccgtcgagctatttactatgatccggagacaggaaaagaagatccttccaaagctggtgtatgcagtaacttcttgtgcaatgccaaacccggcgataaagttaaaatcaccggtccatctggaaaggtaatgcttttacctgaagatgacccgaaagctactcacataatgattgctactggaaccggagttgctccgtacagaggatacctacggcgtatgtttatggagaatgttcccaatttcaagtttgacggacttgcttggctcttccttggtgtggctaactcagacagtcttctctatgatgaagaatttgccgggtaccgcaaggactatccagaaaatttcaggtacgacaaagcgctgagcagagaagagaaaaacaagaaaggagggaaaatgtatgtgcaggacaagattgaagaatacagcgatgaaatcttcaaacttctggacaatggagctcatatttacttttgcggacttaaaggaatgatgcccgggattcaagatacgcttaagagagtcgctgaagagcgaggcgaaagctgggagcagaaacttactcagctcaggaagaacaagcagtggcatgttgaagtgtattgagttaatagtctttctgtggttttcgccatttttgcaactgaataatcgtgtcaattaatggacacagtgtaactcaaccaagaaagtcaatcattagacatgaatctttcctctaatttcaact

SEQ ID NO: 22415 - protein, 378 aa, Arabidopsis thaliana
  peptide (1)..(378): Ceres Seq. ID no. 12325221
  misc_feature (227)..(348): Pfam Name: Oxidoreductase NAD-binding domain Pfam Description: Oxidoreductase NAD-binding domain
  misc_feature (1)..(378): Homolog of NCBI NO: 22530948 NR Description: ferredoxin--NADP+ reductase-like protein
  misc_feature (1)..(378): Homolog of NCBI NO: 21592875 NR Description: ferredoxin--NADP+ reductase-like protein
  misc_feature (4)..(378): Homolog of NCBI NO: 3913653 NR Description: Ferredoxin--NADP reductase, embryo isozyme,
  misc_feature (23)..(378): Homolog of NCBI NO: 18397542 NR Description: ferrodoxin NADP oxidoreductase, putative
  misc_feature (8)..(378): Homolog of NCBI NO: 3913648 NR Description: Ferredoxin--NADP reductase, root isozyme,
  misc_feature (27)..(378): Homolog of NCBI NO: 25285860 NR Description: ferredoxin-NADP+ reductase-like protein
  misc_feature (8)..(378): Homolog of NCBI NO: 7433380 NR Description: ferredoxin-NADP reductase (EC 1.18.1.2) - garden
  misc_feature (23)..(378): Homolog of NCBI NO: 21593597 NR Description: ferrodoxin NADP oxidoreductase, putative
  misc_feature (84)..(378): Homolog of NCBI NO: 399485 NR Description: Ferredoxin--NADP reductase, cyanelle precursor
  misc_feature (1)..(378): Homolog of NCBI NO: 18412939 NR Description: ferredoxin--NADP+ reductase - like protein
MALSTTPSQMSVALPTRIDGSSRSMIKVQSISFTDKSWGPPLLRLDSKSRSLGVKKRSTICMSLQQSSKSKVLVTPLELEDPKETPLNLFRPKEPYTATIVSVERIVGPQAPGETCHIVIDHDGNVPYWEGQSYGVIPPGENPKKPGAPHNVRLYSIASTRYGDSFDGKTASLCVRRAIYYDPETGKEDPSKAGVCSNFLCNAKPGDKVKITGPSGKVMLLPEDDPKATHIMIATGTGVAPYRGYLRRMFMENVPNFKFDGLAWLFLGVANSDSLLYDEEFAGYRKDYPENFRYDKALSREEKNKKGGKMYVQDKIEEYSDEIFKLLDNGAHIYFCGLKGMMPGIQDTLKRVAEERGESWEQKLTQLRKNKQWHVEVY

SEQ ID NO: 22416 - protein, 369 aa, Arabidopsis thaliana
  peptide (1)..(369): Ceres Seq. ID no. 12325222
  misc_feature (218)..(339): Pfam Name: Oxidoreductase NAD-binding domain Pfam Description: Oxidoreductase NAD-binding domain
  misc_feature (75)..(369): Homolog of NCBI NO: 399485 NR Description: Ferredoxin--NADP reductase, cyanelle precursor
  misc_feature (1)..(369): Homolog of NCBI NO: 3913653 NR Description: Ferredoxin--NADP reductase, embryo isozyme,
  misc_feature (14)..(369): Homolog of NCBI NO: 21593597 NR Description: ferrodoxin NADP oxidoreductase, putative
  misc_feature (14)..(369): Homolog of NCBI NO: 18397542 NR Description: ferrodoxin NADP oxidoreductase, putative
  misc_feature (1)..(369): Homolog of NCBI NO: 7433380 NR Description: ferredoxin-NADP reductase (EC 1.18.1.2) - garden
  misc_feature (1)..(369): Homolog of NCBI NO: 3913648 NR Description: Ferredoxin--NADP reductase, root isozyme,
  misc_feature (18)..(369): Homolog of NCBI NO: 25285860 NR Description: ferredoxin-NADP+ reductase-like protein
  misc_feature (1)..(369): Homolog of NCBI NO: 22530948 NR Description: ferredoxin--NADP+ reductase-like protein
  misc_feature (1)..(369): Homolog of NCBI NO: 21592875 NR Description: ferredoxin--NADP+ reductase-like protein
  misc_feature (1)..(369): Homolog of NCBI NO: 18412939 NR Description: ferredoxin--NADP+ reductase - like protein
MSVALPTRIDGSSRSMIKVQSISFTDKSWGPPLLRLDSKSRSLGVKKRSTICMSLQQSSKSKVLVTPLELEDPKETPLNLFRPKEPYTATIVSVERIVGPQAPGETCHIVIDHDGNVPYWEGQSYGVIPPGENPKKPGAPHNVRLYSIASTRYGDSFDGKTASLCVRRAIYYDPETGKEDPSKAGVCSNFLCNAKPGDKVKITGPSGKVMLLPEDDPKATHIMIATGTGVAPYRGYLRRMFMENVPNFKFDGLAWLFLGVANSDSLLYDEEFAGYRKDYPENFRYDKALSREEKNKKGGKMYVQDKIEEYSDEIFKLLDNGAHIYFCGLKGMMPGIQDTLKRVAEERGESWEQKLTQLRKNKQWHVEVY

SEQ ID NO: 22417 - protein, 354 aa, Arabidopsis thaliana
  peptide (1)..(354): Ceres Seq. ID no. 12325223
  misc_feature (203)..(324): Pfam Name: Oxidoreductase NAD-binding domain Pfam Description: Oxidoreductase NAD-binding domain
  misc_feature (60)..(354): Homolog of NCBI NO: 399485 NR Description: Ferredoxin--NADP reductase, cyanelle precursor
  misc_feature (1)..(354): Homolog of NCBI NO: 3913653 NR Description: Ferredoxin--NADP reductase, embryo isozyme,
  misc_feature (1)..(354): Homolog of NCBI NO: 21593597 NR Description: ferrodoxin NADP oxidoreductase, putative
  misc_feature (1)..(354): Homolog of NCBI NO: 18397542 NR Description: ferrodoxin NADP oxidoreductase, putative
  misc_feature (1)..(354): Homolog of NCBI NO: 7433380 NR Description: ferredoxin-NADP reductase (EC 1.18.1.2) - garden
  misc_feature (1)..(354): Homolog of NCBI NO: 3913648 NR Description: Ferredoxin--NADP reductase, root isozyme,
  misc_feature (3)..(354): Homolog of NCBI NO: 25285860 NR Description: ferredoxin-NADP+ reductase-like protein
  misc_feature (1)..(354): Homolog of NCBI NO: 22530948 NR Description: ferredoxin--NADP+ reductase-like protein
  misc_feature (1)..(354): Homolog of NCBI NO: 21592875 NR Description: ferredoxin--NADP+ reductase-like protein
  misc_feature (1)..(354): Homolog of NCBI NO: 18412939 NR Description: ferredoxin--NADP+ reductase - like protein
MIKVQSISFTDKSWGPPLLRLDSKSRSLGVKKRSTICMSLQQSSKSKVLVTPLELEDPKETPLNLFRPKEPYTATIVSVERIVGPQAPGETCHIVIDHDGNVPYWEGQSYGVIPPGENPKKPGAPHNVRLYSIASTRYGDSFDGKTASLCVRRAIYYDPETGKEDPSKAGVCSNFLCNAKPGDKVKITGPSGKVMLLPEDDPKATHIMIATGTGVAPYRGYLRRMFMENVPNFKFDGLAWLFLGVANSDSLLYDEEFAGYRKDYPENFRYDKALSREEKNKKGGKMYVQDKIEEYSDEIFKLLDNGAHIYFCGLKGMMPGIQDTLKRVAEERGESWEQKLTQLRKNKQWHVEVY

SEQ ID NO: 22418 - DNA, 1384 bp, Arabidopsis thaliana
  misc_feature (1)..(1384): Ceres Seq. ID no. 12334636
  misc_feature: MA Experiment ID: 108434 Result: Up-regulated in Transcription
  misc_feature: MA Experiment 108434 PARAMETER Experiment Name: At_Root_Tips_cDNA_P Parameter: Tissue Value: Root Tips
  misc_feature: MA Experiment ID: 108488 Result: Down-regulated in Transcription
  misc_feature: MA Experiment ID: 108489 Result: Up-regulated in Transcription
  misc_feature: MA Experiment ID: 20000265 Result: Up-regulated in Transcription
  misc_feature: MA Experiment 20000265 PARAMETER Experiment Name: At_Open_Flower_P Parameter: Age (day) Value: 21
  misc_feature: MA Experiment 20000265 PARAMETER Experiment Name: At_Open_Flower_P Parameter: Plant Line Value: WS
  misc_feature: MA Experiment 20000265 PARAMETER Experiment Name: At_Open_Flower_P Parameter: Tissue Value: Closed Flower vs. Whole Plant
  misc_feature: MA Experiment ID: 20000527 Result: Down-regulated in Transcription
  misc_feature: MA Experiment 20000527 PARAMETER Experiment Name: At_10percent_PEG_P Parameter: Age (day) Value: 20
  misc_feature: MA Experiment 20000527 PARAMETER Experiment Name: At_10percent_PEG_P Parameter: Organism Value: A. thaliana
  misc_feature: MA Experiment 20000527 PARAMETER Experiment Name: At_10percent_PEG_P Parameter: Plant Line Value: WS
  misc_feature: MA Experiment 20000527 PARAMETER Experiment Name: At_10percent_PEG_P Parameter: Timepoint (day) Value: 20
  misc_feature: MA Experiment 20000527 PARAMETER Experiment Name: At_10percent_PEG_P Parameter: Tissue Value: Whole Plant
  misc_feature: MA Experiment 20000527 PARAMETER Experiment Name: At_10percent_PEG_P Parameter: Treatment Value: 10percent PEG vs. No Treatment
  misc_feature: MA Experiment ID: 20001904 Result: Up-regulated in Transcription
  misc_feature: MA Experiment 20001904 PARAMETER Experiment Name: At_Drought_Reproduction_P Parameter: Age (day) Value: 37
  misc_feature: MA Experiment 20001904 PARAMETER Experiment Name: At_Drought_Reproduction_P Parameter: Organism Value: A. thaliana
  misc_feature: MA Experiment 20001904 PARAMETER Experiment Name: At_Drought_Reproduction_P Parameter: Plant Line Value: WS
  misc_feature: MA Experiment 20001904 PARAMETER Experiment Name: At_Drought_Reproduction_P Parameter: Timepoint (day) Value: 7
  misc_feature: MA Experiment 20001904 PARAMETER Experiment Name: At_Drought_Reproduction_P Parameter: Tissue Value: Rosettes
  misc_feature: MA Experiment 20001904 PARAMETER Experiment Name: At_Drought_Reproduction_P Parameter: Treatment Value: Drought vs. No Drought
  misc_feature: MA Experiment ID: 20001905 Result: Up-regulated in Transcription
  misc_feature: MA Experiment 20001905 PARAMETER Experiment Name: At_Drought_Reproduction_P Parameter: Age (day) Value: 40
  misc_feature: MA Experiment 20001905 PARAMETER Experiment Name: At_Drought_Reproduction_P Parameter: Organism Value: A. thaliana
  misc_feature: MA Experiment 20001905 PARAMETER Experiment Name: At_Drought_Reproduction_P Parameter: Plant Line Value: WS
  misc_feature: MA Experiment 20001905 PARAMETER Experiment Name: At_Drought_Reproduction_P Parameter: Timepoint (day) Value: 10
  misc_feature: MA Experiment 20001905 PARAMETER Experiment Name: At_Drought_Reproduction_P Parameter: Tissue Value: Rosettes
  misc_feature: MA Experiment 20001905 PARAMETER Experiment Name: At_Drought_Reproduction_P Parameter: Treatment Value: Drought vs. No Drought
  misc_feature: MA Experiment ID: 20001911 Result: Down-regulated in Transcription
  misc_feature: MA Experiment 20001911 PARAMETER Experiment Name: At_Drought_Reproduction_P Parameter: Age (day) Value: 40
  misc_feature: MA Experiment 20001911 PARAMETER Experiment Name: At_Drought_Reproduction_P Parameter: Organism Value: A. thaliana
  misc_feature: MA Experiment 20001911 PARAMETER Experiment Name: At_Drought_Reproduction_P Parameter: Plant Line Value: WS
  misc_feature: MA Experiment 20001911 PARAMETER Experiment Name: At_Drought_Reproduction_P Parameter: Timepoint (day) Value: 10
  misc_feature: MA Experiment 20001911 PARAMETER Experiment Name: At_Drought_Reproduction_P Parameter: Tissue Value: Flowers
  misc_feature: MA Experiment 20001911 PARAMETER Experiment Name: At_Drought_Reproduction_P Parameter: Treatment Value: Drought vs. No Drought
attgacaagttcatctgtctctcttgtcgtagtgaaagagaaaaagaaacaagtttttttctgttgggtaattttctactcgtcattggtttcatcgacattgaactagaaccagaatggctactgctacgtctcaccaatcagtcgtttcatttgcttctctccggtcttctccttcttctacaatctctcaatgtggattcaagatcgattcttcactgagctttacatcgaaaaagacaaacttttgcaagattaaagcaatggcatcatcagtttcttatgacaacactctcttgtctccttccaagacaatccctgacaattctcaaaagaaatcaaatgaagcagctttgatattgattaggcgtggagaatctttatggaacgagaagaatctttttactggttgtgttgatgtgccattgactgagaaaggtgttgaagaagctattgaagcagggaagaggattagtaacattcctgttgatgttatctttacatcttctttgattcgtgctcagatgactgcaatgcttgctatgattcaacaccgtcgtaagaaggtaccgatcatcttgcacgatgaaagcgaacaggcgaaaacttggagtcaagtttttagtgatgagactaaaaaccaatccattcctgtcatacctgcttggcagctcaatgaaagaatgtatggagaattacaaggtcttaacaagcaagaaacagccgagagatatgggaaagagcaagttcacgaatggcgtaggagttatgatattcctcctcccaaaggagagagtttggagatgtgtgctgagagagcagtagcttattttcaggacaatatcgaaccgaagcttgcagctggaaagaacgtaatgatagctgctcacgggaactcgctgcggtctatcattatgtatcttgacaaattgacttgccaggaggtgataagtctagagctatcgacaggtatacctcttctctacatattcaaagaaggcaaattcatgaagcggggaagcccggttggtccaacagaagctggtgtttatgcttataccaagagattggctcaatacagacagaagctagaggacgatagtgaagtactctgtgcctgaagtaaactagaaaatttggttcttcatctactcaactctcttcccacaagcttaggaccttagaggcgtttacaaagaatacataacttctgattttgttctttttttctggttcttcttcattcatatgtgtcataaccaccactgttacctgaaggataatgttcaaaatgtgaccgtttccgtctttctagtcaaacacttgttgatgttgtgtttgttgttgttaccaaactctttaagcaaacaagtattattctgtg

SEQ ID NO: 22419 - protein, 334 aa, Arabidopsis thaliana
  peptide (1)..(334): Ceres Seq. ID no. 12334637
  misc_feature (78)..(300): Pfam Name: Phosphoglycerate mutase family Pfam Description: Phosphoglycerate mutase family
  misc_feature (80)..(305): Homolog of NCBI NO: 15605455 NR Description: Phosphoglycerate Mutase [Chlamydia trachomatis]
  misc_feature (80)..(305): Homolog of NCBI NO: 15834720 NR Description: phosphoglycerate mutase [Chlamydia muridarum]
  misc_feature (78)..(299): Homolog of NCBI NO: 15836396 NR Description: phosphoglycerate mutase [Chlamydophila pneumoniae
  misc_feature (78)..(299): Homolog of NCBI NO: 15618772 NR Description: Phosphoglycerate Mutase [Chlamydophila pneumoniae
  misc_feature (78)..(305): Homolog of NCBI NO: 29840659 NR Description: phosphoglycerate mutase [Chlamydophila caviae
  misc_feature (137)..(326): Homolog of NCBI NO: 15218201 NR Description: phosphoglycerate mutase, putative; protein id:
  misc_feature (1)..(326): Homolog of NCBI NO: 25405021 NR Description: protein F28K19.26 [imported] - Arabidopsis
  misc_feature (1)..(334): Homolog of NCBI NO: 21618275 NR Description: unknown [Arabidopsis thaliana]
  misc_feature (1)..(334): Homolog of NCBI NO: 18395083 NR Description: expressed protein
  misc_feature (1)..(334): Homolog of NCBI NO: 21539557 NR Description: unknown protein [Arabidopsis thaliana]
MATATSHQSVVSFASLRSSPSSTISQCGFKIDSSLSFTSKKTNFCKIKAMASSVSYDNTLLSPSKTIPDNSQKKSNEAALILIRRGESLWNEKNLFTGCVDVPLTEKGVEEAIEAGKRISNIPVDVIFTSSLIRAQMTAMLAMIQHRRKKVPIILHDESEQAKTWSQVFSDETKNQSIPVIPAWQLNERMYGELQGLNKQETAERYGKEQVHEWRRSYDIPPPKGESLEMCAERAVAYFQDNIEPKLAAGKNVMIAAHGNSLRSIIMYLDKLTCQEVISLELSTGIPLLYIFKEGKFMKRGSPVGPTEAGVYAYTKRLAQYRQKLEDDSEVLCA

SEQ ID NO: 22420 - protein, 285 aa, Arabidopsis thaliana
  peptide (1)..(285): Ceres Seq. ID no. 12334638
  misc_feature (29)..(251): Pfam Name: Phosphoglycerate mutase family Pfam Description: Phosphoglycerate mutase family
  misc_feature (31)..(256): Homolog of NCBI NO: 15605455 NR Description: Phosphoglycerate Mutase [Chlamydia trachomatis]
  misc_feature (31)..(256): Homolog of NCBI NO: 15834720 NR Description: phosphoglycerate mutase [Chlamydia muridarum]
  misc_feature (29)..(250): Homolog of NCBI NO: 15836396 NR Description: phosphoglycerate mutase [Chlamydophila pneumoniae
  misc_feature (29)..(250): Homolog of NCBI NO: 15618772 NR Description: Phosphoglycerate Mutase [Chlamydophila pneumoniae
  misc_feature (29)..(256): Homolog of NCBI NO: 29840659 NR Description: phosphoglycerate mutase [Chlamydophila caviae
  misc_feature (88)..(277): Homolog of NCBI NO: 15218201 NR Description: phosphoglycerate mutase, putative; protein id:
  misc_feature (1)..(277): Homolog of NCBI NO: 25405021 NR Description: protein F28K19.26 [imported] - Arabidopsis
  misc_feature (1)..(285): Homolog of NCBI NO: 21618275 NR Description: unknown [Arabidopsis thaliana]
  misc_feature (1)..(285): Homolog of NCBI NO: 18395083 NR Description: expressed protein
  misc_feature (1)..(285): Homolog of NCBI NO: 21539557 NR Description: unknown protein [Arabidopsis thaliana]
MASSVSYDNTLLSPSKTIPDNSQKKSNEAALILIRRGESLWNEKNLFTGCVDVPLTEKGVEEAIEAGKRISNIPVDVIFTSSLIRAQMTAMLAMIQHRRKKVPIILHDESEQAKTWSQVFSDETKNQSIPVIPAWQLNERMYGELQGLNKQETAERYGKEQVHEWRRSYDIPPPKGESLEMCAERAVAYFQDNIEPKLAAGKNVMIAAHGNSLRSIIMYLDKLTCQEVISLELSTGIPLLYIFKEGKFMKRGSPVGPTEAGVYAYTKRLAQYRQKLEDDSEVLCA

SEQ ID NO: 22421 - protein, 198 aa, Arabidopsis thaliana
  peptide (1)..(198): Ceres Seq. ID no. 12334639
  misc_feature (1)..(164): Pfam Name: Phosphoglycerate mutase family Pfam Description: Phosphoglycerate mutase family
  misc_feature (1)..(169): Homolog of NCBI NO: 15605455 NR Description: Phosphoglycerate Mutase [Chlamydia trachomatis]
  misc_feature (1)..(169): Homolog of NCBI NO: 15834720 NR Description: phosphoglycerate mutase [Chlamydia muridarum]
  misc_feature (1)..(163): Homolog of NCBI NO: 15836396 NR Description: phosphoglycerate mutase [Chlamydophila pneumoniae
  misc_feature (1)..(163): Homolog of NCBI NO: 15618772 NR Description: Phosphoglycerate Mutase [Chlamydophila pneumoniae
  misc_feature (1)..(169): Homolog of NCBI NO: 29840659 NR Description: phosphoglycerate mutase [Chlamydophila caviae
  misc_feature (1)..(190): Homolog of NCBI NO: 15218201 NR Description: phosphoglycerate mutase, putative; protein id:
  misc_feature (1)..(190): Homolog of NCBI NO: 25405021 NR Description: protein F28K19.26 [imported] - Arabidopsis
  misc_feature (1)..(198): Homolog of NCBI NO: 21618275 NR Description: unknown [Arabidopsis thaliana]
  misc_feature (1)..(198): Homolog of NCBI NO: 18395083 NR Description: expressed protein
  misc_feature (1)..(198): Homolog of NCBI NO: 21539557 NR Description: unknown protein [Arabidopsis thaliana]
MTAMLAMIQHRRKKVPIILHDESEQAKTWSQVFSDETKNQSIPVIPAWQLNERMYGELQGLNKQETAERYGKEQVHEWRRSYDIPPPKGESLEMCAERAVAYFQDNIEPKLAAGKNVMIAAHGNSLRSIIMYLDKLTCQEVISLELSTGIPLLYIFKEGKFMKRGSPVGPTEAGVYAYTKRLAQYRQKLEDDSEVLCA

SEQ ID NO: 22422 - DNA, 788 bp, Arabidopsis thaliana
  misc_feature (1)..(788): Ceres Seq. ID no. 13580848
  misc_feature: MA Experiment ID: 108595 Result: Up-regulated in Transcription
  misc_feature: MA Experiment 108595 PARAMETER Experiment Name: At_Ler-pi_Ovule_cDNA_P Parameter: Plant Line Value: null
  misc_feature: MA Experiment ID: 20000269 Result: Up-regulated in Transcription
  misc_feature: MA Experiment 20000269 PARAMETER Experiment Name: At_1mM_KNO3_L-vs-H_Roots_P Parameter: Age (day) Value: 7,10,12
  misc_feature: MA Experiment 20000269 PARAMETER Experiment Name: At_1mM_KNO3_L-vs-H_Roots_P Parameter: Organism Value: A. thaliana
  misc_feature: MA Experiment 20000269 PARAMETER Experiment Name: At_1mM_KNO3_L-vs-H_Roots_P Parameter: Plant Line Value: WS
  misc_feature: MA Experiment 20000269 PARAMETER Experiment Name: At_1mM_KNO3_L-vs-H_Roots_P Parameter: Timepoint (day) Value: 7,10,12
  misc_feature: MA Experiment 20000269 PARAMETER Experiment Name: At_1mM_KNO3_L-vs-H_Roots_P Parameter: Tissue Value: Roots
  misc_feature: MA Experiment 20000269 PARAMETER Experiment Name: At_1mM_KNO3_L-vs-H_Roots_P Parameter: Treatment Value: 1mM KNO3 vs. 50mM KNO3
  misc_feature: MA Experiment ID: 20000286 Result: Down-regulated in Transcription
  misc_feature: MA Experiment 20000286 PARAMETER Experiment Name: At_Open_Flower_P Parameter: Age (day) Value: 21
  misc_feature: MA Experiment 20000286 PARAMETER Experiment Name: At_Open_Flower_P Parameter: Plant Line Value: WS
  misc_feature: MA Experiment 20000286 PARAMETER Experiment Name: At_Open_Flower_P Parameter: Tissue Value: Half Open vs. Whole Plant
  misc_feature: MA Experiment ID: 20000445 Result: Down-regulated in Transcription
  misc_feature: MA Experiment 20000445 PARAMETER Experiment Name: At_100uM_NAA__P Parameter: Age (day) Value: 14
  misc_feature: MA Experiment 20000445 PARAMETER Experiment Name: At_100uM_NAA__P Parameter: Organism Value: A. thaliana
  misc_feature: MA Experiment 20000445 PARAMETER Experiment Name: At_100uM_NAA__P Parameter: Plant Line Value: WS
  misc_feature: MA Experiment 20000445 PARAMETER Experiment Name: At_100uM_NAA__P Parameter: Timepoint (hr) Value: 6
  misc_feature: MA Experiment 20000445 PARAMETER Experiment Name: At_100uM_NAA__P Parameter: Tissue Value: Aerial
  misc_feature: MA Experiment 20000445 PARAMETER Experiment Name: At_100uM_NAA__P Parameter: Treatment Value: 100uM NAA vs. No Treatment
  misc_feature: MA Experiment ID: 20000573 Result: Up-regulated in Transcription
  misc_feature: MA Experiment 20000573 PARAMETER Experiment Name: At_100uM_ABA_Mutants__P Parameter: Organism Value: A. thaliana
  misc_feature: MA Experiment 20000573 PARAMETER Experiment Name: At_100uM_ABA_Mutants__P Parameter: Plant Line Value: CS22 vs. Ler wt
  misc_feature: MA Experiment 20000573 PARAMETER Experiment Name: At_100uM_ABA_Mutants__P Parameter: Timepoint (hr) Value: N/A
  misc_feature: MA Experiment 20000573 PARAMETER Experiment Name: At_100uM_ABA_Mutants__P Parameter: Tissue Value: Whole Plant
  misc_feature: MA Experiment 20000573 PARAMETER Experiment Name: At_100uM_ABA_Mutants__P Parameter: Treatment Value: None
  misc_feature: MA Experiment ID: 20000574 Result: Up-regulated in Transcription
  misc_feature: MA Experiment 20000574 PARAMETER Experiment Name: At_100uM_ABA_Mutants__P Parameter: Organism Value: A. thaliana
  misc_feature: MA Experiment 20000574 PARAMETER Experiment Name: At_100uM_ABA_Mutants__P Parameter: Plant Line Value: CS23 vs. Ler wt
  misc_feature: MA Experiment 20000574 PARAMETER Experiment Name: At_100uM_ABA_Mutants__P Parameter: Timepoint (hr) Value: N/A
  misc_feature: MA Experiment 20000574 PARAMETER Experiment Name: At_100uM_ABA_Mutants__P Parameter: Tissue Value: Whole Plant
  misc_feature: MA Experiment 20000574 PARAMETER Experiment Name: At_100uM_ABA_Mutants__P Parameter: Treatment Value: None
atagaaaacaagtaaccaaagagagacgaagcaaaaacattcagagagaaaattcagcatttttgatagctcaagcacttgattctttccaaaggggtttcctgagatcacaaaggccaagtaacaatggcgaaaggagttgcagttttgaacagcagtgagggtgttacggggactatctttttcacccaggaaggcgatggtgtgaccactgtgagtggaacagtttctggccttaagcctggtcttcatggtttccatgtccatgctcttggtgacaccactaacggttgcatgtctactggtccacatttcaaccccgatggtaaaacacacggtgcccctgaggatgctaatcgacatgctggtgatctaggaaacatcactgttggagatgatggaactgccaccttcacaatcactgattgccagattcctcttactggaccaaactctattgttggtagggctgttgttgtccatgcagaccctgatgacctcggaaagggaggccatgaactcagcctggctactggaaacgcaggcggccgtgttgcttgcggcatcattggtctccagggctaaagctgctacgtttccaaagaagagattgatgtaataaggaggtccaaccttagacctgggtttggtagttgtgtgtatcttctggtgtgtggctaaaaacctatgagcttagtgtggctcaaagcatttttaattcagacagaaaacagagaaaattccgtacttttattatttcatgaataaaaaagagttgatttactgtt

SEQ ID NO: 22423 - protein, 152 aa, Arabidopsis thaliana
  peptide (1)..(152): Ceres Seq. ID no. 13580849
  misc_feature (2)..(152): Pfam Name: Copper/zinc superoxide dismutase (SODC) Pfam Description: Copper/zinc superoxide dismutase (SODC)
  misc_feature (1)..(152): Homolog of NCBI NO: 4102859 NR Description: cytoplasmic superoxide dismutase 1 [Populus
  misc_feature (1)..(152): Homolog of NCBI NO: 4102861 NR Description: copper/zinc-superoxide dismutase [Populus
  misc_feature (1)..(152): Homolog of NCBI NO: 12230587 NR Description: Superoxide dismutase [Cu-Zn] 2
  misc_feature (2)..(152): Homolog of NCBI NO: 134602 NR Description: SUPEROXIDE DISMUTASE [CU-ZN]
  misc_feature (1)..(152): Homolog of NCBI NO: 12230586 NR Description: Superoxide dismutase [Cu-Zn] 1
  misc_feature (1)..(152): Homolog of NCBI NO: 24421235 NR Description: superoxide dismutase [Brassica juncea]
  misc_feature (1)..(152): Homolog of NCBI NO: 3288850 NR Description: cytosolic Cu/Zn superoxide dismutase
  misc_feature (1)..(152): Homolog of NCBI NO: 2305111 NR Description: Cu/Zn superoxide dismutase [Raphanus sativus]
  misc_feature (1)..(146): Homolog of NCBI NO: 9802567 NR Description: F22O13.32 [Arabidopsis thaliana]
  misc_feature (1)..(152): Homolog of NCBI NO: 15223944 NR Description: copper/zinc superoxidase dismutase (CSD1)
MAKGVAVLNSSEGVTGTIFFTQEGDGVTTVSGTVSGLKPGLHGFHVHALGDTTNGCMSTGPHFNPDGKTHGAPEDANRHAGDLGNITVGDDGTATFTITDCQIPLTGPNSIVGRAVVVHADPDDLGKGGHELSLATGNAGGRVACGIIGLQG

SEQ ID NO: 22424 - protein, 96 aa, Arabidopsis thaliana
  peptide (1)..(96): Ceres Seq. ID no. 13580850
  misc_feature (1)..(96): Pfam Name: Copper/zinc superoxide dismutase (SODC) Pfam Description: Copper/zinc superoxide dismutase (SODC)
  misc_feature (1)..(96): Homolog of NCBI NO: 4102859 NR Description: cytoplasmic superoxide dismutase 1 [Populus
  misc_feature (1)..(96): Homolog of NCBI NO: 4102861 NR Description: copper/zinc-superoxide dismutase [Populus
  misc_feature (1)..(96): Homolog of NCBI NO: 12230587 NR Description: Superoxide dismutase [Cu-Zn] 2
  misc_feature (1)..(96): Homolog of NCBI NO: 134602 NR Description: SUPEROXIDE DISMUTASE [CU-ZN]
  misc_feature (1)..(96): Homolog of NCBI NO: 12230586 NR Description: Superoxide dismutase [Cu-Zn] 1
  misc_feature (1)..(96): Homolog of NCBI NO: 24421235 NR Description: superoxide dismutase [Brassica juncea]
  misc_feature (1)..(96): Homolog of NCBI NO: 3288850 NR Description: cytosolic Cu/Zn superoxide dismutase
  misc_feature (1)..(96): Homolog of NCBI NO: 2305111 NR Description: Cu/Zn superoxide dismutase [Raphanus sativus]
  misc_feature (1)..(90): Homolog of NCBI NO: 9802567 NR Description: F22O13.32 [Arabidopsis thaliana]
  misc_feature (1)..(96): Homolog of NCBI NO: 15223944 NR Description: copper/zinc superoxidase dismutase (CSD1)
MSTGPHFNPDGKTHGAPEDANRHAGDLGNITVGDDGTATFTITDCQIPLTGPNSIVGRAVVVHADPDDLGKGGHELSLATGNAGGRVACGIIGLQG

SEQ ID NO: 22425 - DNA, 1812 bp, Arabidopsis thaliana
  misc_feature (1)..(1812): Ceres Seq. ID no. 13497407
  misc_feature: MA Experiment ID: 108461 Result: Down-regulated in Transcription
  misc_feature: MA Experiment 108461 PARAMETER Experiment Name: At_Germinating_Seeds_cDNA_P Parameter: Age (day) Value: 1 vs. 0
  misc_feature: MA Experiment 108461 PARAMETER Experiment Name: At_Germinating_Seeds_cDNA_P Parameter: Tissue Value: Germinating Seeds
  misc_feature: MA Experiment ID: 108462 Result: Down-regulated in Transcription
  misc_feature: MA Experiment 108462 PARAMETER Experiment Name: At_Germinating_Seeds_cDNA_P Parameter: Age (day) Value: 2 vs. 0
  misc_feature: MA Experiment 108462 PARAMETER Experiment Name: At_Germinating_Seeds_cDNA_P Parameter: Tissue Value: Germinating Seeds
  misc_feature: MA Experiment ID: 108463 Result: Down-regulated in Transcription
  misc_feature: MA Experiment 108463 PARAMETER Experiment Name: At_Germinating_Seeds_cDNA_P Parameter: Age (day) Value: 3 vs. 0
  misc_feature: MA Experiment 108463 PARAMETER Experiment Name: At_Germinating_Seeds_cDNA_P Parameter: Tissue Value: Germinating Seeds
  misc_feature: MA Experiment ID: 108464 Result: Down-regulated in Transcription
  misc_feature: MA Experiment 108464 PARAMETER Experiment Name: At_Germinating_Seeds_cDNA_P Parameter: Age (day) Value: 4 vs. 0
  misc_feature: MA Experiment 108464 PARAMETER Experiment Name: At_Germinating_Seeds_cDNA_P Parameter: Tissue Value: Germinating Seeds
  misc_feature: MA Experiment ID: 20000180 Result: Down-regulated in Transcription
  misc_feature: MA Experiment 20000180 PARAMETER Experiment Name: At_Germinating_Seeds_P Parameter: Age (hr) Value: 24 vs. 0
  misc_feature: MA Experiment 20000180 PARAMETER Experiment Name: At_Germinating_Seeds_P Parameter: Tissue Value: Germinating Seeds
  misc_feature: MA Experiment ID: 20001557 Result: Up-regulated in Transcription
  misc_feature: MA Experiment 20001557 PARAMETER Experiment Name: At_Drought_Soil_Dry_P Parameter: Age (day) Value: 27
  misc_feature: MA Experiment 20001557 PARAMETER Experiment Name: At_Drought_Soil_Dry_P Parameter: Organism Value: A. thaliana
  misc_feature: MA Experiment 20001557 PARAMETER Experiment Name: At_Drought_Soil_Dry_P Parameter: Plant Line Value: WS
  misc_feature: MA Experiment 20001557 PARAMETER Experiment Name: At_Drought_Soil_Dry_P Parameter: Post Timepoint (hr) Value: 3
  misc_feature: MA Experiment 20001557 PARAMETER Experiment Name: At_Drought_Soil_Dry_P Parameter: Post-Treatment Value: Re-Water vs. No Drought
  misc_feature: MA Experiment 20001557 PARAMETER Experiment Name: At_Drought_Soil_Dry_P Parameter: Timepoint (day) Value: 13
  misc_feature: MA Experiment 20001557 PARAMETER Experiment Name: At_Drought_Soil_Dry_P Parameter: Treatment Value: Drought vs. No Drought
  misc_feature: MA Experiment ID: 20001905 Result: Up-regulated in Transcription
  misc_feature: MA Experiment 20001905 PARAMETER Experiment Name: At_Drought_Reproduction_P Parameter: Age (day) Value: 40
  misc_feature: MA Experiment 20001905 PARAMETER Experiment Name: At_Drought_Reproduction_P Parameter: Organism Value: A. thaliana
  misc_feature: MA Experiment 20001905 PARAMETER Experiment Name: At_Drought_Reproduction_P Parameter: Plant Line Value: WS
  misc_feature: MA Experiment 20001905 PARAMETER Experiment Name: At_Drought_Reproduction_P Parameter: Timepoint (day) Value: 10
  misc_feature: MA Experiment 20001905 PARAMETER Experiment Name: At_Drought_Reproduction_P Parameter: Tissue Value: Rosettes
  misc_feature: MA Experiment 20001905 PARAMETER Experiment Name: At_Drought_Reproduction_P Parameter: Treatment Value: Drought vs. No Drought
  misc_feature: MA Experiment ID: 20001911 Result: Up-regulated in Transcription
  misc_feature: MA Experiment 20001911 PARAMETER Experiment Name: At_Drought_Reproduction_P Parameter: Age (day) Value: 40
  misc_feature: MA Experiment 20001911 PARAMETER Experiment Name: At_Drought_Reproduction_P Parameter: Organism Value: A. thaliana
  misc_feature: MA Experiment 20001911 PARAMETER Experiment Name: At_Drought_Reproduction_P Parameter: Plant Line Value: WS
  misc_feature: MA Experiment 20001911 PARAMETER Experiment Name: At_Drought_Reproduction_P Parameter: Timepoint (day) Value: 10
  misc_feature: MA Experiment 20001911 PARAMETER Experiment Name: At_Drought_Reproduction_P Parameter: Tissue Value: Flowers
  misc_feature: MA Experiment 20001911 PARAMETER Experiment Name: At_Drought_Reproduction_P Parameter: Treatment Value: Drought vs. No Drought
ctctttagctatcttttttgtgttaccggttcaaatggccgccgtcgcagattccgttgagaacaacggttccataaacctccctgagaatgaaaaccttataccggcgggattcagtgccgccgcattgcttgacgaaaactctggcgctttccctgaattgaatcagcccgatagcttagctgctgctgagactaccttccccgatacgaacgattccgcggaggagaggtggccaggttggcctggtgattgcgtgtttcgtatgatcgttccggtgactaaagtcggagctattattggacgcaaaggtgactttataaagaagatgtgtgaggagactcgtgctcgtatcaaagtccttgatggtcctgttaatactcccgatcgcatcgtgttaatatctggtaaggaagaaccagaggcctacatgtcaccggcaatggacgcagtgttgagggtgtttagacgtgtttcagggttgcctgataatgatgatgatgatgttcaaaacgctggaagtgtcttctcttcagtgcgtttattagttgcttcaacgcaggcgattaatttgattggaaaacaaggatctttgattaagtctatagtagagaactctggtgcatcagttcgtattttatcagaagaggaaacaccgttttatgctgcacaggatgagaggatagtggatttgcaaggggaagctttaaagattcttaaagcattagaagccattgttggacaccttaggagatttttagttgaccatactgttgtccctctcttcgagaagcaatatctagctagggtctctcaaactcgccaggaagaaccgttagctgaaagcaagtcatctctgcatactatttcgtcaaatctaatggagcctgatttctccctcttagcacggagggaacctttgtttctggagcgcgattctcgggtggactcacgtgttcagccttcgggagtttctatctacagtcaggatcctgtactgtctgccagacactccccaggtcttgctcgggtttcttctgcttttgtgacacaggtatctcaaacgatgcaaataccattctcctatgcagaggatattattggtgtagaaggagctaatatagcctatatccgtcgaagaagcggagctaccataaccattaaagagagtccgcatcctgatcaaatcacagtggaaatcaaaggcacaacttctcaagtacaaactgctgagcaactaattcaagagttcatcatcaatcacaaggaaccagtttcggtatcagggggatatgccagaatcgactctggatatgtacctgcatatcctcctcagctaagtaaccgtcaagagccgctcccgagcacctacatgggcacagagccggtgcagtacagaccaacagcatactctcagctggggggtccttctacctacacaccgaccctgactgggcaaacttatggttcggaatatagaccagcttctgatgttggtggctacagcagttataatctttgaattggttgctgtgtttaagtttatttgcagattaatttctctttagagaaaggctcatttataatataatagagagggaaaaggaacaagttctagagagccaatgtagttgttggaatgtgtaatgtaaatctaggtgcccttttttttttttttttttcatacctcgatatatgtcacactacgtttctggtcaaataagaacatgttttttctttcttttttgtatgaatttgtttatcagaagtcagaatgattcagttttaagaaatttttagttaacgttttac

SEQ ID NO: 22426 - protein, 506 aa, Arabidopsis thaliana
  peptide (1)..(506): Ceres Seq. ID no. 13497408
  misc_feature (180)..(233): Pfam Name: KH domain Pfam Description: KH domain
  misc_feature (12)..(506): Homolog of NCBI NO: 15236094 NR Description: KH domain protein [Arabidopsis thaliana]
  misc_feature (147)..(251): Homolog of NCBI NO: 37535668 NR Description: putative RNA-binding protein
  misc_feature (46)..(423): Homolog of NCBI NO: 30696273 NR Description: KH domain protein [Arabidopsis thaliana]
  misc_feature (46)..(422): Homolog of NCBI NO: 8809595 NR Description: RNA-binding protein-like [Arabidopsis thaliana]
  misc_feature (198)..(263): Homolog of NCBI NO: 37534332 NR Description: unknown protein [Oryza sativa (japonica
  misc_feature (339)..(456): Homolog of NCBI NO: 37534332 NR Description: unknown protein [Oryza sativa (japonica
  misc_feature (70)..(213): Homolog of NCBI NO: 37534332 NR Description: unknown protein [Oryza sativa (japonica
  misc_feature (46)..(440): Homolog of NCBI NO: 15229321 NR Description: KH domain protein [Arabidopsis thaliana]
  misc_feature (45)..(444): Homolog of NCBI NO: 16924113 NR Description: putative RNA binding protein [Oryza sativa]
  misc_feature (35)..(493): Homolog of NCBI NO: 37536904 NR Description: putative nucleic acid binding protein
SLAIFFVLPVQMAAVADSVENNGSINLPENENLIPAGFSAAALLDENSGAFPELNQPDSLAAAETTFPDTNDSAEERWPGWPGDCVFRMIVPVTKVGAIIGRKGDFIKKMCEETRARIKVLDGPVNTPDRIVLISGKEEPEAYMSPAMDAVLRVFRRVSGLPDNDDDDVQNAGSVFSSVRLLVASTQAINLIGKQGSLIKSIVENSGASVRILSEEETPFYAAQDERIVDLQGEALKILKALEAIVGHLRRFLVDHTVVPLFEKQYLARVSQTRQEEPLAESKSSLHTISSNLMEPDFSLLARREPLFLERDSRVDSRVQPSGVSIYSQDPVLSARHSPGLARVSSAFVTQVSQTMQIPFSYAEDIIGVEGANIAYIRRRSGATITIKESPHPDQITVEIKGTTSQVQTAEQLIQEFIINHKEPVSVSGGYARIDSGYVPAYPPQLSNRQEPLPSTYMGTEPVQYRPTAYSQLGGPSTYTPTLTGQTYGSEYRPASDVGGYSSYNL

SEQ ID NO: 22427 - protein, 495 aa, Arabidopsis thaliana
  peptide (1)..(495): Ceres Seq. ID no. 13497409
  misc_feature (169)..(222): Pfam Name: KH domain Pfam Description: KH domain
  misc_feature (136)..(240): Homolog of NCBI NO: 37535668 NR Description: putative RNA-binding protein
  misc_feature (35)..(412): Homolog of NCBI NO: 30696273 NR Description: KH domain protein [Arabidopsis thaliana]
  misc_feature (35)..(411): Homolog of NCBI NO: 8809595 NR Description: RNA-binding protein-like [Arabidopsis thaliana]
  misc_feature (187)..(252): Homolog of NCBI NO: 37534332 NR Description: unknown protein [Oryza sativa (japonica
  misc_feature (328)..(445): Homolog of NCBI NO: 37534332 NR Description: unknown protein [Oryza sativa (japonica
  misc_feature (59)..(202): Homolog of NCBI NO: 37534332 NR Description: unknown protein [Oryza sativa (japonica
  misc_feature (35)..(429): Homolog of NCBI NO: 15229321 NR Description: KH domain protein [Arabidopsis thaliana]
  misc_feature (34)..(433): Homolog of NCBI NO: 16924113 NR Description: putative RNA binding protein [Oryza sativa]
  misc_feature (24)..(482): Homolog of NCBI NO: 37536904 NR Description: putative nucleic acid binding protein
  misc_feature (1)..(495): Homolog of NCBI NO: 15236094 NR Description: KH domain protein [Arabidopsis thaliana]
MAAVADSVENNGSINLPENENLIPAGFSAAALLDENSGAFPELNQPDSLAAAETTFPDTNDSAEERWPGWPGDCVFRMIVPVTKVGAIIGRKGDFIKKMCEETRARIKVLDGPVNTPDRIVLISGKEEPEAYMSPAMDAVLRVFRRVSGLPDNDDDDVQNAGSVFSSVRLLVASTQAINLIGKQGSLIKSIVENSGASVRILSEEETPFYAAQDERIVDLQGEALKILKALEAIVGHLRRFLVDHTVVPLFEKQYLARVSQTRQEEPLAESKSSLHTISSNLMEPDFSLLARREPLFLERDSRVDSRVQPSGVSIYSQDPVLSARHSPGLARVSSAFVTQVSQTMQIPFSYAEDIIGVEGANIAYIRRRSGATITIKESPHPDQITVEIKGTTSQVQTAEQLIQEFIINHKEPVSVSGGYARIDSGYVPAYPPQLSNRQEPLPSTYMGTEPVQYRPTAYSQLGGPSTYTPTLTGQTYGSEYRPASDVGGYSSYNL

SEQ ID NO: 22428 - protein, 418 aa, Arabidopsis thaliana
  peptide (1)..(418): Ceres Seq. ID no. 13497410
  misc_feature (92)..(145): Pfam Name: KH domain Pfam Description: KH domain
  misc_feature (59)..(163): Homolog of NCBI NO: 37535668 NR Description: putative RNA-binding protein
  misc_feature (1)..(335): Homolog of NCBI NO: 30696273 NR Description: KH domain protein [Arabidopsis thaliana]
  misc_feature (1)..(334): Homolog of NCBI NO: 8809595 NR Description: RNA-binding protein-like [Arabidopsis thaliana]
  misc_feature (110)..(175): Homolog of NCBI NO: 37534332 NR Description: unknown protein [Oryza sativa (japonica
  misc_feature (251)..(368): Homolog of NCBI NO: 37534332 NR Description: unknown protein [Oryza sativa (japonica
  misc_feature (1)..(125): Homolog of NCBI NO: 37534332 NR Description: unknown protein [Oryza sativa (japonica
  misc_feature (1)..(352): Homolog of NCBI NO: 15229321 NR Description: KH domain protein [Arabidopsis thaliana]
  misc_feature (1)..(356): Homolog of NCBI NO: 16924113 NR Description: putative RNA binding protein [Oryza sativa]
  misc_feature (1)..(405): Homolog of NCBI NO: 37536904 NR Description: putative nucleic acid binding protein
  misc_feature (1)..(418): Homolog of NCBI NO: 15236094 NR Description: KH domain protein [Arabidopsis thaliana]
MIVPVTKVGAIIGRKGDFIKKMCEETRARIKVLDGPVNTPDRIVLISGKEEPEAYMSPAMDAVLRVFRRVSGLPDNDDDDVQNAGSVFSSVRLLVASTQAINLIGKQGSLIKSIVENSGASVRILSEEETPFYAAQDERIVDLQGEALKILKALEAIVGHLRRFLVDHTVVPLFEKQYLARVSQTRQEEPLAESKSSLHTISSNLMEPDFSLLARREPLFLERDSRVDSRVQPSGVSIYSQDPVLSARHSPGLARVSSAFVTQVSQTMQIPFSYAEDIIGVEGANIAYIRRRSGATITIKESPHPDQITVEIKGTTSQVQTAEQLIQEFIINHKEPVSVSGGYARIDSGYVPAYPPQLSNRQEPLPSTYMGTEPVQYRPTAYSQLGGPSTYTPTLTGQTYGSEYRPASDVGGYSSYNL

SEQ ID NO: 22429 - DNA, 1259 bp, Arabidopsis thaliana
  misc_feature (1)..(1259): Ceres Seq. ID no. 12370993
  misc_feature: MA Experiment ID: 108462 Result: Down-regulated in Transcription
  misc_feature: MA Experiment 108462 PARAMETER Experiment Name: At_Germinating_Seeds_cDNA_P Parameter: Age (day) Value: 2 vs. 0
  misc_feature: MA Experiment 108462 PARAMETER Experiment Name: At_Germinating_Seeds_cDNA_P Parameter: Tissue Value: Germinating Seeds
  misc_feature: MA Experiment ID: 108464 Result: Down-regulated in Transcription
  misc_feature: MA Experiment 108464 PARAMETER Experiment Name: At_Germinating_Seeds_cDNA_P Parameter: Age (day) Value: 4 vs. 0
  misc_feature: MA Experiment 108464 PARAMETER Experiment Name: At_Germinating_Seeds_cDNA_P Parameter: Tissue Value: Germinating Seeds
  misc_feature: MA Experiment ID: 20000224 Result: Down-regulated in Transcription
  misc_feature: MA Experiment ID: 20001911 Result: Up-regulated in Transcription
  misc_feature: MA Experiment 20001911 PARAMETER Experiment Name: At_Drought_Reproduction_P Parameter: Age (day) Value: 40
  misc_feature: MA Experiment 20001911 PARAMETER Experiment Name: At_Drought_Reproduction_P Parameter: Organism Value: A. thaliana
  misc_feature: MA Experiment 20001911 PARAMETER Experiment Name: At_Drought_Reproduction_P Parameter: Plant Line Value: WS
  misc_feature: MA Experiment 20001911 PARAMETER Experiment Name: At_Drought_Reproduction_P Parameter: Timepoint (day) Value: 10
  misc_feature: MA Experiment 20001911 PARAMETER Experiment Name: At_Drought_Reproduction_P Parameter: Tissue Value: Flowers
  misc_feature: MA Experiment 20001911 PARAMETER Experiment Name: At_Drought_Reproduction_P Parameter: Treatment Value: Drought vs. No Drought
atttttagggtttcttcgtgccattgatattttgagaggcgaaggaaacaatacgattcagagagagacgagtgaaaatggctgcaaaagaaggtagtaggatttttgtcggtggtttatcgccggaagtgacagatagagaccttgaaagagcttttagccgcttcggagacattctcgattgtcagatcatgctggaaagagatactggtcgttcacgtggattcgggtttatcacttttgctgatcgccgcgctatggatgagtccatcagagagatgcatggaagggactttggtgatcgggtcatctcagtgaacagagctgaaccaaaactggggcgagatgatggagaaagtcatggctctagaggtggcagagacagtggctactcgattgctggaaaaggaagctttggtggaggtggaggtggaggtgggcgtgttggtgaagatgaatgcttcaagtgtggacgggttgggcactgggcccgtgattgtccttctgctggtggtggtcgtggaggacctgtaggtggtttttcttcacgtgctagtgcgtatggaggatctgatggacgtgttgaccgctatgctgaccgtgaccgctatgtggaccgcgaacgatacatagatgatcgatacgacggtgctgcacgctatggtgctagagacaggtttgacagcagagaagcctacataccccgtgatcgatacgccagtgacaggtatgcagccccggctgatcggtttgcaggtggtgatagatacagccgtggatcagaccgttatcctccagggagctatgacaaagctcggtcctttgagagagacatagccccgagtgcaggcagtgacaggtacggtggtggtagagctggtggtcccatccgtggaggaggagaggagggaagagggtttagaagcagagccggtgctccttatgagagaccgagcagaagtggtggtggtggagcttatccgtcgtcgtccacttttgaccgttattaagacacattaatgaaagaaagtgagaatgatgcttggttagagctctatacactcagtcgtgtgtgttgcttgtggtaatgaatatctctgtaagcgttataggtgtaaaagacttgtcttttttatttatatatgattagtttgcggacctgtttagctttgtattttgatcctttattatttttggtttgttttggaccataacatgacttttgagcttcgtcagtcaatgttaaaccttgcacacat

SEQ ID NO: 22430 - protein, 310 aa, Arabidopsis thaliana
  peptide (1)..(310): Ceres Seq. ID no. 12370994
  misc_feature (9)..(80): Pfam Name: RNA recognition motif. (a.k.a. RRM, RBD, or RNP domain) Pfam Description: RNA recognition motif. (a.k.a. RRM, RBD, or RNP
  misc_feature (8)..(167): Homolog of NCBI NO: 15235002 NR Description: glycine-rich RNA-binding protein 8 (GRP8)
  misc_feature (3)..(215): Homolog of NCBI NO: 2129944 NR Description: RNA-binding protein RZ-1 - wood tobacco
  misc_feature (125)..(310): Homolog of NCBI NO: 21954079 NR Description: putative RNA binding protein [Arabidopsis
  misc_feature (1)..(189): Homolog of NCBI NO: 12659074 NR Description: RNA-binding protein [Triticum aestivum]
  misc_feature (1)..(200): Homolog of NCBI NO: 40714682 NR Description: putative RNA binding protein
  misc_feature (8)..(248): Homolog of NCBI NO: 15231557 NR Description: glycine-rich RNA-binding protein
  misc_feature (1)..(296): Homolog of NCBI NO: 31712074 NR Description: putative RNA-binding protein
  misc_feature (7)..(293): Homolog of NCBI NO: 18406831 NR Description: glycine-rich RNA-binding protein
  misc_feature (1)..(295): Homolog of NCBI NO: 33146923 NR Description: glycine-rich RNA-binding protein-like
  misc_feature (1)..(310): Homolog of NCBI NO: 15237666 NR Description: glycine-rich RNA-binding protein
MAAKEGSRIFVGGLSPEVTDRDLERAFSRFGDILDCQIMLERDTGRSRGFGFITFADRRAMDESIREMHGRDFGDRVISVNRAEPKLGRDDGESHGSRGGRDSGYSIAGKGSFGGGGGGGGRVGEDECFKCGRVGHWARDCPSAGGGRGGPVGGFSSRASAYGGSDGRVDRYADRDRYVDRERYIDDRYDGAARYGARDRFDSREAYIPRDRYASDRYAAPADRFAGGDRYSRGSDRYPPGSYDKARSFERDIAPSAGSDRYGGGRAGGPIRGGGEEGRGFRSRAGAPYERPSRSGGGGAYPSSSTFDRY

SEQ ID NO: 22431 - protein, 272 aa, Arabidopsis thaliana
  peptide (1)..(272): Ceres Seq. ID no. 12370995
  misc_feature (1)..(129): Homolog of NCBI NO: 15235002 NR Description: glycine-rich RNA-binding protein 8 (GRP8)
  misc_feature (1)..(177): Homolog of NCBI NO: 2129944 NR Description: RNA-binding protein RZ-1 - wood tobacco
  misc_feature (87)..(272): Homolog of NCBI NO: 21954079 NR Description: putative RNA binding protein [Arabidopsis
  misc_feature (1)..(151): Homolog of NCBI NO: 12659074 NR Description: RNA-binding protein [Triticum aestivum]
  misc_feature (1)..(162): Homolog of NCBI NO: 40714682 NR Description: putative RNA binding protein
  misc_feature (1)..(210): Homolog of NCBI NO: 15231557 NR Description: glycine-rich RNA-binding protein
  misc_feature (1)..(258): Homolog of NCBI NO: 31712074 NR Description: putative RNA-binding protein
  misc_feature (1)..(255): Homolog of NCBI NO: 18406831 NR Description: glycine-rich RNA-binding protein
  misc_feature (1)..(257): Homolog of NCBI NO: 33146923 NR Description: glycine-rich RNA-binding protein-like
  misc_feature (1)..(272): Homolog of NCBI NO: 15237666 NR Description: glycine-rich RNA-binding protein
MLERDTGRSRGFGFITFADRRAMDESIREMHGRDFGDRVISVNRAEPKLGRDDGESHGSRGGRDSGYSIAGKGSFGGGGGGGGRVGEDECFKCGRVGHWARDCPSAGGGRGGPVGGFSSRASAYGGSDGRVDRYADRDRYVDRERYIDDRYDGAARYGARDRFDSREAYIPRDRYASDRYAAPADRFAGGDRYSRGSDRYPPGSYDKARSFERDIAPSAGSDRYGGGRAGGPIRGGGEEGRGFRSRAGAPYERPSRSGGGGAYPSSSTFDRY

SEQ ID NO: 22432 - protein, 250 aa, Arabidopsis thaliana
  peptide (1)..(250): Ceres Seq. ID no. 12370996
  misc_feature (1)..(107): Homolog of NCBI NO: 15235002 NR Description: glycine-rich RNA-binding protein 8 (GRP8)
  misc_feature (1)..(155): Homolog of NCBI NO: 2129944 NR Description: RNA-binding protein RZ-1 - wood tobacco
  misc_feature (65)..(250): Homolog of NCBI NO: 21954079 NR Description: putative RNA binding protein [Arabidopsis
  misc_feature (1)..(129): Homolog of NCBI NO: 12659074 NR Description: RNA-binding protein [Triticum aestivum]
  misc_feature (1)..(140): Homolog of NCBI NO: 40714682 NR Description: putative RNA binding protein
  misc_feature (1)..(188): Homolog of NCBI NO: 15231557 NR Description: glycine-rich RNA-binding protein
  misc_feature (1)..(236): Homolog of NCBI NO: 31712074 NR Description: putative RNA-binding protein
  misc_feature (1)..(233): Homolog of NCBI NO: 18406831 NR Description: glycine-rich RNA-binding protein
  misc_feature (1)..(235): Homolog of NCBI NO: 33146923 NR Description: glycine-rich RNA-binding protein-like
  misc_feature (1)..(250): Homolog of NCBI NO: 15237666 NR Description: glycine-rich RNA-binding protein
MDESIREMHGRDFGDRVISVNRAEPKLGRDDGESHGSRGGRDSGYSIAGKGSFGGGGGGGGRVGEDECFKCGRVGHWARDCPSAGGGRGGPVGGFSSRASAYGGSDGRVDRYADRDRYVDRERYIDDRYDGAARYGARDRFDSREAYIPRDRYASDRYAAPADRFAGGDRYSRGSDRYPPGSYDKARSFERDIAPSAGSDRYGGGRAGGPIRGGGEEGRGFRSRAGAPYERPSRSGGGGAYPSSSTFDRY

SEQ ID NO: 22433 - DNA, 1158 bp, Arabidopsis thaliana
  misc_feature (1)..(1158): Ceres Seq. ID no. 12326444
  misc_feature: MA Experiment ID: 108434 Result: Up-regulated in Transcription
  misc_feature: MA Experiment 108434 PARAMETER Experiment Name: At_Root_Tips_cDNA_P Parameter: Tissue Value: Root Tips
  misc_feature: MA Experiment ID: 108463 Result: Down-regulated in Transcription
  misc_feature: MA Experiment 108463 PARAMETER Experiment Name: At_Germinating_Seeds_cDNA_P Parameter: Age (day) Value: 3 vs. 0
  misc_feature: MA Experiment 108463 PARAMETER Experiment Name: At_Germinating_Seeds_cDNA_P Parameter: Tissue Value: Germinating Seeds
  misc_feature: MA Experiment ID: 108464 Result: Down-regulated in Transcription
  misc_feature: MA Experiment 108464 PARAMETER Experiment Name: At_Germinating_Seeds_cDNA_P Parameter: Age (day) Value: 4 vs. 0
  misc_feature: MA Experiment 108464 PARAMETER Experiment Name: At_Germinating_Seeds_cDNA_P Parameter: Tissue Value: Germinating Seeds
  misc_feature: MA Experiment ID: 108488 Result: Up-regulated in Transcription
  misc_feature: MA Experiment ID: 108579 Result: Up-regulated in Transcription
  misc_feature: MA Experiment 108579 PARAMETER Experiment Name: At_4deg_Cold_cDNA_P Parameter: Temperature (deg C) Value: 4 vs. 22
  misc_feature: MA Experiment 108579 PARAMETER Experiment Name: At_4deg_Cold_cDNA_P Parameter: Timepoint (hr) Value: 6
  misc_feature: MA Experiment 108579 PARAMETER Experiment Name: At_4deg_Cold_cDNA_P Parameter: Tissue Value: Aerial
  misc_feature: MA Experiment ID: 108595 Result: Down-regulated in Transcription
  misc_feature: MA Experiment 108595 PARAMETER Experiment Name: At_Ler-pi_Ovule_cDNA_P Parameter: Plant Line Value: null
  misc_feature: MA Experiment ID: 20000069 Result: Down-regulated in Transcription
  misc_feature: MA Experiment 20000069 PARAMETER Experiment Name: At_100uM_ABA_Mutants_cDNA_P Parameter: Plant Line Value: CS23
  misc_feature: MA Experiment 20000069 PARAMETER Experiment Name: At_100uM_ABA_Mutants_cDNA_P Parameter: Timepoint (hr) Value: 6
  misc_feature: MA Experiment 20000069 PARAMETER Experiment Name: At_100uM_ABA_Mutants_cDNA_P Parameter: Tissue Value: Aerial
  misc_feature: MA Experiment 20000069 PARAMETER Experiment Name: At_100uM_ABA_Mutants_cDNA_P Parameter: Treatment Value: 100uM ABA vs. No Treatment
  misc_feature: MA Experiment ID: 20000070 Result: Down-regulated in Transcription
  misc_feature: MA Experiment 20000070 PARAMETER Experiment Name: At_100uM_ABA_Mutants_cDNA_P Parameter: Plant Line Value: CS24
  misc_feature: MA Experiment 20000070 PARAMETER Experiment Name: At_100uM_ABA_Mutants_cDNA_P Parameter: Timepoint (hr) Value: 6
  misc_feature: MA Experiment 20000070 PARAMETER Experiment Name: At_100uM_ABA_Mutants_cDNA_P Parameter: Tissue Value: Aerial
  misc_feature: MA Experiment 20000070 PARAMETER Experiment Name: At_100uM_ABA_Mutants_cDNA_P Parameter: Treatment Value: 100uM ABA vs. No Treatment
  misc_feature: MA Experiment ID: 20000071 Result: Down-regulated in Transcription
  misc_feature: MA Experiment 20000071 PARAMETER Experiment Name: At_100uM_ABA_Mutants_cDNA_P Parameter: Plant Line Value: CS8104
  misc_feature: MA Experiment 20000071 PARAMETER Experiment Name: At_100uM_ABA_Mutants_cDNA_P Parameter: Timepoint (hr) Value: 6
  misc_feature: MA Experiment 20000071 PARAMETER Experiment Name: At_100uM_ABA_Mutants_cDNA_P Parameter: Tissue Value: Aerial
  misc_feature: MA Experiment 20000071 PARAMETER Experiment Name: At_100uM_ABA_Mutants_cDNA_P Parameter: Treatment Value: 100uM ABA vs. No Treatment
  misc_feature: MA Experiment ID: 20000087 Result: Down-regulated in Transcription
  misc_feature: MA Experiment 20000087 PARAMETER Experiment Name: At_100uM_ABA_Mutants_cDNA_P Parameter: Plant Line Value: WS
  misc_feature: MA Experiment 20000087 PARAMETER Experiment Name: At_100uM_ABA_Mutants_cDNA_P Parameter: Timepoint (hr) Value: 6
  misc_feature: MA Experiment 20000087 PARAMETER Experiment Name: At_100uM_ABA_Mutants_cDNA_P Parameter: Tissue Value: Aerial
  misc_feature: MA Experiment 20000087 PARAMETER Experiment Name: At_100uM_ABA_Mutants_cDNA_P Parameter: Treatment Value: 100uM ABA vs. No Treatment
  misc_feature: MA Experiment ID: 20000113 Result: Up-regulated in Transcription
  misc_feature: MA Experiment 20000113 PARAMETER Experiment Name: At_42deg_Heat_cDNA_P Parameter: Temperature (deg C) Value: 42 vs. 22
  misc_feature: MA Experiment 20000113 PARAMETER Experiment Name: At_42deg_Heat_cDNA_P Parameter: Timepoint (hr) Value: 8
  misc_feature: MA Experiment 20000113 PARAMETER Experiment Name: At_42deg_Heat_cDNA_P Parameter: Tissue Value: Aerial
  misc_feature: MA Experiment ID: 20000117 Result: Down-regulated in Transcription
  misc_feature: MA Experiment 20000117 PARAMETER Experiment Name: At_100uM_ABA_Mutants_cDNA_P Parameter: Plant Line Value: Columbia
  misc_feature: MA Experiment 20000117 PARAMETER Experiment Name: At_100uM_ABA_Mutants_cDNA_P Parameter: Timepoint (hr) Value: 6
  misc_feature: MA Experiment 20000117 PARAMETER Experiment Name: At_100uM_ABA_Mutants_cDNA_P Parameter: Tissue Value: Aerial
  misc_feature: MA Experiment 20000117 PARAMETER Experiment Name: At_100uM_ABA_Mutants_cDNA_P Parameter: Treatment Value: 100uM ABA vs. No Treatment
  misc_feature: MA Experiment ID: 20000224 Result: Up-regulated in Transcription
  misc_feature: MA Experiment ID: 20000437 Result: Down-regulated in Transcription
  misc_feature: MA Experiment 20000437 PARAMETER Experiment Name: At_Drought_P Parameter: Age (day) Value: 8
  misc_feature: MA Experiment 20000437 PARAMETER Experiment Name: At_Drought_P Parameter: Organism Value: A. thaliana
  misc_feature: MA Experiment 20000437 PARAMETER Experiment Name: At_Drought_P Parameter: Plant Line Value: WS
  misc_feature: MA Experiment 20000437 PARAMETER Experiment Name: At_Drought_P Parameter: Timepoint (hr) Value: 24
  misc_feature: MA Experiment 20000437 PARAMETER Experiment Name: At_Drought_P Parameter: Tissue Value: Whole Plant
  misc_feature: MA Experiment 20000437 PARAMETER Experiment Name: At_Drought_P Parameter: Treatment Value: Drought vs. No Drought
  misc_feature: MA Experiment ID: 20000438 Result: Up-regulated in Transcription
  misc_feature: MA Experiment 20000438 PARAMETER Experiment Name: At_Shoots__P Parameter: Age (day) Value: 14
  misc_feature: MA Experiment 20000438 PARAMETER Experiment Name: At_Shoots__P Parameter: Tissue Value: Shoots vs. Whole Plant
  misc_feature: MA Experiment ID: 20000794 Result: Down-regulated in Transcription
  misc_feature: MA Experiment 20000794 PARAMETER Experiment Name: At_Petals_P Parameter: Age (day) Value: 23-25 days
  misc_feature: MA Experiment 20000794 PARAMETER Experiment Name: At_Petals_P Parameter: Plant Line Value: WS
  misc_feature: MA Experiment 20000794 PARAMETER Experiment Name: At_Petals_P Parameter: Tissue Value: Petals vs. Whole plant
  misc_feature: MA Experiment ID: 20001248 Result: Down-regulated in Transcription
  misc_feature: MA Experiment 20001248 PARAMETER Experiment Name: At_Far-red-induction_P Parameter: Age (day) Value: 7
  misc_feature: MA Experiment 20001248 PARAMETER Experiment Name: At_Far-red-induction_P Parameter: Light Value: Far-red vs. White
  misc_feature: MA Experiment 20001248 PARAMETER Experiment Name: At_Far-red-induction_P Parameter: Organism Value: A. thaliana
  misc_feature: MA Experiment 20001248 PARAMETER Experiment Name: At_Far-red-induction_P Parameter: Plant Line Value: Columbia
  misc_feature: MA Experiment 20001248 PARAMETER Experiment Name: At_Far-red-induction_P Parameter: Timepoint (hr) Value: 4
  misc_feature: MA Experiment 20001248 PARAMETER Experiment Name: At_Far-red-induction_P Parameter: Tissue Value: Whole Plant
  misc_feature: MA Experiment ID: 20001450 Result: Down-regulated in Transcription
  misc_feature: MA Experiment 20001450 PARAMETER Experiment Name: At_Far-red-induction_P Parameter: Age (day) Value: 7
  misc_feature: MA Experiment 20001450 PARAMETER Experiment Name: At_Far-red-induction_P Parameter: Light Value: Far-red vs. White
  misc_feature: MA Experiment 20001450 PARAMETER Experiment Name: At_Far-red-induction_P Parameter: Organism Value: A. thaliana
  misc_feature: MA Experiment 20001450 PARAMETER Experiment Name: At_Far-red-induction_P Parameter: Plant Line Value: Columbia
  misc_feature: MA Experiment 20001450 PARAMETER Experiment Name: At_Far-red-induction_P Parameter: Timepoint (hr) Value: 8
  misc_feature: MA Experiment 20001450 PARAMETER Experiment Name: At_Far-red-induction_P Parameter: Tissue Value: Whole Plant
  misc_feature: MA Experiment ID: 20001451 Result: Down-regulated in Transcription
  misc_feature: MA Experiment 20001451 PARAMETER Experiment Name: At_Far-red-induction_P Parameter: Age (day) Value: 7
  misc_feature: MA Experiment 20001451 PARAMETER Experiment Name: At_Far-red-induction_P Parameter: Light Value: Far-red vs. White
  misc_feature: MA Experiment 20001451 PARAMETER Experiment Name: At_Far-red-induction_P Parameter: Organism Value: A. thaliana
  misc_feature: MA Experiment 20001451 PARAMETER Experiment Name: At_Far-red-induction_P Parameter: Plant Line Value: Columbia
  misc_feature: MA Experiment 20001451 PARAMETER Experiment Name: At_Far-red-induction_P Parameter: Timepoint (hr) Value: 24
  misc_feature: MA Experiment 20001451 PARAMETER Experiment Name: At_Far-red-induction_P Parameter: Tissue Value: Whole Plant
  misc_feature: MA Experiment ID: 20001558 Result: Up-regulated in Transcription
  misc_feature: MA Experiment 20001558 PARAMETER Experiment Name: At_Drought_Soil_Dry_P Parameter: Age (day) Value: 27
  misc_feature: MA Experiment 20001558 PARAMETER Experiment Name: At_Drought_Soil_Dry_P Parameter: Organism Value: A. thaliana
  misc_feature: MA Experiment 20001558 PARAMETER Experiment Name: At_Drought_Soil_Dry_P Parameter: Plant Line Value: WS
  misc_feature: MA Experiment 20001558 PARAMETER Experiment Name: At_Drought_Soil_Dry_P Parameter: Post Timepoint (hr) Value: 6
  misc_feature: MA Experiment 20001558 PARAMETER Experiment Name: At_Drought_Soil_Dry_P Parameter: Post-Treatment Value: Re-Water vs. No Drought
  misc_feature: MA Experiment 20001558 PARAMETER Experiment Name: At_Drought_Soil_Dry_P Parameter: Timepoint (day) Value: 13
  misc_feature: MA Experiment 20001558 PARAMETER Experiment Name: At_Drought_Soil_Dry_P Parameter: Treatment Value: Drought vs. No Drought
  misc_feature: MA Experiment ID: 20001560 Result: Up-regulated in Transcription
  misc_feature: MA Experiment 20001560 PARAMETER Experiment Name: At_Drought_Soil_Dry_P Parameter: Age (day) Value: 28
  misc_feature: MA Experiment 20001560 PARAMETER Experiment Name: At_Drought_Soil_Dry_P Parameter: Organism Value: A. thaliana
  misc_feature: MA Experiment 20001560 PARAMETER Experiment Name: At_Drought_Soil_Dry_P Parameter: Plant Line Value: WS
  misc_feature: MA Experiment 20001560 PARAMETER Experiment Name: At_Drought_Soil_Dry_P Parameter: Post Timepoint (hr) Value: None
  misc_feature: MA Experiment 20001560 PARAMETER Experiment Name: At_Drought_Soil_Dry_P Parameter: Post-Treatment Value: None
  misc_feature: MA Experiment 20001560 PARAMETER Experiment Name: At_Drought_Soil_Dry_P Parameter: Timepoint (day) Value: 14
  misc_feature: MA Experiment 20001560 PARAMETER Experiment Name: At_Drought_Soil_Dry_P Parameter: Treatment Value: Drought vs. No Drought
  misc_feature: MA Experiment ID: 20001757 Result: Up-regulated in Transcription
  misc_feature: MA Experiment 20001757 PARAMETER Experiment Name: At_50mM_NH4NO3_L-to-H_P Parameter: Timepoint (hr) Value: 6
  misc_feature: MA Experiment 20001757 PARAMETER Experiment Name: At_50mM_NH4NO3_L-to-H_P Parameter: Tissue Value: Leaf
  misc_feature: MA Experiment 20001757 PARAMETER Experiment Name: At_50mM_NH4NO3_L-to-H_P Parameter: Treatment Value: 50mM NH4NO3 vs 100mM Mannitol
  misc_feature: MA Experiment ID: 20001905 Result: Down-regulated in Transcription
  misc_feature: MA Experiment 20001905 PARAMETER Experiment Name: At_Drought_Reproduction_P Parameter: Age (day) Value: 40
  misc_feature: MA Experiment 20001905 PARAMETER Experiment Name: At_Drought_Reproduction_P Parameter: Organism Value: A. thaliana
  misc_feature: MA Experiment 20001905 PARAMETER Experiment Name: At_Drought_Reproduction_P Parameter: Plant Line Value: WS
  misc_feature: MA Experiment 20001905 PARAMETER Experiment Name: At_Drought_Reproduction_P Parameter: Timepoint (day) Value: 10
  misc_feature: MA Experiment 20001905 PARAMETER Experiment Name: At_Drought_Reproduction_P Parameter: Tissue Value: Rosettes
  misc_feature: MA Experiment 20001905 PARAMETER Experiment Name: At_Drought_Reproduction_P Parameter: Treatment Value: Drought vs. No Drought
  misc_feature: MA Experiment ID: 20001911 Result: Down-regulated in Transcription
  misc_feature: MA Experiment 20001911 PARAMETER Experiment Name: At_Drought_Reproduction_P Parameter: Age (day) Value: 40
  misc_feature: MA Experiment 20001911 PARAMETER Experiment Name: At_Drought_Reproduction_P Parameter: Organism Value: A. thaliana
  misc_feature: MA Experiment 20001911 PARAMETER Experiment Name: At_Drought_Reproduction_P Parameter: Plant Line Value: WS
  misc_feature: MA Experiment 20001911 PARAMETER Experiment Name: At_Drought_Reproduction_P Parameter: Timepoint (day) Value: 10
  misc_feature: MA Experiment 20001911 PARAMETER Experiment Name: At_Drought_Reproduction_P Parameter: Tissue Value: Flowers
  misc_feature: MA Experiment 20001911 PARAMETER Experiment Name: At_Drought_Reproduction_P Parameter: Treatment Value: Drought vs. No Drought
atttttgtgttctgtctttcttggtggtgtgataaagaataaagagagccagtcgagggtaaaacgaaaggccaccattttcaatctttccacaataatggcggctactagagtgttaactgcagcgacggccgtgacccaaaccacctcctgtttcctcgccaagcaagctttcactcttccggcgaagaaatcctgcggcggatttggtggtctctgcttcagcagaagagctttggtgttgaaatctaagagacctttctcctgcagtgccatttacaatcctcaggttaaggttcaagaagaaggtccggccgaatccctagattatcgagttttcttcctcgatggttctggaaagaaggtttctccatggcatgatataccattgaccttaggcgatggagttttcaactttatagttgaaatacctaaagagtcaaaagcaaaaatggaggttgctactgatgaagatttcactcctattaagcaggatactaagaaggggaagctcagatattatccgtataacattaactggaactatgggttgcttcctcaaacatgggaagatccatctcatgcaaattctgaagttgaaggatgttttggggataatgatccagttgatgttgttgagattggtgaaacacaaaggaagataggcgatattctaaagataaagcctttagctgctttagctatgattgatgaaggtgagctagactggaagattgttgccatttctttggatgacccaaaagctcatcttgtgaatgatgttgaagatgttgagaaacatttcccgggtacactaacagccattagagactggtttagagactacaagatcccagatggaaagcctgctaacagatttggtcttggagacaaaccagcaaacaaagactatgctttgaagatcatccaagaaacaaatgaatcatgggctaaacttgtgaagagatcagttgatgctggagacctttcactttactgaacatattttgcaatgtcgacttatgaggtcgaataatgaatagactcaagattcctatatcattcttgttgtttcctttcaattgagatgtaaacattgggatttggattttgtttttcaccattgatgactgagaagtaataaaatgactttctgcg

SEQ ID NO: 22434 - protein, 332 aa, Arabidopsis thaliana
  peptide (1)..(332): Ceres Seq. ID no. 12326445
  misc_feature (138)..(318): Pfam Name: Inorganic pyrophosphatase Pfam Description: Inorganic pyrophosphatase
  misc_feature (100)..(332): Homolog of NCBI NO: 11056044 NR Description: inorganic pyrophosphatase
  misc_feature (100)..(332): Homolog of NCBI NO: 34852506 NR Description: similar to RIKEN cDNA 2010317E03 [Rattus
  misc_feature (107)..(332): Homolog of NCBI NO: 26353394 NR Description: unnamed protein product [Mus musculus]
  misc_feature (100)..(332): Homolog of NCBI NO: 27754065 NR Description: RIKEN cDNA 2010317E03 [Mus musculus]
  misc_feature (100)..(332): Homolog of NCBI NO: 4583153 NR Description: cytosolic inorganic pyrophosphatase [Homo sapiens]
  misc_feature (99)..(330): Homolog of NCBI NO: 32450373 NR Description: Unknown (protein for IMAGE:6880302) [Xenopus
  misc_feature (80)..(323): Homolog of NCBI NO: 29420791 NR Description: inorganic pyrophosphatase [Ascaris suum]
  misc_feature (99)..(331): Homolog of NCBI NO: 14571671 NR Description: inorganic pyrophosphatase precursor
  misc_feature (33)..(332): Homolog of NCBI NO: 21592878 NR Description: inorganic pyrophosphatase-like protein
  misc_feature (33)..(332): Homolog of NCBI NO: 15242465 NR Description: inorganic pyrophosphatase - like protein
FLCSVFLGGVIKNKESQSRVKRKATIFNLSTIMAATRVLTAATAVTQTTSCFLAKQAFTLPAKKSCGGFGGLCFSRRALVLKSKRPFSCSAIYNPQVKVQEEGPAESLDYRVFFLDGSGKKVSPWHDIPLTLGDGVFNFIVEIPKESKAKMEVATDEDFTPIKQDTKKGKLRYYPYNINWNYGLLPQTWEDPSHANSEVEGCFGDNDPVDVVEIGETQRKIGDILKIKPLAALAMIDEGELDWKIVAISLDDPKAHLVNDVEDVEKHFPGTLTAIRDWFRDYKIPDGKPANRFGLGDKPANKDYALKIIQETNESWAKLVKRSVDAGDLSLY

SEQ ID NO: 22435 - protein, 300 aa, Arabidopsis thaliana
  peptide (1)..(300): Ceres Seq. ID no. 12326446
  misc_feature (106)..(286): Pfam Name: Inorganic pyrophosphatase Pfam Description: Inorganic pyrophosphatase
  misc_feature (68)..(300): Homolog of NCBI NO: 11056044 NR Description: inorganic pyrophosphatase
  misc_feature (68)..(300): Homolog of NCBI NO: 34852506 NR Description: similar to RIKEN cDNA 2010317E03 [Rattus
  misc_feature (75)..(300): Homolog of NCBI NO: 26353394 NR Description: unnamed protein product [Mus musculus]
  misc_feature (68)..(300): Homolog of NCBI NO: 27754065 NR Description: RIKEN cDNA 2010317E03 [Mus musculus]
  misc_feature (68)..(300): Homolog of NCBI NO: 4583153 NR Description: cytosolic inorganic pyrophosphatase [Homo sapiens]
  misc_feature (67)..(298): Homolog of NCBI NO: 32450373 NR Description: Unknown (protein for IMAGE:6880302) [Xenopus
  misc_feature (48)..(291): Homolog of NCBI NO: 29420791 NR Description: inorganic pyrophosphatase [Ascaris suum]
  misc_feature (67)..(299): Homolog of NCBI NO: 14571671 NR Description: inorganic pyrophosphatase precursor
  misc_feature (1)..(300): Homolog of NCBI NO: 21592878 NR Description: inorganic pyrophosphatase-like protein
  misc_feature (1)..(300): Homolog of NCBI NO: 15242465 NR Description: inorganic pyrophosphatase - like protein
MAATRVLTAATAVTQTTSCFLAKQAFTLPAKKSCGGFGGLCFSRRALVLKSKRPFSCSAIYNPQVKVQEEGPAESLDYRVFFLDGSGKKVSPWHDIPLTLGDGVFNFIVEIPKESKAKMEVATDEDFTPIKQDTKKGKLRYYPYNINWNYGLLPQTWEDPSHANSEVEGCFGDNDPVDVVEIGETQRKIGDILKIKPLAALAMIDEGELDWKIVAISLDDPKAHLVNDVEDVEKHFPGTLTAIRDWFRDYKIPDGKPANRFGLGDKPANKDYALKIIQETNESWAKLVKRSVDAGDLSLY

SEQ ID NO: 22436 - protein, 182 aa, Arabidopsis thaliana
  peptide (1)..(182): Ceres Seq. ID no. 12326447
  misc_feature (1)..(168): Pfam Name: Inorganic pyrophosphatase Pfam Description: Inorganic pyrophosphatase
  misc_feature (1)..(182): Homolog of NCBI NO: 21592878 NR Description: inorganic pyrophosphatase-like protein
  misc_feature (1)..(182): Homolog of NCBI NO: 11056044 NR Description: inorganic pyrophosphatase
  misc_feature (1)..(182): Homolog of NCBI NO: 26353394 NR Description: unnamed protein product [Mus musculus]
  misc_feature (1)..(182): Homolog of NCBI NO: 4583153 NR Description: cytosolic inorganic pyrophosphatase [Homo sapiens]
  misc_feature (1)..(173): Homolog of NCBI NO: 29420791 NR Description: inorganic pyrophosphatase [Ascaris suum]
  misc_feature (1)..(181): Homolog of NCBI NO: 14571671 NR Description: inorganic pyrophosphatase precursor
  misc_feature (1)..(180): Homolog of NCBI NO: 32450373 NR Description: Unknown (protein for IMAGE:6880302) [Xenopus
  misc_feature (1)..(182): Homolog of NCBI NO: 27754065 NR Description: RIKEN cDNA 2010317E03 [Mus musculus]
  misc_feature (1)..(182): Homolog of NCBI NO: 34852506 NR Description: similar to RIKEN cDNA 2010317E03 [Rattus
  misc_feature (1)..(182): Homolog of NCBI NO: 15242465 NR Description: inorganic pyrophosphatase - like protein
MEVATDEDFTPIKQDTKKGKLRYYPYNINWNYGLLPQTWEDPSHANSEVEGCFGDNDPVDVVEIGETQRKIGDILKIKPLAALAMIDEGELDWKIVAISLDDPKAHLVNDVEDVEKHFPGTLTAIRDWFRDYKIPDGKPANRFGLGDKPANKDYALKIIQETNESWAKLVKRSVDAGDLSLY

SEQ ID NO: 22437 - DNA, 1336 bp, Arabidopsis thaliana
  misc_feature (1)..(1336): Ceres Seq. ID no. 13575213
  misc_feature: MA Experiment ID: 20000184 Result: Down-regulated in Transcription
  misc_feature: MA Experiment 20000184 PARAMETER Experiment Name: At_Shoots__P Parameter: Age (day) Value: 7
  misc_feature: MA Experiment 20000184 PARAMETER Experiment Name: At_Shoots__P Parameter: Tissue Value: Shoots vs. Whole Plant
  misc_feature: MA Experiment ID: 20000227 Result: Up-regulated in Transcription
  misc_feature: MA Experiment 20000227 PARAMETER Experiment Name: At_Root-Tips-vs-Tops_P Parameter: Tissue Value: Root Tips vs. Root Tops
agtttctctcttccgcgtctctccttctcgttatcctgcaaattagggtttaagtaagaaaaaaaagctagagaagtatctcgatctcttcttctgttagattctgctttcctttgagatttgctagtgtaatcgtaacctccgaagacccaagatggctcgtaatgaagagaaagcacagtcgatgctcaacagattcatcacccagaaagaatctgagaagaagaagccaaaagagcgtcgaccttacctcgcatcagaatgtagagatctagctgaagcagacaaatggagacagcaaattttgagagagatcggtagcaaagtagctgagattcagaacgaaggattaggagagcacagacttcgagatctaaacgatgagattaacaagcttctcagggagagatatcattgggagcggcgaatcgttgagctaggtggtcacaattactcgaaacattcggcgaagatgacggatctagaaggtaacataatcgatgtacctaaccctagtggtcgtggtcctggttatcgttacttcggagctgctaagaaacttcctggtgttagagagctttttgagaagcctcctgagctgaggaagcgtaaaactaggtatgatatatataaaaggattgatgctagctattatgggtatagagatgatgaagatggtattttggagaagttggagaggaaatctgaaggagggatgaggaaaagatcggtggaggagtggcggagattagatgaggttaggaaggaagctaggaaaggtgctagtgaggttgtgagtgttggagctgcagctgctgcggcgagggaagtgttgtttgaggaggaggaggatgttgttgaggaggagaggatggagagggagaaagaggaggagaaagagagggaatttgtggttcatgttccgttgcctgatgagaaggagattgagaagatggtgttggagaagaagaagatggatctgcttagtaagtatgctagtgaagatttggttgagcagcagactgaggctaaatccatgctcaatattcatagatagaaagatgctctgttttaccaacaaactcagccgcgatggtctcttgcctaaagaagaaacgatgttgggcgtttgaaatatgatttcatggaaacaaatgtgaaagactcaaggagaagatacaatgtcacttggaactgaactagtgtattctattatgtagctcgacttttgtatctttatacttctgaatgtaatgctcattgcctgaggtttatacattgttcctttggctctaactagattggtgctatgcagagacataagttgagaccaacc

SEQ ID NO: 22438 - protein, 300 aa, Arabidopsis thaliana
  peptide (1)..(300): Ceres Seq. ID no. 13575214
  misc_feature (1)..(281): Pfam Name: Isy1-like splicing family Pfam Description: Isy1-like splicing family
  misc_feature (7)..(281): Homolog of NCBI NO: 24644974 NR Description: CG9667-PA [Drosophila melanogaster]
  misc_feature (1)..(281): Homolog of NCBI NO: 19527549 NR Description: RE31520p [Drosophila melanogaster]
  misc_feature (1)..(296): Homolog of NCBI NO: 13938521 NR Description: Unknown (protein for MGC:2431) [Homo sapiens]
  misc_feature (1)..(296): Homolog of NCBI NO: 20149304 NR Description: KIAA1160 protein [Homo sapiens]
  misc_feature (1)..(296): Homolog of NCBI NO: 6330157 NR Description: KIAA1160 protein [Homo sapiens]
  misc_feature (1)..(296): Homolog of NCBI NO: 12857516 NR Description: unnamed protein product [Mus musculus]
  misc_feature (1)..(296): Homolog of NCBI NO: 20149316 NR Description: expressed sequence AU020769 [Mus musculus]
  misc_feature (1)..(296): Homolog of NCBI NO: 34856385 NR Description: similar to RIKEN cDNA 5830446M03 [Rattus
  misc_feature (1)..(298): Homolog of NCBI NO: 38174132 NR Description: Unknown (protein for MGC:76019) [Silurana
  misc_feature (1)..(300): Homolog of NCBI NO: 15230193 NR Description: expressed protein [Arabidopsis thaliana]
MARNEEKAQSMLNRFITQKESEKKKPKERRPYLASECRDLAEADKWRQQILREIGSKVAEIQNEGLGEHRLRDLNDEINKLLRERYHWERRIVELGGHNYSKHSAKMTDLEGNIIDVPNPSGRGPGYRYFGAAKKLPGVRELFEKPPELRKRKTRYDIYKRIDASYYGYRDDEDGILEKLERKSEGGMRKRSVEEWRRLDEVRKEARKGASEVVSVGAAAAAAREVLFEEEEDVVEEERMEREKEEEKEREFVVHVPLPDEKEIEKMVLEKKKMDLLSKYASEDLVEQQTEAKSMLNIHR

SEQ ID NO: 22439 - protein, 290 aa, Arabidopsis thaliana
  peptide (1)..(290): Ceres Seq. ID no. 13575215
  misc_feature (1)..(271): Pfam Name: Isy1-like splicing family Pfam Description: Isy1-like splicing family
  misc_feature (1)..(271): Homolog of NCBI NO: 24644974 NR Description: CG9667-PA [Drosophila melanogaster]
  misc_feature (1)..(271): Homolog of NCBI NO: 19527549 NR Description: RE31520p [Drosophila melanogaster]
  misc_feature (1)..(286): Homolog of NCBI NO: 13938521 NR Description: Unknown (protein for MGC:2431) [Homo sapiens]
  misc_feature (1)..(286): Homolog of NCBI NO: 20149304 NR Description: KIAA1160 protein [Homo sapiens]
  misc_feature (1)..(286): Homolog of NCBI NO: 6330157 NR Description: KIAA1160 protein [Homo sapiens]
  misc_feature (1)..(286): Homolog of NCBI NO: 12857516 NR Description: unnamed protein product [Mus musculus]
  misc_feature (1)..(286): Homolog of NCBI NO: 20149316 NR Description: expressed sequence AU020769 [Mus musculus]
  misc_feature (1)..(286): Homolog of NCBI NO: 34856385 NR Description: similar to RIKEN cDNA 5830446M03 [Rattus
  misc_feature (1)..(288): Homolog of NCBI NO: 38174132 NR Description: Unknown (protein for MGC:76019) [Silurana
  misc_feature (1)..(290): Homolog of NCBI NO: 15230193 NR Description: expressed protein [Arabidopsis thaliana]
MLNRFITQKESEKKKPKERRPYLASECRDLAEADKWRQQILREIGSKVAEIQNEGLGEHRLRDLNDEINKLLRERYHWERRIVELGGHNYSKHSAKMTDLEGNIIDVPNPSGRGPGYRYFGAAKKLPGVRELFEKPPELRKRKTRYDIYKRIDASYYGYRDDEDGILEKLERKSEGGMRKRSVEEWRRLDEVRKEARKGASEVVSVGAAAAAAREVLFEEEEDVVEEERMEREKEEEKEREFVVHVPLPDEKEIEKMVLEKKKMDLLSKYASEDLVEQQTEAKSMLNIHR

SEQ ID NO: 22440 - protein, 194 aa, Arabidopsis thaliana
  peptide (1)..(194): Ceres Seq. ID no. 13575216
  misc_feature (1)..(175): Pfam Name: Isy1-like splicing family Pfam Description: Isy1-like splicing family
  misc_feature (1)..(175): Homolog of NCBI NO: 24644974 NR Description: CG9667-PA [Drosophila melanogaster]
  misc_feature (1)..(175): Homolog of NCBI NO: 19527549 NR Description: RE31520p [Drosophila melanogaster]
  misc_feature (1)..(190): Homolog of NCBI NO: 13938521 NR Description: Unknown (protein for MGC:2431) [Homo sapiens]
  misc_feature (1)..(190): Homolog of NCBI NO: 20149304 NR Description: KIAA1160 protein [Homo sapiens]
  misc_feature (1)..(190): Homolog of NCBI NO: 6330157 NR Description: KIAA1160 protein [Homo sapiens]
  misc_feature (1)..(190): Homolog of NCBI NO: 12857516 NR Description: unnamed protein product [Mus musculus]
  misc_feature (1)..(190): Homolog of NCBI NO: 20149316 NR Description: expressed sequence AU020769 [Mus musculus]
  misc_feature (1)..(190): Homolog of NCBI NO: 34856385 NR Description: similar to RIKEN cDNA 5830446M03 [Rattus
  misc_feature (1)..(192): Homolog of NCBI NO: 38174132 NR Description: Unknown (protein for MGC:76019) [Silurana
  misc_feature (1)..(194): Homolog of NCBI NO: 15230193 NR Description: expressed protein [Arabidopsis thaliana]
MTDLEGNIIDVPNPSGRGPGYRYFGAAKKLPGVRELFEKPPELRKRKTRYDIYKRIDASYYGYRDDEDGILEKLERKSEGGMRKRSVEEWRRLDEVRKEARKGASEVVSVGAAAAAAREVLFEEEEDVVEEERMEREKEEEKEREFVVHVPLPDEKEIEKMVLEKKKMDLLSKYASEDLVEQQTEAKSMLNIHR

SEQ ID NO: 22441 - DNA, 1100 bp, Arabidopsis thaliana
  misc_feature (1)..(1100): Ceres Seq. ID no. 12335074
  misc_feature: MA Experiment ID: 108434 Result: Down-regulated in Transcription
  misc_feature: MA Experiment 108434 PARAMETER Experiment Name: At_Root_Tips_cDNA_P Parameter: Tissue Value: Root Tips
  misc_feature: MA Experiment ID: 108462 Result: Down-regulated in Transcription
  misc_feature: MA Experiment 108462 PARAMETER Experiment Name: At_Germinating_Seeds_cDNA_P Parameter: Age (day) Value: 2 vs. 0
  misc_feature: MA Experiment 108462 PARAMETER Experiment Name: At_Germinating_Seeds_cDNA_P Parameter: Tissue Value: Germinating Seeds
  misc_feature: MA Experiment ID: 108463 Result: Down-regulated in Transcription
  misc_feature: MA Experiment 108463 PARAMETER Experiment Name: At_Germinating_Seeds_cDNA_P Parameter: Age (day) Value: 3 vs. 0
  misc_feature: MA Experiment 108463 PARAMETER Experiment Name: At_Germinating_Seeds_cDNA_P Parameter: Tissue Value: Germinating Seeds
  misc_feature: MA Experiment ID: 108464 Result: Down-regulated in Transcription
  misc_feature: MA Experiment 108464 PARAMETER Experiment Name: At_Germinating_Seeds_cDNA_P Parameter: Age (day) Value: 4 vs. 0
  misc_feature: MA Experiment 108464 PARAMETER Experiment Name: At_Germinating_Seeds_cDNA_P Parameter: Tissue Value: Germinating Seeds
  misc_feature: MA Experiment ID: 108573 Result: Down-regulated in Transcription
  misc_feature: MA Experiment 108573 PARAMETER Experiment Name: At_Drought_cDNA_P Parameter: Timepoint (hr) Value: 6
  misc_feature: MA Experiment 108573 PARAMETER Experiment Name: At_Drought_cDNA_P Parameter: Tissue Value: Aerial
  misc_feature: MA Experiment 108573 PARAMETER Experiment Name: At_Drought_cDNA_P Parameter: Treatment Value: Drought vs. No Drought
  misc_feature: MA Experiment ID: 108579 Result: Up-regulated in Transcription
  misc_feature: MA Experiment 108579 PARAMETER Experiment Name: At_4deg_Cold_cDNA_P Parameter: Temperature (deg C) Value: 4 vs. 22
  misc_feature: MA Experiment 108579 PARAMETER Experiment Name: At_4deg_Cold_cDNA_P Parameter: Timepoint (hr) Value: 6
  misc_feature: MA Experiment 108579 PARAMETER Experiment Name: At_4deg_Cold_cDNA_P Parameter: Tissue Value: Aerial
  misc_feature: MA Experiment ID: 108595 Result: Down-regulated in Transcription
  misc_feature: MA Experiment 108595 PARAMETER Experiment Name: At_Ler-pi_Ovule_cDNA_P Parameter: Plant Line Value: null
  misc_feature: MA Experiment ID: 20000437 Result: Down-regulated in Transcription
  misc_feature: MA Experiment 20000437 PARAMETER Experiment Name: At_Drought_P Parameter: Age (day) Value: 8
  misc_feature: MA Experiment 20000437 PARAMETER Experiment Name: At_Drought_P Parameter: Organism Value: A. thaliana
  misc_feature: MA Experiment 20000437 PARAMETER Experiment Name: At_Drought_P Parameter: Plant Line Value: WS
  misc_feature: MA Experiment 20000437 PARAMETER Experiment Name: At_Drought_P Parameter: Timepoint (hr) Value: 24
  misc_feature: MA Experiment 20000437 PARAMETER Experiment Name: At_Drought_P Parameter: Tissue Value: Whole Plant
  misc_feature: MA Experiment 20000437 PARAMETER Experiment Name: At_Drought_P Parameter: Treatment Value: Drought vs. No Drought
  misc_feature: MA Experiment ID: 20001247 Result: Down-regulated in Transcription
  misc_feature: MA Experiment 20001247 PARAMETER Experiment Name: At_Far-red-induction_P Parameter: Age (day) Value: 7
  misc_feature: MA Experiment 20001247 PARAMETER Experiment Name: At_Far-red-induction_P Parameter: Light Value: Far-red vs. White
  misc_feature: MA Experiment 20001247 PARAMETER Experiment Name: At_Far-red-induction_P Parameter: Organism Value: A. thaliana
  misc_feature: MA Experiment 20001247 PARAMETER Experiment Name: At_Far-red-induction_P Parameter: Plant Line Value: Columbia
  misc_feature: MA Experiment 20001247 PARAMETER Experiment Name: At_Far-red-induction_P Parameter: Timepoint (hr) Value: 1
  misc_feature: MA Experiment 20001247 PARAMETER Experiment Name: At_Far-red-induction_P Parameter: Tissue Value: Whole Plant
  misc_feature: MA Experiment ID: 20001450 Result: Down-regulated in Transcription
  misc_feature: MA Experiment 20001450 PARAMETER Experiment Name: At_Far-red-induction_P Parameter: Age (day) Value: 7
  misc_feature: MA Experiment 20001450 PARAMETER Experiment Name: At_Far-red-induction_P Parameter: Light Value: Far-red vs. White
  misc_feature: MA Experiment 20001450 PARAMETER Experiment Name: At_Far-red-induction_P Parameter: Organism Value: A. thaliana
  misc_feature: MA Experiment 20001450 PARAMETER Experiment Name: At_Far-red-induction_P Parameter: Plant Line Value: Columbia
  misc_feature: MA Experiment 20001450 PARAMETER Experiment Name: At_Far-red-induction_P Parameter: Timepoint (hr) Value: 8
  misc_feature: MA Experiment 20001450 PARAMETER Experiment Name: At_Far-red-induction_P Parameter: Tissue Value: Whole Plant
  misc_feature: MA Experiment ID: 20001451 Result: Down-regulated in Transcription
  misc_feature: MA Experiment 20001451 PARAMETER Experiment Name: At_Far-red-induction_P Parameter: Age (day) Value: 7
  misc_feature: MA Experiment 20001451 PARAMETER Experiment Name: At_Far-red-induction_P Parameter: Light Value: Far-red vs. White
  misc_feature: MA Experiment 20001451 PARAMETER Experiment Name: At_Far-red-induction_P Parameter: Organism Value: A. thaliana
  misc_feature: MA Experiment 20001451 PARAMETER Experiment Name: At_Far-red-induction_P Parameter: Plant Line Value: Columbia
  misc_feature: MA Experiment 20001451 PARAMETER Experiment Name: At_Far-red-induction_P Parameter: Timepoint (hr) Value: 24
  misc_feature: MA Experiment 20001451 PARAMETER Experiment Name: At_Far-red-induction_P Parameter: Tissue Value: Whole Plant
  misc_feature: MA Experiment ID: 20001558 Result: Up-regulated in Transcription
  misc_feature: MA Experiment 20001558 PARAMETER Experiment Name: At_Drought_Soil_Dry_P Parameter: Age (day) Value: 27
  misc_feature: MA Experiment 20001558 PARAMETER Experiment Name: At_Drought_Soil_Dry_P Parameter: Organism Value: A. thaliana
  misc_feature: MA Experiment 20001558 PARAMETER Experiment Name: At_Drought_Soil_Dry_P Parameter: Plant Line Value: WS
  misc_feature: MA Experiment 20001558 PARAMETER Experiment Name: At_Drought_Soil_Dry_P Parameter: Post Timepoint (hr) Value: 6
  misc_feature: MA Experiment 20001558 PARAMETER Experiment Name: At_Drought_Soil_Dry_P Parameter: Post-Treatment Value: Re-Water vs. No Drought
  misc_feature: MA Experiment 20001558 PARAMETER Experiment Name: At_Drought_Soil_Dry_P Parameter: Timepoint (day) Value: 13
  misc_feature: MA Experiment 20001558 PARAMETER Experiment Name: At_Drought_Soil_Dry_P Parameter: Treatment Value: Drought vs. No Drought
  misc_feature: MA Experiment ID: 20001757 Result: Up-regulated in Transcription
  misc_feature: MA Experiment 20001757 PARAMETER Experiment Name: At_50mM_NH4NO3_L-to-H_P Parameter: Timepoint (hr) Value: 6
  misc_feature: MA Experiment 20001757 PARAMETER Experiment Name: At_50mM_NH4NO3_L-to-H_P Parameter: Tissue Value: Leaf
  misc_feature: MA Experiment 20001757 PARAMETER Experiment Name: At_50mM_NH4NO3_L-to-H_P Parameter: Treatment Value: 50mM NH4NO3 vs 100mM Mannitol
aaaacacacacaaaacaaaatggtgctacttctccgatatcgatccttaacgataaatctcactcctctaatacccaaatctcaaaaattccacactctccaatcatttcgtaaccctaatttcatctccatcccaaaaatctcagcctccacgaacaatccaacaacaacaacgaatcggtcgatctccgacgcgactaaattcgctaagtcagtgttattcatacctcctggtgtagagattgaggaactaacagatgatatggttcttccgggttcaaatatcgtaatcggaccttttgcgggtcattcacaaatcaaagaagttgaatttgttaaaagtagtgctcgtgctagagattgtcctaaagatgatcgtcctgagattgcgattttgggtcgttctaatgttggcaagtcttcgcttatcaattgtttggttcgtaagaaagaagttgctcttacttctaagaaacctgggaagactcagcttataaatcacttcttggtgaataagagttggtacattgtggatttgcctggttatggatttgctaaagtttcagatgctgcgaaaacagattggtctgcgtttactaaaggttacttcttgaatagagacagtcttgtttgtgttctacttctcatcgatgcaagtgttcctcctcagaagattgatcttgattgtgctaattggcttggtcgcaacaatgtaccgatgactttcgtgtttacgaaatgcgataaaatgaaagcaacgaaagggaaaagacctgatgagaacattaaagctttccaacaaatcattagagagaattttaaagtacatcctccttggattttgacgagtagtgtatctggtttaggcagagacgagcttcttcttcacatgtcgcagctgagaaactactgggatcaataggtagcgcgtaaatttcgtaaacaaatgttcgaaaaggtcggttttgaatcattggttatatcaaattgtagttttgtaatgtaacagtaacttttgtatttaaagataagatcataaagtgttactactacagttctaattctgatgaaacaaattcatgaattgccgaaaaattggc

SEQ ID NO: 22442 - protein, 306 aa, Arabidopsis thaliana
  peptide (1)..(306): Ceres Seq. ID no. 12335075
  misc_feature (103)..(276): Pfam Name: GTPase of unknown function Pfam Description: GTPase of unknown function
  misc_feature (110)..(300): Homolog of NCBI NO: 23137475 NR Description: hypothetical protein [Cytophaga hutchinsonii]
  misc_feature (105)..(300): Homolog of NCBI NO: 29346493 NR Description: putative GTP-binding protein
  misc_feature (106)..(294): Homolog of NCBI NO: 31194343 NR Description: ENSANGP00000000181 [Anopheles gambiae]
  misc_feature (73)..(304): Homolog of NCBI NO: 34910170 NR Description: putative GTP-binding protein
  misc_feature (18)..(304): Homolog of NCBI NO: 21592799 NR Description: putative GTP-binding protein [Arabidopsis
  misc_feature (18)..(304): Homolog of NCBI NO: 15239069 NR Description: putative GTP-binding protein
  misc_feature (88)..(183): Homolog of NCBI NO: 20330773 NR Description: Putative nucleotide binding protein
  misc_feature (184)..(305): Homolog of NCBI NO: 20330773 NR Description: Putative nucleotide binding protein
  misc_feature (88)..(306): Homolog of NCBI NO: 25306612 NR Description: probable nucleotide-binding protein
  misc_feature (7)..(306): Homolog of NCBI NO: 18400109 NR Description: putative nucleotide-binding protein
KHTQNKMVLLLRYRSLTINLTPLIPKSQKFHTLQSFRNPNFISIPKISASTNNPTTTTNRSISDATKFAKSVLFIPPGVEIEELTDDMVLPGSNIVIGPFAGHSQIKEVEFVKSSARARDCPKDDRPEIAILGRSNVGKSSLINCLVRKKEVALTSKKPGKTQLINHFLVNKSWYIVDLPGYGFAKVSDAAKTDWSAFTKGYFLNRDSLVCVLLLIDASVPPQKIDLDCANWLGRNNVPMTFVFTKCDKMKATKGKRPDENIKAFQQIIRENFKVHPPWILTSSVSGLGRDELLLHMSQLRNYWDQ

SEQ ID NO: 22443 - protein, 300 aa, Arabidopsis thaliana
  peptide (1)..(300): Ceres Seq. ID no. 12335076
  misc_feature (97)..(270): Pfam Name: GTPase of unknown function Pfam Description: GTPase of unknown function
  misc_feature (104)..(294): Homolog of NCBI NO: 23137475 NR Description: hypothetical protein [Cytophaga hutchinsonii]
  misc_feature (99)..(294): Homolog of NCBI NO: 29346493 NR Description: putative GTP-binding protein
  misc_feature (100)..(288): Homolog of NCBI NO: 31194343 NR Description: ENSANGP00000000181 [Anopheles gambiae]
  misc_feature (67)..(298): Homolog of NCBI NO: 34910170 NR Description: putative GTP-binding protein
  misc_feature (12)..(298): Homolog of NCBI NO: 21592799 NR Description: putative GTP-binding protein [Arabidopsis
  misc_feature (12)..(298): Homolog of NCBI NO: 15239069 NR Description: putative GTP-binding protein
  misc_feature (82)..(177): Homolog of NCBI NO: 20330773 NR Description: Putative nucleotide binding protein
  misc_feature (178)..(299): Homolog of NCBI NO: 20330773 NR Description: Putative nucleotide binding protein
  misc_feature (82)..(300): Homolog of NCBI NO: 25306612 NR Description: probable nucleotide-binding protein
  misc_feature (1)..(300): Homolog of NCBI NO: 18400109 NR Description: putative nucleotide-binding protein
MVLLLRYRSLTINLTPLIPKSQKFHTLQSFRNPNFISIPKISASTNNPTTTTNRSISDATKFAKSVLFIPPGVEIEELTDDMVLPGSNIVIGPFAGHSQIKEVEFVKSSARARDCPKDDRPEIAILGRSNVGKSSLINCLVRKKEVALTSKKPGKTQLINHFLVNKSWYIVDLPGYGFAKVSDAAKTDWSAFTKGYFLNRDSLVCVLLLIDASVPPQKIDLDCANWLGRNNVPMTFVFTKCDKMKATKGKRPDENIKAFQQIIRENFKVHPPWILTSSVSGLGRDELLLHMSQLRNYWDQ

SEQ ID NO: 22444 - protein, 219 aa, Arabidopsis thaliana
  peptide (1)..(219): Ceres Seq. ID no. 12335077
  misc_feature (16)..(189): Pfam Name: GTPase of unknown function Pfam Description: GTPase of unknown function
  misc_feature (23)..(213): Homolog of NCBI NO: 23137475 NR Description: hypothetical protein [Cytophaga hutchinsonii]
  misc_feature (18)..(213): Homolog of NCBI NO: 29346493 NR Description: putative GTP-binding protein
  misc_feature (19)..(207): Homolog of NCBI NO: 31194343 NR Description: ENSANGP00000000181 [Anopheles gambiae]
  misc_feature (1)..(217): Homolog of NCBI NO: 34910170 NR Description: putative GTP-binding protein
  misc_feature (1)..(217): Homolog of NCBI NO: 21592799 NR Description: putative GTP-binding protein [Arabidopsis
  misc_feature (1)..(217): Homolog of NCBI NO: 15239069 NR Description: putative GTP-binding protein
  misc_feature (1)..(96): Homolog of NCBI NO: 20330773 NR Description: Putative nucleotide binding protein
  misc_feature (97)..(218): Homolog of NCBI NO: 20330773 NR Description: Putative nucleotide binding protein
  misc_feature (1)..(219): Homolog of NCBI NO: 25306612 NR Description: probable nucleotide-binding protein
  misc_feature (1)..(219): Homolog of NCBI NO: 18400109 NR Description: putative nucleotide-binding protein
MVLPGSNIVIGPFAGHSQIKEVEFVKSSARARDCPKDDRPEIAILGRSNVGKSSLINCLVRKKEVALTSKKPGKTQLINHFLVNKSWYIVDLPGYGFAKVSDAAKTDWSAFTKGYFLNRDSLVCVLLLIDASVPPQKIDLDCANWLGRNNVPMTFVFTKCDKMKATKGKRPDENIKAFQQIIRENFKVHPPWILTSSVSGLGRDELLLHMSQLRNYWDQ

SEQ ID NO: 22445 - DNA, 1389 bp, Arabidopsis thaliana
  misc_feature (1)..(1389): Ceres Seq. ID no. 12394789
  misc_feature: MA Experiment ID: 108434 Result: Down-regulated in Transcription
  misc_feature: MA Experiment 108434 PARAMETER Experiment Name: At_Root_Tips_cDNA_P Parameter: Tissue Value: Root Tips
  misc_feature: MA Experiment ID: 108461 Result: Up-regulated in Transcription
  misc_feature: MA Experiment 108461 PARAMETER Experiment Name: At_Germinating_Seeds_cDNA_P Parameter: Age (day) Value: 1 vs. 0
  misc_feature: MA Experiment 108461 PARAMETER Experiment Name: At_Germinating_Seeds_cDNA_P Parameter: Tissue Value: Germinating Seeds
  misc_feature: MA Experiment ID: 108462 Result: Up-regulated in Transcription
  misc_feature: MA Experiment 108462 PARAMETER Experiment Name: At_Germinating_Seeds_cDNA_P Parameter: Age (day) Value: 2 vs. 0
  misc_feature: MA Experiment 108462 PARAMETER Experiment Name: At_Germinating_Seeds_cDNA_P Parameter: Tissue Value: Germinating Seeds
  misc_feature: MA Experiment ID: 108463 Result: Up-regulated in Transcription
  misc_feature: MA Experiment 108463 PARAMETER Experiment Name: At_Germinating_Seeds_cDNA_P Parameter: Age (day) Value: 3 vs. 0
  misc_feature: MA Experiment 108463 PARAMETER Experiment Name: At_Germinating_Seeds_cDNA_P Parameter: Tissue Value: Germinating Seeds
  misc_feature: MA Experiment ID: 108464 Result: Up-regulated in Transcription
  misc_feature: MA Experiment 108464 PARAMETER Experiment Name: At_Germinating_Seeds_cDNA_P Parameter: Age (day) Value: 4 vs. 0
  misc_feature: MA Experiment 108464 PARAMETER Experiment Name: At_Germinating_Seeds_cDNA_P Parameter: Tissue Value: Germinating Seeds
  misc_feature: MA Experiment ID: 108577 Result: Down-regulated in Transcription
  misc_feature: MA Experiment 108577 PARAMETER Experiment Name: At_42deg_Heat_cDNA_P Parameter: Temperature (deg C) Value: 42 vs. 22
  misc_feature: MA Experiment 108577 PARAMETER Experiment Name: At_42deg_Heat_cDNA_P Parameter: Timepoint (hr) Value: 6
  misc_feature: MA Experiment 108577 PARAMETER Experiment Name: At_42deg_Heat_cDNA_P Parameter: Tissue Value: Aerial
  misc_feature: MA Experiment ID: 108579 Result: Down-regulated in Transcription
  misc_feature: MA Experiment 108579 PARAMETER Experiment Name: At_4deg_Cold_cDNA_P Parameter: Temperature (deg C) Value: 4 vs. 22
  misc_feature: MA Experiment 108579 PARAMETER Experiment Name: At_4deg_Cold_cDNA_P Parameter: Timepoint (hr) Value: 6
  misc_feature: MA Experiment 108579 PARAMETER Experiment Name: At_4deg_Cold_cDNA_P Parameter: Tissue Value: Aerial
  misc_feature: MA Experiment ID: 108594 Result: Down-regulated in Transcription
  misc_feature: MA Experiment 108594 PARAMETER Experiment Name: At_Ler-rhl_Root_cDNA_P Parameter: Plant Line Value: null
  misc_feature: MA Experiment ID: 20000069 Result: Up-regulated in Transcription
  misc_feature: MA Experiment 20000069 PARAMETER Experiment Name: At_100uM_ABA_Mutants_cDNA_P Parameter: Plant Line Value: CS23
  misc_feature: MA Experiment 20000069 PARAMETER Experiment Name: At_100uM_ABA_Mutants_cDNA_P Parameter: Timepoint (hr) Value: 6
  misc_feature: MA Experiment 20000069 PARAMETER Experiment Name: At_100uM_ABA_Mutants_cDNA_P Parameter: Tissue Value: Aerial
  misc_feature: MA Experiment 20000069 PARAMETER Experiment Name: At_100uM_ABA_Mutants_cDNA_P Parameter: Treatment Value: 100uM ABA vs. No Treatment
  misc_feature: MA Experiment ID: 20000071 Result: Up-regulated in Transcription
  misc_feature: MA Experiment 20000071 PARAMETER Experiment Name: At_100uM_ABA_Mutants_cDNA_P Parameter: Plant Line Value: CS8104
  misc_feature: MA Experiment 20000071 PARAMETER Experiment Name: At_100uM_ABA_Mutants_cDNA_P Parameter: Timepoint (hr) Value: 6
  misc_feature: MA Experiment 20000071 PARAMETER Experiment Name: At_100uM_ABA_Mutants_cDNA_P Parameter: Tissue Value: Aerial
  misc_feature: MA Experiment 20000071 PARAMETER Experiment Name: At_100uM_ABA_Mutants_cDNA_P Parameter: Treatment Value: 100uM ABA vs. No Treatment
  misc_feature: MA Experiment ID: 20000072 Result: Up-regulated in Transcription
  misc_feature: MA Experiment 20000072 PARAMETER Experiment Name: At_100uM_ABA_Mutants_cDNA_P Parameter: Plant Line Value: CS8105
  misc_feature: MA Experiment 20000072 PARAMETER Experiment Name: At_100uM_ABA_Mutants_cDNA_P Parameter: Timepoint (hr) Value: 6
  misc_feature: MA Experiment 20000072 PARAMETER Experiment Name: At_100uM_ABA_Mutants_cDNA_P Parameter: Tissue Value: Aerial
  misc_feature: MA Experiment 20000072 PARAMETER Experiment Name: At_100uM_ABA_Mutants_cDNA_P Parameter: Treatment Value: 100uM ABA vs. No Treatment
  misc_feature: MA Experiment ID: 20000088 Result: Up-regulated in Transcription
  misc_feature: MA Experiment 20000088 PARAMETER Experiment Name: At_100uM_ABA_Mutants_cDNA_P Parameter: Plant Line Value: Landsberg
  misc_feature: MA Experiment 20000088 PARAMETER Experiment Name: At_100uM_ABA_Mutants_cDNA_P Parameter: Timepoint (hr) Value: 6
  misc_feature: MA Experiment 20000088 PARAMETER Experiment Name: At_100uM_ABA_Mutants_cDNA_P Parameter: Tissue Value: Aerial
  misc_feature: MA Experiment 20000088 PARAMETER Experiment Name: At_100uM_ABA_Mutants_cDNA_P Parameter: Treatment Value: 100uM ABA vs. No Treatment
  misc_feature: MA Experiment ID: 20000089 Result: Up-regulated in Transcription
  misc_feature: MA Experiment ID: 20000180 Result: Up-regulated in Transcription
  misc_feature: MA Experiment 20000180 PARAMETER Experiment Name: At_Germinating_Seeds_P Parameter: Age (hr) Value: 24 vs. 0
  misc_feature: MA Experiment 20000180 PARAMETER Experiment Name: At_Germinating_Seeds_P Parameter: Tissue Value: Germinating Seeds
  misc_feature: MA Experiment ID: 20000227 Result: Down-regulated in Transcription
  misc_feature: MA Experiment 20000227 PARAMETER Experiment Name: At_Root-Tips-vs-Tops_P Parameter: Tissue Value: Root Tips vs. Root Tops
  misc_feature: MA Experiment ID: 20000234 Result: Down-regulated in Transcription
  misc_feature: MA Experiment 20000234 PARAMETER Experiment Name: At_Siliques_P Parameter: Age (day) Value: 21
  misc_feature: MA Experiment 20000234 PARAMETER Experiment Name: At_Siliques_P Parameter: Organism Value: A. thaliana
  misc_feature: MA Experiment 20000234 PARAMETER Experiment Name: At_Siliques_P Parameter: Plant Line Value: WS
  misc_feature: MA Experiment 20000234 PARAMETER Experiment Name: At_Siliques_P Parameter: Tissue Value: Less Than 5mm Siliques vs. Whole Plant
  misc_feature: MA Experiment ID: 20000437 Result: Up-regulated in Transcription
  misc_feature: MA Experiment 20000437 PARAMETER Experiment Name: At_Drought_P Parameter: Age (day) Value: 8
  misc_feature: MA Experiment 20000437 PARAMETER Experiment Name: At_Drought_P Parameter: Organism Value: A. thaliana
  misc_feature: MA Experiment 20000437 PARAMETER Experiment Name: At_Drought_P Parameter: Plant Line Value: WS
  misc_feature: MA Experiment 20000437 PARAMETER Experiment Name: At_Drought_P Parameter: Timepoint (hr) Value: 24
  misc_feature: MA Experiment 20000437 PARAMETER Experiment Name: At_Drought_P Parameter: Tissue Value: Whole Plant
  misc_feature: MA Experiment 20000437 PARAMETER Experiment Name: At_Drought_P Parameter: Treatment Value: Drought vs. No Drought
  misc_feature: MA Experiment ID: 20000438 Result: Down-regulated in Transcription
  misc_feature: MA Experiment 20000438 PARAMETER Experiment Name: At_Shoots__P Parameter: Age (day) Value: 14
  misc_feature: MA Experiment 20000438 PARAMETER Experiment Name: At_Shoots__P Parameter: Tissue Value: Shoots vs. Whole Plant
  misc_feature: MA Experiment ID: 20000451 Result: Down-regulated in Transcription
  misc_feature: MA Experiment 20000451 PARAMETER Experiment Name: At_CS6879_Shoots-Roots_P Parameter: Age (day) Value: 14
  misc_feature: MA Experiment 20000451 PARAMETER Experiment Name: At_CS6879_Shoots-Roots_P Parameter: Organism Value: A. thaliana
  misc_feature: MA Experiment 20000451 PARAMETER Experiment Name: At_CS6879_Shoots-Roots_P Parameter: Plant Line Value: CS6879 vs. WS
  misc_feature: MA Experiment 20000451 PARAMETER Experiment Name: At_CS6879_Shoots-Roots_P Parameter: Tissue Value: Roots
  misc_feature: MA Experiment ID: 20000574 Result: Down-regulated in Transcription
  misc_feature: MA Experiment 20000574 PARAMETER Experiment Name: At_100uM_ABA_Mutants__P Parameter: Organism Value: A. thaliana
  misc_feature: MA Experiment 20000574 PARAMETER Experiment Name: At_100uM_ABA_Mutants__P Parameter: Plant Line Value: CS23 vs. Ler wt
  misc_feature: MA Experiment 20000574 PARAMETER Experiment Name: At_100uM_ABA_Mutants__P Parameter: Timepoint (hr) Value: N/A
  misc_feature: MA Experiment 20000574 PARAMETER Experiment Name: At_100uM_ABA_Mutants__P Parameter: Tissue Value: Whole Plant
  misc_feature: MA Experiment 20000574 PARAMETER Experiment Name: At_100uM_ABA_Mutants__P Parameter: Treatment Value: None
  misc_feature: MA Experiment ID: 20001558 Result: Down-regulated in Transcription
  misc_feature: MA Experiment 20001558 PARAMETER Experiment Name: At_Drought_Soil_Dry_P Parameter: Age (day) Value: 27
  misc_feature: MA Experiment 20001558 PARAMETER Experiment Name: At_Drought_Soil_Dry_P Parameter: Organism Value: A. thaliana
  misc_feature: MA Experiment 20001558 PARAMETER Experiment Name: At_Drought_Soil_Dry_P Parameter: Plant Line Value: WS
  misc_feature: MA Experiment 20001558 PARAMETER Experiment Name: At_Drought_Soil_Dry_P Parameter: Post Timepoint (hr) Value: 6
  misc_feature: MA Experiment 20001558 PARAMETER Experiment Name: At_Drought_Soil_Dry_P Parameter: Post-Treatment Value: Re-Water vs. No Drought
  misc_feature: MA Experiment 20001558 PARAMETER Experiment Name: At_Drought_Soil_Dry_P Parameter: Timepoint (day) Value: 13
  misc_feature: MA Experiment 20001558 PARAMETER Experiment Name: At_Drought_Soil_Dry_P Parameter: Treatment Value: Drought vs. No Drought
  misc_feature: MA Experiment ID: 20001560 Result: Down-regulated in Transcription
  misc_feature: MA Experiment 20001560 PARAMETER Experiment Name: At_Drought_Soil_Dry_P Parameter: Age (day) Value: 28
  misc_feature: MA Experiment 20001560 PARAMETER Experiment Name: At_Drought_Soil_Dry_P Parameter: Organism Value: A. thaliana
  misc_feature: MA Experiment 20001560 PARAMETER Experiment Name: At_Drought_Soil_Dry_P Parameter: Plant Line Value: WS
  misc_feature: MA Experiment 20001560 PARAMETER Experiment Name: At_Drought_Soil_Dry_P Parameter: Post Timepoint (hr) Value: None
  misc_feature: MA Experiment 20001560 PARAMETER Experiment Name: At_Drought_Soil_Dry_P Parameter: Post-Treatment Value: None
  misc_feature: MA Experiment 20001560 PARAMETER Experiment Name: At_Drought_Soil_Dry_P Parameter: Timepoint (day) Value: 14
  misc_feature: MA Experiment 20001560 PARAMETER Experiment Name: At_Drought_Soil_Dry_P Parameter: Treatment Value: Drought vs. No Drought
gtccccaaagtctcctcttccttatctcttggaaaccaagaagcatggatcgtgtggtcttcttcttcctcatcgcagctacgttactagcaggttctctcggatctaccgtcatctccggcgaggttaccgacggtttcgttaacccgatcaggcaagtcgtcccggaggagaacgatgaacaactcctcaacgcagaacatcacttcactctattcaaatccaagtacgagaagacttacgcgactcaggtagagcacgatcatcggttccgtgtcttcaaagctaacctaagacgagctaggcgtaaccagcttctagatccgtctgccgtccacggcgtcacgcagttctcagatcttactccgaaagaattccgccgcaagtttttaggactgaaacgccgagggtttcgtcttcctactgatactcagacggcgcctattcttccgactagcgatcttccgacggagttcgattggcgtgaacaaggagccgtcacacctgttaaaaaccagggtatgtgtggttcatgctggtcatttagtgcgataggagctcttgaaggagcacattttctagccactaaagagcttgttagcctcagtgagcagcagctcgtagattgtgaccatgagtgtgatccagcacaagccaattcatgtgattctggttgcagtggaggactaatgaacaacgcttttgagtacgctcttaaagctggtggtctaatgaaggaagaggactatccttatacaggacgtgaccataccgcttgtaagttcgacaagagcaagattgttgcgagtgtgtctaacttcagcgttgtctcttcggatgaagaccaaatcgctgctaatctagtccagcatggacctctagctattgctatcaatgcgatgtggatgcaaacatacataggaggagtctcgtgcccgtatgtatgttcaaagagccaagaccatggagtgctcttggttggatttggttcatcgggttatgcaccaatccgtcttaaggagaagccttattggattatcaagaactcgtggggagcgatgtggggagagcatggttactacaaaatctgcagagggcctcataatatgtgtggtatggatacaatggtatctactgttgctgctgttcatacctcacccaagtagaattattaggacactacctgtctatctttgtgtatatgtatgtatggttgcataaagatactacgaacttttatcgttagtattgtgtctctgtttcagcttttaatgtaaaatagcttgggggtattatctttgtagcattgaatgcttaagatgataatatgatatgattatcaaattattataagttggaacttggaataatagaaattttatatgtttt

SEQ ID NO: 22446 - protein, 387 aa, Arabidopsis thaliana
  peptide (1)..(387): Ceres Seq. ID no. 12394790
  misc_feature (154)..(380): Pfam Name: Papain family cysteine protease Pfam Description: Papain family cysteine protease
  misc_feature (154)..(380): Pfam Name: Papain family cysteine protease Pfam Description: Papain family cysteine protease
  misc_feature (15)..(385): Homolog of NCBI NO: 7435793 NR Description: probable cysteine proteinase (EC 3.4.22.-)
  misc_feature (20)..(385): Homolog of NCBI NO: 13491752 NR Description: cysteine protease [Ipomoea batatas]
  misc_feature (23)..(385): Homolog of NCBI NO: 5051468 NR Description: putative preprocysteine proteinase [Nicotiana
  misc_feature (15)..(385): Homolog of NCBI NO: 4757570 NR Description: cysteine proteinase precursor [Solanum melongena]
  misc_feature (20)..(385): Homolog of NCBI NO: 7381221 NR Description: papain-like cysteine proteinase isoform II
  misc_feature (15)..(385): Homolog of NCBI NO: 7435793 NR Description: probable cysteine proteinase (EC 3.4.22.-)
  misc_feature (23)..(385): Homolog of NCBI NO: 5051468 NR Description: putative preprocysteine proteinase [Nicotiana
  misc_feature (20)..(385): Homolog of NCBI NO: 7381221 NR Description: papain-like cysteine proteinase isoform II
  misc_feature (15)..(387): Homolog of NCBI NO: 18414611 NR Description: cysteine proteinase
  misc_feature (20)..(385): Homolog of NCBI NO: 7211741 NR Description: papain-like cysteine proteinase isoform I
  misc_feature (20)..(385): Homolog of NCBI NO: 7381219 NR Description: papain-like cysteine proteinase isoform I
  misc_feature (20)..(385): Homolog of NCBI NO: 7211743 NR Description: papain-like cysteine proteinase isoform II
  misc_feature (23)..(385): Homolog of NCBI NO: 7211745 NR Description: papain-like cysteine proteinase isoform III
  misc_feature (15)..(385): Homolog of NCBI NO: 4757570 NR Description: cysteine proteinase precursor [Solanum melongena]
  misc_feature (20)..(385): Homolog of NCBI NO: 13491752 NR Description: cysteine protease [Ipomoea batatas]
  misc_feature (23)..(385): Homolog of NCBI NO: 7211745 NR Description: papain-like cysteine proteinase isoform III
  misc_feature (20)..(385): Homolog of NCBI NO: 7211743 NR Description: papain-like cysteine proteinase isoform II
  misc_feature (20)..(385): Homolog of NCBI NO: 7381219 NR Description: papain-like cysteine proteinase isoform I
  misc_feature (20)..(385): Homolog of NCBI NO: 7211741 NR Description: papain-like cysteine proteinase isoform I
  misc_feature (15)..(387): Homolog of NCBI NO: 18414611 NR Description: cysteine proteinase
PQSLLFLISWKPRSMDRVVFFFLIAATLLAGSLGSTVISGEVTDGFVNPIRQVVPEENDEQLLNAEHHFTLFKSKYEKTYATQVEHDHRFRVFKANLRRARRNQLLDPSAVHGVTQFSDLTPKEFRRKFLGLKRRGFRLPTDTQTAPILPTSDLPTEFDWREQGAVTPVKNQGMCGSCWSFSAIGALEGAHFLATKELVSLSEQQLVDCDHECDPAQANSCDSGCSGGLMNNAFEYALKAGGLMKEEDYPYTGRDHTACKFDKSKIVASVSNFSVVSSDEDQIAANLVQHGPLAIAINAMWMQTYIGGVSCPYVCSKSQDHGVLLVGFGSSGYAPIRLKEKPYWIIKNSWGAMWGEHGYYKICRGPHNMCGMDTMVSTVAAVHTSPK

SEQ ID NO: 22447 - protein, 373 aa, Arabidopsis thaliana
  peptide (1)..(373): Ceres Seq. ID no. 12394791
  misc_feature (140)..(366): Pfam Name: Papain family cysteine protease Pfam Description: Papain family cysteine protease
  misc_feature (140)..(366): Pfam Name: Papain family cysteine protease Pfam Description: Papain family cysteine protease
  misc_feature (1)..(371): Homolog of NCBI NO: 7435793 NR Description: probable cysteine proteinase (EC 3.4.22.-)
  misc_feature (6)..(371): Homolog of NCBI NO: 13491752 NR Description: cysteine protease [Ipomoea batatas]
  misc_feature (9)..(371): Homolog of NCBI NO: 5051468 NR Description: putative preprocysteine proteinase [Nicotiana
  misc_feature (1)..(371): Homolog of NCBI NO: 4757570 NR Description: cysteine proteinase precursor [Solanum melongena]
  misc_feature (6)..(371): Homolog of NCBI NO: 7381221 NR Description: papain-like cysteine proteinase isoform II
  misc_feature (1)..(371): Homolog of NCBI NO: 7435793 NR Description: probable cysteine proteinase (EC 3.4.22.-)
  misc_feature (9)..(371): Homolog of NCBI NO: 5051468 NR Description: putative preprocysteine proteinase [Nicotiana
  misc_feature (6)..(371): Homolog of NCBI NO: 7381221 NR Description: papain-like cysteine proteinase isoform II
  misc_feature (1)..(373): Homolog of NCBI NO: 18414611 NR Description: cysteine proteinase
  misc_feature (6)..(371): Homolog of NCBI NO: 7211741 NR Description: papain-like cysteine proteinase isoform I
  misc_feature (6)..(371): Homolog of NCBI NO: 7381219 NR Description: papain-like cysteine proteinase isoform I
  misc_feature (6)..(371): Homolog of NCBI NO: 7211743 NR Description: papain-like cysteine proteinase isoform II
  misc_feature (9)..(371): Homolog of NCBI NO: 7211745 NR Description: papain-like cysteine proteinase isoform III
  misc_feature (1)..(371): Homolog of NCBI NO: 4757570 NR Description: cysteine proteinase precursor [Solanum melongena]
  misc_feature (6)..(371): Homolog of NCBI NO: 13491752 NR Description: cysteine protease [Ipomoea batatas]
  misc_feature (9)..(371): Homolog of NCBI NO: 7211745 NR Description: papain-like cysteine proteinase isoform III
  misc_feature (6)..(371): Homolog of NCBI NO: 7211743 NR Description: papain-like cysteine proteinase isoform II
  misc_feature (6)..(371): Homolog of NCBI NO: 7381219 NR Description: papain-like cysteine proteinase isoform I
  misc_feature (6)..(371): Homolog of NCBI NO: 7211741 NR Description: papain-like cysteine proteinase isoform I
  misc_feature (1)..(373): Homolog of NCBI NO: 18414611 NR Description: cysteine proteinase
MDRVVFFFLIAATLLAGSLGSTVISGEVTDGFVNPIRQVVPEENDEQLLNAEHHFTLFKSKYEKTYATQVEHDHRFRVFKANLRRARRNQLLDPSAVHGVTQFSDLTPKEFRRKFLGLKRRGFRLPTDTQTAPILPTSDLPTEFDWREQGAVTPVKNQGMCGSCWSFSAIGALEGAHFLATKELVSLSEQQLVDCDHECDPAQANSCDSGCSGGLMNNAFEYALKAGGLMKEEDYPYTGRDHTACKFDKSKIVASVSNFSVVSSDEDQIAANLVQHGPLAIAINAMWMQTYIGGVSCPYVCSKSQDHGVLLVGFGSSGYAPIRLKEKPYWIIKNSWGAMWGEHGYYKICRGPHNMCGMDTMVSTVAAVHTSPK

SEQ ID NO: 22448 - protein, 214 aa, Arabidopsis thaliana
  peptide (1)..(214): Ceres Seq. ID no. 12394792
  misc_feature (1)..(207): Pfam Name: Papain family cysteine protease Pfam Description: Papain family cysteine protease
  misc_feature (1)..(207): Pfam Name: Papain family cysteine protease Pfam Description: Papain family cysteine protease
  misc_feature (1)..(212): Homolog of NCBI NO: 7435793 NR Description: probable cysteine proteinase (EC 3.4.22.-)
  misc_feature (1)..(212): Homolog of NCBI NO: 13491752 NR Description: cysteine protease [Ipomoea batatas]
  misc_feature (1)..(212): Homolog of NCBI NO: 5051468 NR Description: putative preprocysteine proteinase [Nicotiana
  misc_feature (1)..(212): Homolog of NCBI NO: 4757570 NR Description: cysteine proteinase precursor [Solanum melongena]
  misc_feature (1)..(212): Homolog of NCBI NO: 7381221 NR Description: papain-like cysteine proteinase isoform II
  misc_feature (1)..(212): Homolog of NCBI NO: 7211743 NR Description: papain-like cysteine proteinase isoform II
  misc_feature (1)..(212): Homolog of NCBI NO: 7211741 NR Description: papain-like cysteine proteinase isoform I
  misc_feature (1)..(212): Homolog of NCBI NO: 7211745 NR Description: papain-like cysteine proteinase isoform III
  misc_feature (1)..(212): Homolog of NCBI NO: 7381221 NR Description: papain-like cysteine proteinase isoform II
  misc_feature (1)..(212): Homolog of NCBI NO: 4757570 NR Description: cysteine proteinase precursor [Solanum melongena]
  misc_feature (1)..(212): Homolog of NCBI NO: 5051468 NR Description: putative preprocysteine proteinase [Nicotiana
  misc_feature (1)..(212): Homolog of NCBI NO: 13491752 NR Description: cysteine protease [Ipomoea batatas]
  misc_feature (1)..(212): Homolog of NCBI NO: 7435793 NR Description: probable cysteine proteinase (EC 3.4.22.-)
  misc_feature (1)..(214): Homolog of NCBI NO: 18414611 NR Description: cysteine proteinase
  misc_feature (1)..(212): Homolog of NCBI NO: 7381219 NR Description: papain-like cysteine proteinase isoform I
  misc_feature (1)..(212): Homolog of NCBI NO: 7211745 NR Description: papain-like cysteine proteinase isoform III
  misc_feature (1)..(212): Homolog of NCBI NO: 7211743 NR Description: papain-like cysteine proteinase isoform II
  misc_feature (1)..(212): Homolog of NCBI NO: 7381219 NR Description: papain-like cysteine proteinase isoform I
  misc_feature (1)..(212): Homolog of NCBI NO: 7211741 NR Description: papain-like cysteine proteinase isoform I
  misc_feature (1)..(214): Homolog of NCBI NO: 18414611 NR Description: cysteine proteinase
MCGSCWSFSAIGALEGAHFLATKELVSLSEQQLVDCDHECDPAQANSCDSGCSGGLMNNAFEYALKAGGLMKEEDYPYTGRDHTACKFDKSKIVASVSNFSVVSSDEDQIAANLVQHGPLAIAINAMWMQTYIGGVSCPYVCSKSQDHGVLLVGFGSSGYAPIRLKEKPYWIIKNSWGAMWGEHGYYKICRGPHNMCGMDTMVSTVAAVHTSPK

SEQ ID NO: 22449 - DNA, 1517 bp, Arabidopsis thaliana
  misc_feature (1)..(1517): Ceres Seq. ID no. 12325338
  misc_feature: MA Experiment ID: 108488 Result: Down-regulated in Transcription
  misc_feature: MA Experiment ID: 20000069 Result: Up-regulated in Transcription
  misc_feature: MA Experiment 20000069 PARAMETER Experiment Name: At_100uM_ABA_Mutants_cDNA_P Parameter: Plant Line Value: CS23
  misc_feature: MA Experiment 20000069 PARAMETER Experiment Name: At_100uM_ABA_Mutants_cDNA_P Parameter: Timepoint (hr) Value: 6
  misc_feature: MA Experiment 20000069 PARAMETER Experiment Name: At_100uM_ABA_Mutants_cDNA_P Parameter: Tissue Value: Aerial
  misc_feature: MA Experiment 20000069 PARAMETER Experiment Name: At_100uM_ABA_Mutants_cDNA_P Parameter: Treatment Value: 100uM ABA vs. No Treatment
  misc_feature: MA Experiment ID: 20000070 Result: Up-regulated in Transcription
  misc_feature: MA Experiment 20000070 PARAMETER Experiment Name: At_100uM_ABA_Mutants_cDNA_P Parameter: Plant Line Value: CS24
  misc_feature: MA Experiment 20000070 PARAMETER Experiment Name: At_100uM_ABA_Mutants_cDNA_P Parameter: Timepoint (hr) Value: 6
  misc_feature: MA Experiment 20000070 PARAMETER Experiment Name: At_100uM_ABA_Mutants_cDNA_P Parameter: Tissue Value: Aerial
  misc_feature: MA Experiment 20000070 PARAMETER Experiment Name: At_100uM_ABA_Mutants_cDNA_P Parameter: Treatment Value: 100uM ABA vs. No Treatment
  misc_feature: MA Experiment ID: 20000071 Result: Up-regulated in Transcription
  misc_feature: MA Experiment 20000071 PARAMETER Experiment Name: At_100uM_ABA_Mutants_cDNA_P Parameter: Plant Line Value: CS8104
  misc_feature: MA Experiment 20000071 PARAMETER Experiment Name: At_100uM_ABA_Mutants_cDNA_P Parameter: Timepoint (hr) Value: 6
  misc_feature: MA Experiment 20000071 PARAMETER Experiment Name: At_100uM_ABA_Mutants_cDNA_P Parameter: Tissue Value: Aerial
  misc_feature: MA Experiment 20000071 PARAMETER Experiment Name: At_100uM_ABA_Mutants_cDNA_P Parameter: Treatment Value: 100uM ABA vs. No Treatment
  misc_feature: MA Experiment ID: 20000315 Result: Down-regulated in Transcription
  misc_feature: MA Experiment 20000315 PARAMETER Experiment Name: At_14day_Shoots-Roots_Sub_P Parameter: Age (day) Value: 14
  misc_feature: MA Experiment 20000315 PARAMETER Experiment Name: At_14day_Shoots-Roots_Sub_P Parameter: Organism Value: A. thaliana
  misc_feature: MA Experiment 20000315 PARAMETER Experiment Name: At_14day_Shoots-Roots_Sub_P Parameter: Plant Line Value: WS
  misc_feature: MA Experiment 20000315 PARAMETER Experiment Name: At_14day_Shoots-Roots_Sub_P Parameter: Tissue Value: Shoots vs. Whole Plant
  misc_feature: MA Experiment ID: 20000328 Result: Down-regulated in Transcription
  misc_feature: MA Experiment 20000328 PARAMETER Experiment Name: At_42deg_Heat_Sub_P Parameter: Age (day) Value: 14
  misc_feature: MA Experiment 20000328 PARAMETER Experiment Name: At_42deg_Heat_Sub_P Parameter: Organism Value: A. thaliana
  misc_feature: MA Experiment 20000328 PARAMETER Experiment Name: At_42deg_Heat_Sub_P Parameter: Plant Line Value: WS
  misc_feature: MA Experiment 20000328 PARAMETER Experiment Name: At_42deg_Heat_Sub_P Parameter: Temperature (deg C) Value: 42 vs. 22
  misc_feature: MA Experiment 20000328 PARAMETER Experiment Name: At_42deg_Heat_Sub_P Parameter: Timepoint (hr) Value: 6
  misc_feature: MA Experiment 20000328 PARAMETER Experiment Name: At_42deg_Heat_Sub_P Parameter: Tissue Value: Aerial
aatcttaacgatttagatactcagtgattcggcttggatcatctttgccaatcatcatctccctctatatatcatcatttaatggcttttggttcgtctctgtgaaaaattctgacggcacaatcagaaattctcagtcgcgtttccgttgttgatgcgttttggggactaattggtagtacactttaagcttattagtcagaacaaatatggatgtgactggcactgtgactgtgagagatgcatttgatcgagtttctaaaaaacagaagctgtatcactcagttactcaagatgtcattgatctagtttgtgatggaatccaagatacattgactcgaatccaattaggtaacgacgatggagtagaaccggaatcggttcttaccgagttgagacgcaagcttgatgctcttttaccgattatccagcttcagaaatcacataaggaaactaaatggagtcttagcaagttggtgaaattgcttgaggtttcttaccatcctgatatatctctagcctgctttagcgttgatttcgatatcaacttagtgaataagatacttatccaccattgttaccgagaagggttgttcgacgttggtgattgtctggttaaggaggctggaagagaggaagaaactgaggttagatctcagttcttagagttccaccagatagtggactcattgaagctcagaaacattgagcctgcaatgagatggatctttgcgaaccgcggaaagctgaagcaaaagagttcaaagctggagtttaagctcttaagtttgaagtactgtgatatattaagagaaggaaagagtgatgatgctttggagtatgcaagaacccattttacgcaatatccactccattttaaggagatacaaaagcttatcacttgtttattatggattggaaactttgagaaaagtccttatgcagagatagtttctccatcatgttgggacaaggtaaccaaagagctaatcatggaatatcaccatcttctcgatcagccaattaactccccgttgaaagtcgctttatccgcgggttatgagagcttaccgtcactgttaaagctggttcatctaatggcattgacgaaacaagaatggcaagcaatgaaacagcttccggttcctctggagttagggaatgagtataagttccactcagcttttgtttgtcccgtgagtagagatcaaagcagcgaagaaaacccgccgatgcagttgccttgtggtcatgttattagcaagcagtcaatgatgagactcagcaagaactgcgctttccgcacattcaaatgcccttattgtcctgcagagactttagcttcagcatgcaggcaattatacttttgaaggatttggtaatttagttaatttgattgtttcacctcaataaatcgatgtgaacaaagcatttcatttgttctttcatcatttaaaaactcttgtttactagatcttgatttgatcttgttctctaatatgttgcatttagttgtc

SEQ ID NO: 22450 - protein, 386 aa, Arabidopsis thaliana
  peptide (1)..(386): Ceres Seq. ID no. 12325339
  misc_feature (75)..(386): Homolog of NCBI NO: 37590378 NR Description: Unknown (protein for MGC:73277) [Danio rerio]
  misc_feature (7)..(386): Homolog of NCBI NO: 31044429 NR Description: hypothetical protein MGC59617 [Mus musculus]
  misc_feature (7)..(386): Homolog of NCBI NO: 12232469 NR Description: hypothetical protein FLJ13910 [Homo sapiens]
  misc_feature (7)..(386): Homolog of NCBI NO: 10434433 NR Description: unnamed protein product [Homo sapiens]
  misc_feature (9)..(386): Homolog of NCBI NO: 31240441 NR Description: ENSANGP00000021271 [Anopheles gambiae]
  misc_feature (11)..(386): Homolog of NCBI NO: 28829262 NR Description: similar to Arabidopsis thaliana (Mouse-ear
  misc_feature (8)..(386): Homolog of NCBI NO: 15235735 NR Description: putative protein; protein id: At4g37880.1
  misc_feature (9)..(386): Homolog of NCBI NO: 21593562 NR Description: unknown [Arabidopsis thaliana]
  misc_feature (9)..(386): Homolog of NCBI NO: 18400050 NR Description: expressed protein
  misc_feature (1)..(386): Homolog of NCBI NO: 15242463 NR Description: putative protein
MDVTGTVTVRDAFDRVSKKQKLYHSVTQDVIDLVCDGIQDTLTRIQLGNDDGVEPESVLTELRRKLDALLPIIQLQKSHKETKWSLSKLVKLLEVSYHPDISLACFSVDFDINLVNKILIHHCYREGLFDVGDCLVKEAGREEETEVRSQFLEFHQIVDSLKLRNIEPAMRWIFANRGKLKQKSSKLEFKLLSLKYCDILREGKSDDALEYARTHFTQYPLHFKEIQKLITCLLWIGNFEKSPYAEIVSPSCWDKVTKELIMEYHHLLDQPINSPLKVALSAGYESLPSLLKLVHLMALTKQEWQAMKQLPVPLELGNEYKFHSAFVCPVSRDQSSEENPPMQLPCGHVISKQSMMRLSKNCAFRTFKCPYCPAETLASACRQLYF

SEQ ID NO: 22451 - protein, 217 aa, Arabidopsis thaliana
  peptide (1)..(217): Ceres Seq. ID no. 12325340
  misc_feature (1)..(217): Homolog of NCBI NO: 37590378 NR Description: Unknown (protein for MGC:73277) [Danio rerio]
  misc_feature (1)..(217): Homolog of NCBI NO: 31044429 NR Description: hypothetical protein MGC59617 [Mus musculus]
  misc_feature (1)..(217): Homolog of NCBI NO: 12232469 NR Description: hypothetical protein FLJ13910 [Homo sapiens]
  misc_feature (1)..(217): Homolog of NCBI NO: 10434433 NR Description: unnamed protein product [Homo sapiens]
  misc_feature (1)..(217): Homolog of NCBI NO: 31240441 NR Description: ENSANGP00000021271 [Anopheles gambiae]
  misc_feature (1)..(217): Homolog of NCBI NO: 28829262 NR Description: similar to Arabidopsis thaliana (Mouse-ear
  misc_feature (1)..(217): Homolog of NCBI NO: 15235735 NR Description: putative protein; protein id: At4g37880.1
  misc_feature (1)..(217): Homolog of NCBI NO: 21593562 NR Description: unknown [Arabidopsis thaliana]
  misc_feature (1)..(217): Homolog of NCBI NO: 18400050 NR Description: expressed protein
  misc_feature (1)..(217): Homolog of NCBI NO: 15242463 NR Description: putative protein
MRWIFANRGKLKQKSSKLEFKLLSLKYCDILREGKSDDALEYARTHFTQYPLHFKEIQKLITCLLWIGNFEKSPYAEIVSPSCWDKVTKELIMEYHHLLDQPINSPLKVALSAGYESLPSLLKLVHLMALTKQEWQAMKQLPVPLELGNEYKFHSAFVCPVSRDQSSEENPPMQLPCGHVISKQSMMRLSKNCAFRTFKCPYCPAETLASACRQLYF

SEQ ID NO: 22452 - DNA, 879 bp, Arabidopsis thaliana
  misc_feature (1)..(879): Ceres Seq. ID no. 12384866
  misc_feature: MA Experiment ID: 108576 Result: Up-regulated in Transcription
  misc_feature: MA Experiment 108576 PARAMETER Experiment Name: At_42deg_Heat_cDNA_P Parameter: Temperature (deg C) Value: 42 vs. 22
  misc_feature: MA Experiment 108576 PARAMETER Experiment Name: At_42deg_Heat_cDNA_P Parameter: Timepoint (hr) Value: 1
  misc_feature: MA Experiment 108576 PARAMETER Experiment Name: At_42deg_Heat_cDNA_P Parameter: Tissue Value: Aerial
acagtgctctcttttccactatcgccatgattgctcaaacgtgaattgaatgatctgatccataatctaaaaaattgagctttcatcagtaaccgaagcaatggcacggaggtctggaaattgcatgagatgtctagtgatattctcggtggtttcagcattattagtgtgtggacctgctctttactggaaattgaataagggtttcgttggatctgctcgtagcaccaactccatttgtcctccttgtgtctgcgattttcctcctcctttgtctctcctccagattgctcccgggcttgcaaacctctctattacaggttgtggcagcgatgatccagagctcaaagaggagatggagaagccgtttgtggatcttctcacagaagagctgaagcttcaagaagcagtggcagacgagcatagtcgtcatatgaatgttacacttgccgaagctaaaagagttgcttcacagtaccaaaaggaggctgagaagtgtaacgctgccactgaaatttgcgaatcagctagagagagagctcaagcattgttgctcaaagagcggaagatcacttttttgtgggagcgcagagctcggcaattaggttgggaaggtgagtaagtaattcactgtttagtgacttcttcacagtctactctgacgagtttctcaatggaagcaaactagattttctcttccgtatacaactcgtgagaacatgggaatcgcttaattcgcaaggcaatgtttttgtctcacatgttctctatatatgtagttcttttttgttttgctcttggctctagacactgctaaagaaagggttggccttgtattgacttttttcttcagatatatatttgtcagtcacactggac

SEQ ID NO: 22453 - protein, 173 aa, Arabidopsis thaliana
  peptide (1)..(173): Ceres Seq. ID no. 12384867
  misc_feature (1)..(173): Pfam Name: Protein of unknown function (DUF1068) Pfam Description: Protein of unknown function (DUF1068)
  misc_feature (12)..(171): Homolog of NCBI NO: 7487433 NR Description: hypothetical protein At2g32580 [imported] -
  misc_feature (1)..(172): Homolog of NCBI NO: 18390477 NR Description: expressed protein
  misc_feature (12)..(171): Homolog of NCBI NO: 21553781 NR Description: unknown [Arabidopsis thaliana]
  misc_feature (12)..(171): Homolog of NCBI NO: 18403016 NR Description: expressed protein
  misc_feature (12)..(172): Homolog of NCBI NO: 27922919 NR Description: unknown protein [Phytophthora sojae]
  misc_feature (1)..(171): Homolog of NCBI NO: 38345038 NR Description: OSJNBa0029H02.22 [Oryza sativa (japonica
  misc_feature (1)..(173): Homolog of NCBI NO: 25407700 NR Description: hypothetical protein AT4g30990 [imported] -
  misc_feature (1)..(173): Homolog of NCBI NO: 18417716 NR Description: Expressed protein
  misc_feature (9)..(173): Homolog of NCBI NO: 25364110 NR Description: hypothetical protein At2g24290 [imported] -
  misc_feature (1)..(173): Homolog of NCBI NO: 18400504 NR Description: expressed protein
MARRSGNCMRCLVIFSVVSALLVCGPALYWKLNKGFVGSARSTNSICPPCVCDFPPPLSLLQIAPGLANLSITGCGSDDPELKEEMEKPFVDLLTEELKLQEAVADEHSRHMNVTLAEAKRVASQYQKEAEKCNAATEICESARERAQALLLKERKITFLWERRARQLGWEGE

SEQ ID NO: 22454 - protein, 165 aa, Arabidopsis thaliana
  peptide (1)..(165): Ceres Seq. ID no. 12384868
  misc_feature (1)..(165): Pfam Name: Protein of unknown function (DUF1068) Pfam Description: Protein of unknown function (DUF1068)
  misc_feature (4)..(163): Homolog of NCBI NO: 7487433 NR Description: hypothetical protein At2g32580 [imported] -
  misc_feature (1)..(164): Homolog of NCBI NO: 18390477 NR Description: expressed protein
  misc_feature (4)..(163): Homolog of NCBI NO: 21553781 NR Description: unknown [Arabidopsis thaliana]
  misc_feature (4)..(163): Homolog of NCBI NO: 18403016 NR Description: expressed protein
  misc_feature (4)..(164): Homolog of NCBI NO: 27922919 NR Description: unknown protein [Phytophthora sojae]
  misc_feature (1)..(163): Homolog of NCBI NO: 38345038 NR Description: OSJNBa0029H02.22 [Oryza sativa (japonica
  misc_feature (1)..(165): Homolog of NCBI NO: 25407700 NR Description: hypothetical protein AT4g30990 [imported] -
  misc_feature (1)..(165): Homolog of NCBI NO: 18417716 NR Description: Expressed protein
  misc_feature (1)..(165): Homolog of NCBI NO: 25364110 NR Description: hypothetical protein At2g24290 [imported] -
  misc_feature (1)..(165): Homolog of NCBI NO: 18400504 NR Description: expressed protein
MRCLVIFSVVSALLVCGPALYWKLNKGFVGSARSTNSICPPCVCDFPPPLSLLQIAPGLANLSITGCGSDDPELKEEMEKPFVDLLTEELKLQEAVADEHSRHMNVTLAEAKRVASQYQKEAEKCNAATEICESARERAQALLLKERKITFLWERRARQLGWEGE

SEQ ID NO: 22455 - protein, 88 aa, Arabidopsis thaliana
  peptide (1)..(88): Ceres Seq. ID no. 12384869
  misc_feature (1)..(88): Pfam Name: Protein of unknown function (DUF1068) Pfam Description: Protein of unknown function (DUF1068)
  misc_feature (1)..(86): Homolog of NCBI NO: 7487433 NR Description: hypothetical protein At2g32580 [imported] -
  misc_feature (1)..(87): Homolog of NCBI NO: 18390477 NR Description: expressed protein
  misc_feature (1)..(86): Homolog of NCBI NO: 21553781 NR Description: unknown [Arabidopsis thaliana]
  misc_feature (1)..(86): Homolog of NCBI NO: 18403016 NR Description: expressed protein
  misc_feature (1)..(87): Homolog of NCBI NO: 27922919 NR Description: unknown protein [Phytophthora sojae]
  misc_feature (1)..(86): Homolog of NCBI NO: 38345038 NR Description: OSJNBa0029H02.22 [Oryza sativa (japonica
  misc_feature (1)..(88): Homolog of NCBI NO: 25407700 NR Description: hypothetical protein AT4g30990 [imported] -
  misc_feature (1)..(88): Homolog of NCBI NO: 18417716 NR Description: Expressed protein
  misc_feature (1)..(88): Homolog of NCBI NO: 25364110 NR Description: hypothetical protein At2g24290 [imported] -
  misc_feature (1)..(88): Homolog of NCBI NO: 18400504 NR Description: expressed protein
MEKPFVDLLTEELKLQEAVADEHSRHMNVTLAEAKRVASQYQKEAEKCNAATEICESARERAQALLLKERKITFLWERRARQLGWEGE

SEQ ID NO: 22456 - DNA, 1364 bp, Arabidopsis thaliana
  misc_feature (1)..(1364): Ceres Seq. ID no. 12396109
  misc_feature: MA Experiment ID: 108434 Result: Up-regulated in Transcription
  misc_feature: MA Experiment 108434 PARAMETER Experiment Name: At_Root_Tips_cDNA_P Parameter: Tissue Value: Root Tips
  misc_feature: MA Experiment ID: 108461 Result: Down-regulated in Transcription
  misc_feature: MA Experiment 108461 PARAMETER Experiment Name: At_Germinating_Seeds_cDNA_P Parameter: Age (day) Value: 1 vs. 0
  misc_feature: MA Experiment 108461 PARAMETER Experiment Name: At_Germinating_Seeds_cDNA_P Parameter: Tissue Value: Germinating Seeds
  misc_feature: MA Experiment ID: 108462 Result: Down-regulated in Transcription
  misc_feature: MA Experiment 108462 PARAMETER Experiment Name: At_Germinating_Seeds_cDNA_P Parameter: Age (day) Value: 2 vs. 0
  misc_feature: MA Experiment 108462 PARAMETER Experiment Name: At_Germinating_Seeds_cDNA_P Parameter: Tissue Value: Germinating Seeds
  misc_feature: MA Experiment ID: 108463 Result: Down-regulated in Transcription
  misc_feature: MA Experiment 108463 PARAMETER Experiment Name: At_Germinating_Seeds_cDNA_P Parameter: Age (day) Value: 3 vs. 0
  misc_feature: MA Experiment 108463 PARAMETER Experiment Name: At_Germinating_Seeds_cDNA_P Parameter: Tissue Value: Germinating Seeds
  misc_feature: MA Experiment ID: 108464 Result: Down-regulated in Transcription
  misc_feature: MA Experiment 108464 PARAMETER Experiment Name: At_Germinating_Seeds_cDNA_P Parameter: Age (day) Value: 4 vs. 0
  misc_feature: MA Experiment 108464 PARAMETER Experiment Name: At_Germinating_Seeds_cDNA_P Parameter: Tissue Value: Germinating Seeds
  misc_feature: MA Experiment ID: 20000113 Result: Up-regulated in Transcription
  misc_feature: MA Experiment 20000113 PARAMETER Experiment Name: At_42deg_Heat_cDNA_P Parameter: Temperature (deg C) Value: 42 vs. 22
  misc_feature: MA Experiment 20000113 PARAMETER Experiment Name: At_42deg_Heat_cDNA_P Parameter: Timepoint (hr) Value: 8
  misc_feature: MA Experiment 20000113 PARAMETER Experiment Name: At_42deg_Heat_cDNA_P Parameter: Tissue Value: Aerial
  misc_feature: MA Experiment ID: 20001557 Result: Up-regulated in Transcription
  misc_feature: MA Experiment 20001557 PARAMETER Experiment Name: At_Drought_Soil_Dry_P Parameter: Age (day) Value: 27
  misc_feature: MA Experiment 20001557 PARAMETER Experiment Name: At_Drought_Soil_Dry_P Parameter: Organism Value: A. thaliana
  misc_feature: MA Experiment 20001557 PARAMETER Experiment Name: At_Drought_Soil_Dry_P Parameter: Plant Line Value: WS
  misc_feature: MA Experiment 20001557 PARAMETER Experiment Name: At_Drought_Soil_Dry_P Parameter: Post Timepoint (hr) Value: 3
  misc_feature: MA Experiment 20001557 PARAMETER Experiment Name: At_Drought_Soil_Dry_P Parameter: Post-Treatment Value: Re-Water vs. No Drought
  misc_feature: MA Experiment 20001557 PARAMETER Experiment Name: At_Drought_Soil_Dry_P Parameter: Timepoint (day) Value: 13
  misc_feature: MA Experiment 20001557 PARAMETER Experiment Name: At_Drought_Soil_Dry_P Parameter: Treatment Value: Drought vs. No Drought
  misc_feature: MA Experiment ID: 20001558 Result: Up-regulated in Transcription
  misc_feature: MA Experiment 20001558 PARAMETER Experiment Name: At_Drought_Soil_Dry_P Parameter: Age (day) Value: 27
  misc_feature: MA Experiment 20001558 PARAMETER Experiment Name: At_Drought_Soil_Dry_P Parameter: Organism Value: A. thaliana
  misc_feature: MA Experiment 20001558 PARAMETER Experiment Name: At_Drought_Soil_Dry_P Parameter: Plant Line Value: WS
  misc_feature: MA Experiment 20001558 PARAMETER Experiment Name: At_Drought_Soil_Dry_P Parameter: Post Timepoint (hr) Value: 6
  misc_feature: MA Experiment 20001558 PARAMETER Experiment Name: At_Drought_Soil_Dry_P Parameter: Post-Treatment Value: Re-Water vs. No Drought
  misc_feature: MA Experiment 20001558 PARAMETER Experiment Name: At_Drought_Soil_Dry_P Parameter: Timepoint (day) Value: 13
  misc_feature: MA Experiment 20001558 PARAMETER Experiment Name: At_Drought_Soil_Dry_P Parameter: Treatment Value: Drought vs. No Drought
gtctccaagcaaaaaacaaaaacctaaaacctccatcaacgccggaggaagaaattttgtgtcatctacaacgaattcgttaatcgccatgaaggaagacgaagtaaatcgatgccagattcagaattggtatccgagattcaaatccttaaccatcaaaaccaaatttcacaaacttccagaatcattcatcaactatctcatcgacgattctggtccgtttcttctccctcattccgtaacaaacgaagacgcaatgcctaacagagtccacaatttcgaagaagaagatgatttccaagtccccgaagaagcttcagatgacgaaccattgaatcgtccttcttttccagaactcgaaatcgagatcagagaatcaatcgaaaccctaggcggcacaattatcccgaagctgaattggagttcaccaaaagacgcagcttggattagtccatcacagaatctaagctacacttgtttcaatgagattgctctcttgtttcgttcctctgattcgttaacccatgatctcttcaatgcttatgattcatgtagtgacaaagtctcttcaaggccagaaagtttctaccttgcgttgagaaaatggtacccttcgttgaagcctgagatggaatttagatgctttgtgaaatctaacgagcttgttgggatttgtcagcgtgaggtaactacattttaccctgttcttctcaatgagaaggatttgctcaaggttttgatagaagagttcttagatgataagattaggtttgaatttgaatcagagaattacacttttgatgtttatgtgacgaaagagagaagagttaagctaatagatttcaatacttggtgtggttctactttgccattgatgtatacatgggaagaacttgagaagattcatggagaatgtgatgaattggaattgaggattgttgagagccgtctcagtgtgcttcctggtttgaaaacagctgttccttatgattatcttgacgtgagtgctggtagtggttgggctcaggttcttaagatagtggaagaggagtttcagaaagacgatcagagttctgatgaagttgcttgaagacttagattcttggttattggaagactagacaatatttttttgaactatcatagttgtgtgcctaccaataagtgtcgtgttccattgttgttctgaaacggtttagatcacgatgttggaactttgatggtgtctttttcttataagattttctcttctagactgcttttgtatttgtcttgttattcttctgcaaagaattgtgttgagtggcaaattgttcctgattggtttctcattaccaaatttgtacatggatgttggattagtt

SEQ ID NO: 22457 - protein, 362 aa, Arabidopsis thaliana
  peptide (1)..(362): Ceres Seq. ID no. 12396110
  misc_feature (28)..(337): Homolog of NCBI NO: 19114319 NR Description: hypothetical protein; similar to S. cerevisiae
  misc_feature (38)..(298): Homolog of NCBI NO: 40738933 NR Description: hypothetical protein AN6594.2 [Aspergillus
  misc_feature (37)..(78): Homolog of NCBI NO: 28829467 NR Description: similar to Homo sapiens (Human). HT-1080 protein
  misc_feature (94)..(321): Homolog of NCBI NO: 28829467 NR Description: similar to Homo sapiens (Human). HT-1080 protein
  misc_feature (30)..(355): Homolog of NCBI NO: 5174423 NR Description: D123 gene product [Homo sapiens]
  misc_feature (30)..(355): Homolog of NCBI NO: 23959082 NR Description: similar to expressed sequence AA959893 [Mus
  misc_feature (30)..(355): Homolog of NCBI NO: 3551742 NR Description: HT-1080 protein [Homo sapiens]
  misc_feature (30)..(355): Homolog of NCBI NO: 19527052 NR Description: expressed sequence AA959893 [Mus musculus]
  misc_feature (30)..(355): Homolog of NCBI NO: 25742671 NR Description: D123 gene product [Rattus norvegicus]
  misc_feature (30)..(362): Homolog of NCBI NO: 15235584 NR Description: D123 -like protein; protein id: At4g05440.1
SPSKKQKPKTSINAGGRNFVSSTTNSLIAMKEDEVNRCQIQNWYPRFKSLTIKTKFHKLPESFINYLIDDSGPFLLPHSVTNEDAMPNRVHNFEEEDDFQVPEEASDDEPLNRPSFPELEIEIRESIETLGGTIIPKLNWSSPKDAAWISPSQNLSYTCFNEIALLFRSSDSLTHDLFNAYDSCSDKVSSRPESFYLALRKWYPSLKPEMEFRCFVKSNELVGICQREVTTFYPVLLNEKDLLKVLIEEFLDDKIRFEFESENYTFDVYVTKERRVKLIDFNTWCGSTLPLMYTWEELEKIHGECDELELRIVESRLSVLPGLKTAVPYDYLDVSAGSGWAQVLKIVEEEFQKDDQSSDEVA

SEQ ID NO: 22458 - protein, 333 aa, Arabidopsis thaliana
  peptide (1)..(333): Ceres Seq. ID no. 12396111
  misc_feature (1)..(308): Homolog of NCBI NO: 19114319 NR Description: hypothetical protein; similar to S. cerevisiae
  misc_feature (9)..(269): Homolog of NCBI NO: 40738933 NR Description: hypothetical protein AN6594.2 [Aspergillus
  misc_feature (8)..(49): Homolog of NCBI NO: 28829467 NR Description: similar to Homo sapiens (Human). HT-1080 protein
  misc_feature (65)..(292): Homolog of NCBI NO: 28829467 NR Description: similar to Homo sapiens (Human). HT-1080 protein
  misc_feature (1)..(326): Homolog of NCBI NO: 5174423 NR Description: D123 gene product [Homo sapiens]
  misc_feature (1)..(326): Homolog of NCBI NO: 23959082 NR Description: similar to expressed sequence AA959893 [Mus
  misc_feature (1)..(326): Homolog of NCBI NO: 3551742 NR Description: HT-1080 protein [Homo sapiens]
  misc_feature (1)..(326): Homolog of NCBI NO: 19527052 NR Description: expressed sequence AA959893 [Mus musculus]
  misc_feature (1)..(326): Homolog of NCBI NO: 25742671 NR Description: D123 gene product [Rattus norvegicus]
  misc_feature (1)..(333): Homolog of NCBI NO: 15235584 NR Description: D123 -like protein; protein id: At4g05440.1
MKEDEVNRCQIQNWYPRFKSLTIKTKFHKLPESFINYLIDDSGPFLLPHSVTNEDAMPNRVHNFEEEDDFQVPEEASDDEPLNRPSFPELEIEIRESIETLGGTIIPKLNWSSPKDAAWISPSQNLSYTCFNEIALLFRSSDSLTHDLFNAYDSCSDKVSSRPESFYLALRKWYPSLKPEMEFRCFVKSNELVGICQREVTTFYPVLLNEKDLLKVLIEEFLDDKIRFEFESENYTFDVYVTKERRVKLIDFNTWCGSTLPLMYTWEELEKIHGECDELELRIVESRLSVLPGLKTAVPYDYLDVSAGSGWAQVLKIVEEEFQKDDQSSDEVA

SEQ ID NO: 22459 - protein, 277 aa, Arabidopsis thaliana
  peptide (1)..(277): Ceres Seq. ID no. 12396112
  misc_feature (1)..(252): Homolog of NCBI NO: 19114319 NR Description: hypothetical protein; similar to S. cerevisiae
  misc_feature (1)..(213): Homolog of NCBI NO: 40738933 NR Description: hypothetical protein AN6594.2 [Aspergillus
  misc_feature (9)..(236): Homolog of NCBI NO: 28829467 NR Description: similar to Homo sapiens (Human). HT-1080 protein
  misc_feature (1)..(270): Homolog of NCBI NO: 5174423 NR Description: D123 gene product [Homo sapiens]
  misc_feature (1)..(270): Homolog of NCBI NO: 23959082 NR Description: similar to expressed sequence AA959893 [Mus
  misc_feature (1)..(270): Homolog of NCBI NO: 3551742 NR Description: HT-1080 protein [Homo sapiens]
  misc_feature (1)..(270): Homolog of NCBI NO: 19527052 NR Description: expressed sequence AA959893 [Mus musculus]
  misc_feature (1)..(270): Homolog of NCBI NO: 25742671 NR Description: D123 gene product [Rattus norvegicus]
  misc_feature (1)..(277): Homolog of NCBI NO: 15235584 NR Description: D123 -like protein; protein id: At4g05440.1
  misc_feature (1)..(250): Homolog of NCBI NO: 6323244 NR Description: Product of gene unknown; Cdc123p [Saccharomyces
MPNRVHNFEEEDDFQVPEEASDDEPLNRPSFPELEIEIRESIETLGGTIIPKLNWSSPKDAAWISPSQNLSYTCFNEIALLFRSSDSLTHDLFNAYDSCSDKVSSRPESFYLALRKWYPSLKPEMEFRCFVKSNELVGICQREVTTFYPVLLNEKDLLKVLIEEFLDDKIRFEFESENYTFDVYVTKERRVKLIDFNTWCGSTLPLMYTWEELEKIHGECDELELRIVESRLSVLPGLKTAVPYDYLDVSAGSGWAQVLKIVEEEFQKDDQSSDEVA

SEQ ID NO: 22460 - DNA, 1287 bp, Arabidopsis thaliana
  misc_feature (1)..(1287): Ceres Seq. ID no. 12334830
  misc_feature: MA Experiment ID: 108434 Result: Up-regulated in Transcription
  misc_feature: MA Experiment 108434 PARAMETER Experiment Name: At_Root_Tips_cDNA_P Parameter: Tissue Value: Root Tips
  misc_feature: MA Experiment ID: 108595 Result: Down-regulated in Transcription
  misc_feature: MA Experiment 108595 PARAMETER Experiment Name: At_Ler-pi_Ovule_cDNA_P Parameter: Plant Line Value: null
  misc_feature: MA Experiment ID: 20000179 Result: Up-regulated in Transcription
  misc_feature: MA Experiment 20000179 PARAMETER Experiment Name: At_Germinating_Seeds_P Parameter: Age (hr) Value: 6 vs. 0
  misc_feature: MA Experiment 20000179 PARAMETER Experiment Name: At_Germinating_Seeds_P Parameter: Tissue Value: Germinating Seeds
  misc_feature: MA Experiment ID: 20000180 Result: Up-regulated in Transcription
  misc_feature: MA Experiment 20000180 PARAMETER Experiment Name: At_Germinating_Seeds_P Parameter: Age (hr) Value: 24 vs. 0
  misc_feature: MA Experiment 20000180 PARAMETER Experiment Name: At_Germinating_Seeds_P Parameter: Tissue Value: Germinating Seeds
  misc_feature: MA Experiment ID: 20000185 Result: Up-regulated in Transcription
  misc_feature: MA Experiment 20000185 PARAMETER Experiment Name: At_Roots__P Parameter: Age (day) Value: 7 vs. 21
  misc_feature: MA Experiment 20000185 PARAMETER Experiment Name: At_Roots__P Parameter: Organism Value: A. thaliana
  misc_feature: MA Experiment 20000185 PARAMETER Experiment Name: At_Roots__P Parameter: Tissue Value: Roots vs. Whole Plant
  misc_feature: MA Experiment ID: 20000234 Result: Up-regulated in Transcription
  misc_feature: MA Experiment 20000234 PARAMETER Experiment Name: At_Siliques_P Parameter: Age (day) Value: 21
  misc_feature: MA Experiment 20000234 PARAMETER Experiment Name: At_Siliques_P Parameter: Organism Value: A. thaliana
  misc_feature: MA Experiment 20000234 PARAMETER Experiment Name: At_Siliques_P Parameter: Plant Line Value: WS
  misc_feature: MA Experiment 20000234 PARAMETER Experiment Name: At_Siliques_P Parameter: Tissue Value: Less Than 5mm Siliques vs. Whole Plant
  misc_feature: MA Experiment ID: 20001451 Result: Down-regulated in Transcription
  misc_feature: MA Experiment 20001451 PARAMETER Experiment Name: At_Far-red-induction_P Parameter: Age (day) Value: 7
  misc_feature: MA Experiment 20001451 PARAMETER Experiment Name: At_Far-red-induction_P Parameter: Light Value: Far-red vs. White
  misc_feature: MA Experiment 20001451 PARAMETER Experiment Name: At_Far-red-induction_P Parameter: Organism Value: A. thaliana
  misc_feature: MA Experiment 20001451 PARAMETER Experiment Name: At_Far-red-induction_P Parameter: Plant Line Value: Columbia
  misc_feature: MA Experiment 20001451 PARAMETER Experiment Name: At_Far-red-induction_P Parameter: Timepoint (hr) Value: 24
  misc_feature: MA Experiment 20001451 PARAMETER Experiment Name: At_Far-red-induction_P Parameter: Tissue Value: Whole Plant
  misc_feature: MA Experiment ID: 20001911 Result: Down-regulated in Transcription
  misc_feature: MA Experiment 20001911 PARAMETER Experiment Name: At_Drought_Reproduction_P Parameter: Age (day) Value: 40
  misc_feature: MA Experiment 20001911 PARAMETER Experiment Name: At_Drought_Reproduction_P Parameter: Organism Value: A. thaliana
  misc_feature: MA Experiment 20001911 PARAMETER Experiment Name: At_Drought_Reproduction_P Parameter: Plant Line Value: WS
  misc_feature: MA Experiment 20001911 PARAMETER Experiment Name: At_Drought_Reproduction_P Parameter: Timepoint (day) Value: 10
  misc_feature: MA Experiment 20001911 PARAMETER Experiment Name: At_Drought_Reproduction_P Parameter: Tissue Value: Flowers
  misc_feature: MA Experiment 20001911 PARAMETER Experiment Name: At_Drought_Reproduction_P Parameter: Treatment Value: Drought vs. No Drought
atttttgttctttctcagagatctaaaccatcatggctacttccttcttccggcgactcgctaggtcagctccgattacattccctgtcgcatttggatctcaaagcaaatctggttctggcgctttccgattctccaccggtgcaatcgcggcactttccggtggattctcctattactacttgacatccggcaacaatctggtttatctggatcaagctaaggaagagacaggaccaaaaaccgctctaaaccctgataaatggctcgagttcaagcttcaagacactgctagagttagccacaacactcagttgttcaggttctcatttgacccctcagctgagttgggtctacatgttgcttcttgtctcctgacaagggctcctttaggctataatgctgaagggaaaacgaaatatgtcattagaccttacactcctatatcagatccagaggctaagggctattttgatttactgattaaggtatatcctgacggaaaaatgagtcagcattttgccagcttaaaaccgggggatgtgttggaagtaaaaggacccgttgaaaagttcaaatactcgccgaatatgaagaaacatattggcatgattgccggtggaagtgggattactccaatgcttcaggtgattgatgccattgtgaagaatcctgaggacaacacgcagatatcattgctttatgccaatgtgtctccagatgatatactcctgaagcagaagcttgatgtacttcaggctaaccacccaaatttgaagatattctatactgttgacaaccctactaaaaactggaaaggaggagtaggttacatttcaaaggatatggctctgaaaggcttacctcttcctaccgacgatactcttatccttgtatgcggtcctcctgggatgatggagcatatatctggaggcaaagctccagactggtcacaaggagaggtcaaggggattctcaaggaactcggatacacagaggaaatggtgttcaaattctgagtggactagagaatcagaatacgatctcaaggaggtttcctttcatgtaataaaatggccccaagcaaacattaattgatgcagagtgagcttgacaatcgagctaccgagctttgaaaataaacaaagcaaaacggatcagttagtcatttgtctctgcaggtaatagcggaacttgattttgatggtaaatttctatgcaaccaagatattgaatatggttcgaaagatgataattgtgcgtttaaaattcgcgtctgtgttttgg

SEQ ID NO: 22461 - protein, 328 aa, Arabidopsis thaliana
  peptide (1)..(328): Ceres Seq. ID no. 12334831
  misc_feature (188)..(301): Pfam Name: Oxidoreductase NAD-binding domain Pfam Description: Oxidoreductase NAD-binding domain
  misc_feature (1)..(328): Homolog of NCBI NO: 18420117 NR Description: cytochrome-b5 reductase - like protein
MATSFFRRLARSAPITFPVAFGSQSKSGSGAFRFSTGAIAALSGGFSYYYLTSGNNLVYLDQAKEETGPKTALNPDKWLEFKLQDTARVSHNTQLFRFSFDPSAELGLHVASCLLTRAPLGYNAEGKTKYVIRPYTPISDPEAKGYFDLLIKVYPDGKMSQHFASLKPGDVLEVKGPVEKFKYSPNMKKHIGMIAGGSGITPMLQVIDAIVKNPEDNTQISLLYANVSPDDILLKQKLDVLQANHPNLKIFYTVDNPTKNWKGGVGYISKDMALKGLPLPTDDTLILVCGPPGMMEHISGGKAPDWSQGEVKGILKELGYTEEMVFKF

SEQ ID NO: 22462 - protein, 170 aa, Arabidopsis thaliana
  peptide (1)..(170): Ceres Seq. ID no. 12334832
  misc_feature (30)..(143): Pfam Name: Oxidoreductase NAD-binding domain Pfam Description: Oxidoreductase NAD-binding domain
  misc_feature (1)..(170): Homolog of NCBI NO: 18420117 NR Description: cytochrome-b5 reductase - like protein
MSQHFASLKPGDVLEVKGPVEKFKYSPNMKKHIGMIAGGSGITPMLQVIDAIVKNPEDNTQISLLYANVSPDDILLKQKLDVLQANHPNLKIFYTVDNPTKNWKGGVGYISKDMALKGLPLPTDDTLILVCGPPGMMEHISGGKAPDWSQGEVKGILKELGYTEEMVFKF

SEQ ID NO: 22463 - DNA, 1064 bp, Arabidopsis thaliana
  misc_feature (1)..(1064): Ceres Seq. ID no. 12334652
  misc_feature: MA Experiment ID: 108435 Result: Down-regulated in Transcription
  misc_feature: MA Experiment 108435 PARAMETER Experiment Name: At_stm_Mutants_cDNA_P Parameter: Plant Line Value: wt Landsburg vs stm
  misc_feature: MA Experiment 108435 PARAMETER Experiment Name: At_stm_Mutants_cDNA_P Parameter: Tissue Value: Shoot Apical Meristem Region
  misc_feature: MA Experiment ID: 108461 Result: Down-regulated in Transcription
  misc_feature: MA Experiment 108461 PARAMETER Experiment Name: At_Germinating_Seeds_cDNA_P Parameter: Age (day) Value: 1 vs. 0
  misc_feature: MA Experiment 108461 PARAMETER Experiment Name: At_Germinating_Seeds_cDNA_P Parameter: Tissue Value: Germinating Seeds
  misc_feature: MA Experiment ID: 108462 Result: Down-regulated in Transcription
  misc_feature: MA Experiment 108462 PARAMETER Experiment Name: At_Germinating_Seeds_cDNA_P Parameter: Age (day) Value: 2 vs. 0
  misc_feature: MA Experiment 108462 PARAMETER Experiment Name: At_Germinating_Seeds_cDNA_P Parameter: Tissue Value: Germinating Seeds
  misc_feature: MA Experiment ID: 108463 Result: Down-regulated in Transcription
  misc_feature: MA Experiment 108463 PARAMETER Experiment Name: At_Germinating_Seeds_cDNA_P Parameter: Age (day) Value: 3 vs. 0
  misc_feature: MA Experiment 108463 PARAMETER Experiment Name: At_Germinating_Seeds_cDNA_P Parameter: Tissue Value: Germinating Seeds
  misc_feature: MA Experiment ID: 108464 Result: Down-regulated in Transcription
  misc_feature: MA Experiment 108464 PARAMETER Experiment Name: At_Germinating_Seeds_cDNA_P Parameter: Age (day) Value: 4 vs. 0
  misc_feature: MA Experiment 108464 PARAMETER Experiment Name: At_Germinating_Seeds_cDNA_P Parameter: Tissue Value: Germinating Seeds
  misc_feature: MA Experiment ID: 108474 Result: Up-regulated in Transcription
  misc_feature: MA Experiment 108474 PARAMETER Experiment Name: At_Drought_Flowers_cDNA_P Parameter: Timepoint (hr) Value: null
  misc_feature: MA Experiment 108474 PARAMETER Experiment Name: At_Drought_Flowers_cDNA_P Parameter: Treatment Value: Drought vs. No Drought
  misc_feature: MA Experiment ID: 108501 Result: Up-regulated in Transcription
  misc_feature: MA Experiment 108501 PARAMETER Experiment Name: At_ap2_floral_buds_cDNA_P Parameter: Plant Line Value: ap2 (Ler.)
  misc_feature: MA Experiment 108501 PARAMETER Experiment Name: At_ap2_floral_buds_cDNA_P Parameter: Tissue Value: Closed Flower
  misc_feature: MA Experiment ID: 108561 Result: Up-regulated in Transcription
  misc_feature: MA Experiment 108561 PARAMETER Experiment Name: At_100uM_ABA_cDNA_P Parameter: Timepoint (hr) Value: 6
  misc_feature: MA Experiment 108561 PARAMETER Experiment Name: At_100uM_ABA_cDNA_P Parameter: Tissue Value: Aerial
  misc_feature: MA Experiment 108561 PARAMETER Experiment Name: At_100uM_ABA_cDNA_P Parameter: Treatment Value: 100uM ABA vs. No Treatment
  misc_feature: MA Experiment ID: 108579 Result: Down-regulated in Transcription
  misc_feature: MA Experiment 108579 PARAMETER Experiment Name: At_4deg_Cold_cDNA_P Parameter: Temperature (deg C) Value: 4 vs. 22
  misc_feature: MA Experiment 108579 PARAMETER Experiment Name: At_4deg_Cold_cDNA_P Parameter: Timepoint (hr) Value: 6
  misc_feature: MA Experiment 108579 PARAMETER Experiment Name: At_4deg_Cold_cDNA_P Parameter: Tissue Value: Aerial
  misc_feature: MA Experiment ID: 108585 Result: Down-regulated in Transcription
  misc_feature: MA Experiment 108585 PARAMETER Experiment Name: At_5mM_NaNP_cDNA_P Parameter: Timepoint (hr) Value: 6
  misc_feature: MA Experiment 108585 PARAMETER Experiment Name: At_5mM_NaNP_cDNA_P Parameter: Tissue Value: Aerial
  misc_feature: MA Experiment 108585 PARAMETER Experiment Name: At_5mM_NaNP_cDNA_P Parameter: Treatment Value: null
  misc_feature: MA Experiment ID: 108605 Result: Up-regulated in Transcription
  misc_feature: MA Experiment 108605 PARAMETER Experiment Name: At_100uM_ABA_cDNA_P Parameter: Timepoint (hr) Value: 6
  misc_feature: MA Experiment 108605 PARAMETER Experiment Name: At_100uM_ABA_cDNA_P Parameter: Tissue Value: Aerial
  misc_feature: MA Experiment 108605 PARAMETER Experiment Name: At_100uM_ABA_cDNA_P Parameter: Treatment Value: 100uM ABA vs. No Treatment
  misc_feature: MA Experiment ID: 108607 Result: Up-regulated in Transcription
  misc_feature: MA Experiment 108607 PARAMETER Experiment Name: At_100uM_ABA_cDNA_P Parameter: Timepoint (hr) Value: 4
  misc_feature: MA Experiment 108607 PARAMETER Experiment Name: At_100uM_ABA_cDNA_P Parameter: Tissue Value: Aerial
  misc_feature: MA Experiment 108607 PARAMETER Experiment Name: At_100uM_ABA_cDNA_P Parameter: Treatment Value: 100uM ABA vs. No Treatment
  misc_feature: MA Experiment ID: 108609 Result: Up-regulated in Transcription
  misc_feature: MA Experiment 108609 PARAMETER Experiment Name: At_100uM_ABA_cDNA_P Parameter: Timepoint (hr) Value: 24
  misc_feature: MA Experiment 108609 PARAMETER Experiment Name: At_100uM_ABA_cDNA_P Parameter: Tissue Value: Aerial
  misc_feature: MA Experiment 108609 PARAMETER Experiment Name: At_100uM_ABA_cDNA_P Parameter: Treatment Value: 100uM ABA vs. No Treatment
  misc_feature: MA Experiment ID: 108668 Result: Down-regulated in Transcription
  misc_feature: MA Experiment 108668 PARAMETER Experiment Name: At_2mM_SA_cDNA_P Parameter: Plant Line Value: WS
  misc_feature: MA Experiment 108668 PARAMETER Experiment Name: At_2mM_SA_cDNA_P Parameter: Timepoint (hr) Value: 6
  misc_feature: MA Experiment 108668 PARAMETER Experiment Name: At_2mM_SA_cDNA_P Parameter: Treatment Value: 2mM SA vs. No Treatment
  misc_feature: MA Experiment ID: 20000069 Result: Up-regulated in Transcription
  misc_feature: MA Experiment 20000069 PARAMETER Experiment Name: At_100uM_ABA_Mutants_cDNA_P Parameter: Plant Line Value: CS23
  misc_feature: MA Experiment 20000069 PARAMETER Experiment Name: At_100uM_ABA_Mutants_cDNA_P Parameter: Timepoint (hr) Value: 6
  misc_feature: MA Experiment 20000069 PARAMETER Experiment Name: At_100uM_ABA_Mutants_cDNA_P Parameter: Tissue Value: Aerial
  misc_feature: MA Experiment 20000069 PARAMETER Experiment Name: At_100uM_ABA_Mutants_cDNA_P Parameter: Treatment Value: 100uM ABA vs. No Treatment
  misc_feature: MA Experiment ID: 20000070 Result: Up-regulated in Transcription
  misc_feature: MA Experiment 20000070 PARAMETER Experiment Name: At_100uM_ABA_Mutants_cDNA_P Parameter: Plant Line Value: CS24
  misc_feature: MA Experiment 20000070 PARAMETER Experiment Name: At_100uM_ABA_Mutants_cDNA_P Parameter: Timepoint (hr) Value: 6
  misc_feature: MA Experiment 20000070 PARAMETER Experiment Name: At_100uM_ABA_Mutants_cDNA_P Parameter: Tissue Value: Aerial
  misc_feature: MA Experiment 20000070 PARAMETER Experiment Name: At_100uM_ABA_Mutants_cDNA_P Parameter: Treatment Value: 100uM ABA vs. No Treatment
  misc_feature: MA Experiment ID: 20000071 Result: Up-regulated in Transcription
  misc_feature: MA Experiment 20000071 PARAMETER Experiment Name: At_100uM_ABA_Mutants_cDNA_P Parameter: Plant Line Value: CS8104
  misc_feature: MA Experiment 20000071 PARAMETER Experiment Name: At_100uM_ABA_Mutants_cDNA_P Parameter: Timepoint (hr) Value: 6
  misc_feature: MA Experiment 20000071 PARAMETER Experiment Name: At_100uM_ABA_Mutants_cDNA_P Parameter: Tissue Value: Aerial
  misc_feature: MA Experiment 20000071 PARAMETER Experiment Name: At_100uM_ABA_Mutants_cDNA_P Parameter: Treatment Value: 100uM ABA vs. No Treatment
  misc_feature: MA Experiment ID: 20000086 Result: Up-regulated in Transcription
  misc_feature: MA Experiment 20000086 PARAMETER Experiment Name: At_100uM_ABA_Mutants_cDNA_P Parameter: Plant Line Value: CS22
  misc_feature: MA Experiment 20000086 PARAMETER Experiment Name: At_100uM_ABA_Mutants_cDNA_P Parameter: Timepoint (hr) Value: 6
  misc_feature: MA Experiment 20000086 PARAMETER Experiment Name: At_100uM_ABA_Mutants_cDNA_P Parameter: Tissue Value: Aerial
  misc_feature: MA Experiment 20000086 PARAMETER Experiment Name: At_100uM_ABA_Mutants_cDNA_P Parameter: Treatment Value: 100uM ABA vs. No Treatment
  misc_feature: MA Experiment ID: 20000088 Result: Up-regulated in Transcription
  misc_feature: MA Experiment 20000088 PARAMETER Experiment Name: At_100uM_ABA_Mutants_cDNA_P Parameter: Plant Line Value: Landsberg
  misc_feature: MA Experiment 20000088 PARAMETER Experiment Name: At_100uM_ABA_Mutants_cDNA_P Parameter: Timepoint (hr) Value: 6
  misc_feature: MA Experiment 20000088 PARAMETER Experiment Name: At_100uM_ABA_Mutants_cDNA_P Parameter: Tissue Value: Aerial
  misc_feature: MA Experiment 20000088 PARAMETER Experiment Name: At_100uM_ABA_Mutants_cDNA_P Parameter: Treatment Value: 100uM ABA vs. No Treatment
  misc_feature: MA Experiment ID: 20000090 Result: Down-regulated in Transcription
  misc_feature: MA Experiment ID: 20000111 Result: Down-regulated in Transcription
  misc_feature: MA Experiment 20000111 PARAMETER Experiment Name: At_42deg_Heat_cDNA_P Parameter: Temperature (deg C) Value: 42 vs. 22
  misc_feature: MA Experiment 20000111 PARAMETER Experiment Name: At_42deg_Heat_cDNA_P Parameter: Timepoint (hr) Value: 6
  misc_feature: MA Experiment 20000111 PARAMETER Experiment Name: At_42deg_Heat_cDNA_P Parameter: Tissue Value: Aerial
  misc_feature: MA Experiment ID: 20000117 Result: Up-regulated in Transcription
  misc_feature: MA Experiment 20000117 PARAMETER Experiment Name: At_100uM_ABA_Mutants_cDNA_P Parameter: Plant Line Value: Columbia
  misc_feature: MA Experiment 20000117 PARAMETER Experiment Name: At_100uM_ABA_Mutants_cDNA_P Parameter: Timepoint (hr) Value: 6
  misc_feature: MA Experiment 20000117 PARAMETER Experiment Name: At_100uM_ABA_Mutants_cDNA_P Parameter: Tissue Value: Aerial
  misc_feature: MA Experiment 20000117 PARAMETER Experiment Name: At_100uM_ABA_Mutants_cDNA_P Parameter: Treatment Value: 100uM ABA vs. No Treatment
  misc_feature: MA Experiment ID: 20000144 Result: Down-regulated in Transcription
  misc_feature: MA Experiment 20000144 PARAMETER Experiment Name: At_42deg_Heat_cDNA_P Parameter: Temperature (deg C) Value: 42 vs. 22
  misc_feature: MA Experiment 20000144 PARAMETER Experiment Name: At_42deg_Heat_cDNA_P Parameter: Timepoint (hr) Value: 1
  misc_feature: MA Experiment 20000144 PARAMETER Experiment Name: At_42deg_Heat_cDNA_P Parameter: Tissue Value: Aerial
  misc_feature: MA Experiment ID: 20000169 Result: Up-regulated in Transcription
  misc_feature: MA Experiment 20000169 PARAMETER Experiment Name: At_100uM_ABA_P Parameter: Age (day) Value: 14
  misc_feature: MA Experiment 20000169 PARAMETER Experiment Name: At_100uM_ABA_P Parameter: Organism Value: A. thaliana
  misc_feature: MA Experiment 20000169 PARAMETER Experiment Name: At_100uM_ABA_P Parameter: Plant Line Value: WS
  misc_feature: MA Experiment 20000169 PARAMETER Experiment Name: At_100uM_ABA_P Parameter: Timepoint (hr) Value: 6
  misc_feature: MA Experiment 20000169 PARAMETER Experiment Name: At_100uM_ABA_P Parameter: Tissue Value: Aerial
  misc_feature: MA Experiment 20000169 PARAMETER Experiment Name: At_100uM_ABA_P Parameter: Treatment Value: 100uM ABA vs. No Treatment
  misc_feature: MA Experiment ID: 20000171 Result: Down-regulated in Transcription
  misc_feature: MA Experiment 20000171 PARAMETER Experiment Name: At_42deg_Heat_P Parameter: Age (day) Value: 14
  misc_feature: MA Experiment 20000171 PARAMETER Experiment Name: At_42deg_Heat_P Parameter: Organism Value: A. thaliana
  misc_feature: MA Experiment 20000171 PARAMETER Experiment Name: At_42deg_Heat_P Parameter: Plant Line Value: WS
  misc_feature: MA Experiment 20000171 PARAMETER Experiment Name: At_42deg_Heat_P Parameter: Temperature (deg C) Value: 42 vs. 22
  misc_feature: MA Experiment 20000171 PARAMETER Experiment Name: At_42deg_Heat_P Parameter: Timepoint (hr) Value: 1
  misc_feature: MA Experiment 20000171 PARAMETER Experiment Name: At_42deg_Heat_P Parameter: Tissue Value: Aerial
  misc_feature: MA Experiment ID: 20000173 Result: Down-regulated in Transcription
  misc_feature: MA Experiment 20000173 PARAMETER Experiment Name: At_42deg_Heat_P Parameter: Age (day) Value: 14
  misc_feature: MA Experiment 20000173 PARAMETER Experiment Name: At_42deg_Heat_P Parameter: Organism Value: A. thaliana
  misc_feature: MA Experiment 20000173 PARAMETER Experiment Name: At_42deg_Heat_P Parameter: Plant Line Value: WS
  misc_feature: MA Experiment 20000173 PARAMETER Experiment Name: At_42deg_Heat_P Parameter: Temperature (deg C) Value: 42 vs. 22
  misc_feature: MA Experiment 20000173 PARAMETER Experiment Name: At_42deg_Heat_P Parameter: Timepoint (hr) Value: 6
  misc_feature: MA Experiment 20000173 PARAMETER Experiment Name: At_42deg_Heat_P Parameter: Tissue Value: Aerial
  misc_feature: MA Experiment ID: 20000182 Result: Down-regulated in Transcription
  misc_feature: MA Experiment 20000182 PARAMETER Experiment Name: At_2mM_SA_P Parameter: Age (day) Value: 14
  misc_feature: MA Experiment 20000182 PARAMETER Experiment Name: At_2mM_SA_P Parameter: Organism Value: A. thaliana
  misc_feature: MA Experiment 20000182 PARAMETER Experiment Name: At_2mM_SA_P Parameter: Plant Line Value: WS
  misc_feature: MA Experiment 20000182 PARAMETER Experiment Name: At_2mM_SA_P Parameter: Timepoint (hr) Value: 6
  misc_feature: MA Experiment 20000182 PARAMETER Experiment Name: At_2mM_SA_P Parameter: Tissue Value: Aerial
  misc_feature: MA Experiment 20000182 PARAMETER Experiment Name: At_2mM_SA_P Parameter: Treatment Value: 2mM SA vs. No Treatment
  misc_feature: MA Experiment ID: 20000184 Result: Down-regulated in Transcription
  misc_feature: MA Experiment 20000184 PARAMETER Experiment Name: At_Shoots__P Parameter: Age (day) Value: 7
  misc_feature: MA Experiment 20000184 PARAMETER Experiment Name: At_Shoots__P Parameter: Tissue Value: Shoots vs. Whole Plant
  misc_feature: MA Experiment ID: 20000213 Result: Down-regulated in Transcription
  misc_feature: MA Experiment 20000213 PARAMETER Experiment Name: At_4deg_Cold_P Parameter: Timepoint (hr) Value: 2
  misc_feature: MA Experiment ID: 20000214 Result: Down-regulated in Transcription
  misc_feature: MA Experiment 20000214 PARAMETER Experiment Name: At_4deg_Cold_P Parameter: Timepoint (hr) Value: 6
  misc_feature: MA Experiment ID: 20000224 Result: Down-regulated in Transcription
  misc_feature: MA Experiment ID: 20000227 Result: Up-regulated in Transcription
  misc_feature: MA Experiment 20000227 PARAMETER Experiment Name: At_Root-Tips-vs-Tops_P Parameter: Tissue Value: Root Tips vs. Root Tops
  misc_feature: MA Experiment ID: 20000234 Result: Down-regulated in Transcription
  misc_feature: MA Experiment 20000234 PARAMETER Experiment Name: At_Siliques_P Parameter: Age (day) Value: 21
  misc_feature: MA Experiment 20000234 PARAMETER Experiment Name: At_Siliques_P Parameter: Organism Value: A. thaliana
  misc_feature: MA Experiment 20000234 PARAMETER Experiment Name: At_Siliques_P Parameter: Plant Line Value: WS
  misc_feature: MA Experiment 20000234 PARAMETER Experiment Name: At_Siliques_P Parameter: Tissue Value: Less Than 5mm Siliques vs. Whole Plant
  misc_feature: MA Experiment ID: 20000235 Result: Down-regulated in Transcription
  misc_feature: MA Experiment 20000235 PARAMETER Experiment Name: At_Siliques_P Parameter: Age (day) Value: 21
  misc_feature: MA Experiment 20000235 PARAMETER Experiment Name: At_Siliques_P Parameter: Organism Value: A. thaliana
  misc_feature: MA Experiment 20000235 PARAMETER Experiment Name: At_Siliques_P Parameter: Plant Line Value: WS
  misc_feature: MA Experiment 20000235 PARAMETER Experiment Name: At_Siliques_P Parameter: Tissue Value: 5-10mm Siliques vs. Whole Plant
  misc_feature: MA Experiment ID: 20000264 Result: Down-regulated in Transcription
  misc_feature: MA Experiment 20000264 PARAMETER Experiment Name: At_Open_Flower_P Parameter: Age (day) Value: 21
  misc_feature: MA Experiment 20000264 PARAMETER Experiment Name: At_Open_Flower_P Parameter: Plant Line Value: WS
  misc_feature: MA Experiment 20000264 PARAMETER Experiment Name: At_Open_Flower_P Parameter: Tissue Value: Open Flower vs. Whole Plant
  misc_feature: MA Experiment ID: 20000265 Result: Down-regulated in Transcription
  misc_feature: MA Experiment 20000265 PARAMETER Experiment Name: At_Open_Flower_P Parameter: Age (day) Value: 21
  misc_feature: MA Experiment 20000265 PARAMETER Experiment Name: At_Open_Flower_P Parameter: Plant Line Value: WS
  misc_feature: MA Experiment 20000265 PARAMETER Experiment Name: At_Open_Flower_P Parameter: Tissue Value: Closed Flower vs. Whole Plant
  misc_feature: MA Experiment ID: 20000267 Result: Down-regulated in Transcription
  misc_feature: MA Experiment 20000267 PARAMETER Experiment Name: At_Drought_P Parameter: Age (day) Value: 7
  misc_feature: MA Experiment 20000267 PARAMETER Experiment Name: At_Drought_P Parameter: Organism Value: A. thaliana
  misc_feature: MA Experiment 20000267 PARAMETER Experiment Name: At_Drought_P Parameter: Plant Line Value: WS
  misc_feature: MA Experiment 20000267 PARAMETER Experiment Name: At_Drought_P Parameter: Timepoint (hr) Value: 6
  misc_feature: MA Experiment 20000267 PARAMETER Experiment Name: At_Drought_P Parameter: Tissue Value: Whole Plant
  misc_feature: MA Experiment 20000267 PARAMETER Experiment Name: At_Drought_P Parameter: Treatment Value: Drought vs. No Drought
  misc_feature: MA Experiment ID: 20000286 Result: Down-regulated in Transcription
  misc_feature: MA Experiment 20000286 PARAMETER Experiment Name: At_Open_Flower_P Parameter: Age (day) Value: 21
  misc_feature: MA Experiment 20000286 PARAMETER Experiment Name: At_Open_Flower_P Parameter: Plant Line Value: WS
  misc_feature: MA Experiment 20000286 PARAMETER Experiment Name: At_Open_Flower_P Parameter: Tissue Value: Half Open vs. Whole Plant
  misc_feature: MA Experiment ID: 20000436 Result: Down-regulated in Transcription
  misc_feature: MA Experiment 20000436 PARAMETER Experiment Name: At_Drought_P Parameter: Age (day) Value: 7
  misc_feature: MA Experiment 20000436 PARAMETER Experiment Name: At_Drought_P Parameter: Organism Value: A. thaliana
  misc_feature: MA Experiment 20000436 PARAMETER Experiment Name: At_Drought_P Parameter: Plant Line Value: WS
  misc_feature: MA Experiment 20000436 PARAMETER Experiment Name: At_Drought_P Parameter: Timepoint (hr) Value: 12
  misc_feature: MA Experiment 20000436 PARAMETER Experiment Name: At_Drought_P Parameter: Tissue Value: Whole Plant
  misc_feature: MA Experiment 20000436 PARAMETER Experiment Name: At_Drought_P Parameter: Treatment Value: Drought vs. No Drought
  misc_feature: MA Experiment ID: 20000437 Result: Down-regulated in Transcription
  misc_feature: MA Experiment 20000437 PARAMETER Experiment Name: At_Drought_P Parameter: Age (day) Value: 8
  misc_feature: MA Experiment 20000437 PARAMETER Experiment Name: At_Drought_P Parameter: Organism Value: A. thaliana
  misc_feature: MA Experiment 20000437 PARAMETER Experiment Name: At_Drought_P Parameter: Plant Line Value: WS
  misc_feature: MA Experiment 20000437 PARAMETER Experiment Name: At_Drought_P Parameter: Timepoint (hr) Value: 24
  misc_feature: MA Experiment 20000437 PARAMETER Experiment Name: At_Drought_P Parameter: Tissue Value: Whole Plant
  misc_feature: MA Experiment 20000437 PARAMETER Experiment Name: At_Drought_P Parameter: Treatment Value: Drought vs. No Drought
  misc_feature: MA Experiment ID: 20000438 Result: Down-regulated in Transcription
  misc_feature: MA Experiment 20000438 PARAMETER Experiment Name: At_Shoots__P Parameter: Age (day) Value: 14
  misc_feature: MA Experiment 20000438 PARAMETER Experiment Name: At_Shoots__P Parameter: Tissue Value: Shoots vs. Whole Plant
  misc_feature: MA Experiment ID: 20000441 Result: Up-regulated in Transcription
  misc_feature: MA Experiment 20000441 PARAMETER Experiment Name: At_1uM_BR-BRZ__P Parameter: Tissue Value: Shoot Apices
  misc_feature: MA Experiment 20000441 PARAMETER Experiment Name: At_1uM_BR-BRZ__P Parameter: Treatment Value: 1uM BR vs. No Treatment
  misc_feature: MA Experiment ID: 20000445 Result: Up-regulated in Transcription
  misc_feature: MA Experiment 20000445 PARAMETER Experiment Name: At_100uM_NAA__P Parameter: Age (day) Value: 14
  misc_feature: MA Experiment 20000445 PARAMETER Experiment Name: At_100uM_NAA__P Parameter: Organism Value: A. thaliana
  misc_feature: MA Experiment 20000445 PARAMETER Experiment Name: At_100uM_NAA__P Parameter: Plant Line Value: WS
  misc_feature: MA Experiment 20000445 PARAMETER Experiment Name: At_100uM_NAA__P Parameter: Timepoint (hr) Value: 6
  misc_feature: MA Experiment 20000445 PARAMETER Experiment Name: At_100uM_NAA__P Parameter: Tissue Value: Aerial
  misc_feature: MA Experiment 20000445 PARAMETER Experiment Name: At_100uM_NAA__P Parameter: Treatment Value: 100uM NAA vs. No Treatment
  misc_feature: MA Experiment ID: 20000452 Result: Down-regulated in Transcription
  misc_feature: MA Experiment 20000452 PARAMETER Experiment Name: At_CS6879_Shoots-Roots_P Parameter: Age (day) Value: 14
  misc_feature: MA Experiment 20000452 PARAMETER Experiment Name: At_CS6879_Shoots-Roots_P Parameter: Organism Value: A. thaliana
  misc_feature: MA Experiment 20000452 PARAMETER Experiment Name: At_CS6879_Shoots-Roots_P Parameter: Plant Line Value: CS6879 vs. WS
  misc_feature: MA Experiment 20000452 PARAMETER Experiment Name: At_CS6879_Shoots-Roots_P Parameter: Tissue Value: Shoots
  misc_feature: MA Experiment ID: 20000453 Result: Up-regulated in Transcription
  misc_feature: MA Experiment 20000453 PARAMETER Experiment Name: At_100uM_ABA_P Parameter: Age (day) Value: 15
  misc_feature: MA Experiment 20000453 PARAMETER Experiment Name: At_100uM_ABA_P Parameter: Organism Value: A. thaliana
  misc_feature: MA Experiment 20000453 PARAMETER Experiment Name: At_100uM_ABA_P Parameter: Plant Line Value: WS
  misc_feature: MA Experiment 20000453 PARAMETER Experiment Name: At_100uM_ABA_P Parameter: Timepoint (hr) Value: 24
  misc_feature: MA Experiment 20000453 PARAMETER Experiment Name: At_100uM_ABA_P Parameter: Tissue Value: Aerial
  misc_feature: MA Experiment 20000453 PARAMETER Experiment Name: At_100uM_ABA_P Parameter: Treatment Value: 100uM ABA vs. No Treatment
  misc_feature: MA Experiment ID: 20000455 Result: Up-regulated in Transcription
  misc_feature: MA Experiment 20000455 PARAMETER Experiment Name: At_100uM_ABA_P Parameter: Age (day) Value: 16
  misc_feature: MA Experiment 20000455 PARAMETER Experiment Name: At_100uM_ABA_P Parameter: Organism Value: A. thaliana
  misc_feature: MA Experiment 20000455 PARAMETER Experiment Name: At_100uM_ABA_P Parameter: Plant Line Value: WS
  misc_feature: MA Experiment 20000455 PARAMETER Experiment Name: At_100uM_ABA_P Parameter: Timepoint (hr) Value: 48
  misc_feature: MA Experiment 20000455 PARAMETER Experiment Name: At_100uM_ABA_P Parameter: Tissue Value: Aerial
  misc_feature: MA Experiment 20000455 PARAMETER Experiment Name: At_100uM_ABA_P Parameter: Treatment Value: 100uM ABA vs. No Treatment
  misc_feature: MA Experiment ID: 20000456 Result: Down-regulated in Transcription
  misc_feature: MA Experiment 20000456 PARAMETER Experiment Name: At_100uM_BA_P Parameter: Age (day) Value: 14
  misc_feature: MA Experiment 20000456 PARAMETER Experiment Name: At_100uM_BA_P Parameter: Organism Value: A. thaliana
  misc_feature: MA Experiment 20000456 PARAMETER Experiment Name: At_100uM_BA_P Parameter: Plant Line Value: WS
  misc_feature: MA Experiment 20000456 PARAMETER Experiment Name: At_100uM_BA_P Parameter: Timepoint (hr) Value: 6
  misc_feature: MA Experiment 20000456 PARAMETER Experiment Name: At_100uM_BA_P Parameter: Tissue Value: Aerial
  misc_feature: MA Experiment 20000456 PARAMETER Experiment Name: At_100uM_BA_P Parameter: Treatment Value: 100uM BA vs. No Treatment
  misc_feature: MA Experiment ID: 20000495 Result: Up-regulated in Transcription
  misc_feature: MA Experiment 20000495 PARAMETER Experiment Name: At_Guard_Cells_P Parameter: Harvest Date Value: 8/2/2002
  misc_feature: MA Experiment 20000495 PARAMETER Experiment Name: At_Guard_Cells_P Parameter: Organism Value: A. thaliana
  misc_feature: MA Experiment 20000495 PARAMETER Experiment Name: At_Guard_Cells_P Parameter: Tissue Value: Guard Cells vs. Leaves
  misc_feature: MA Experiment ID: 20000527 Result: Down-regulated in Transcription
  misc_feature: MA Experiment 20000527 PARAMETER Experiment Name: At_10percent_PEG_P Parameter: Age (day) Value: 20
  misc_feature: MA Experiment 20000527 PARAMETER Experiment Name: At_10percent_PEG_P Parameter: Organism Value: A. thaliana
  misc_feature: MA Experiment 20000527 PARAMETER Experiment Name: At_10percent_PEG_P Parameter: Plant Line Value: WS
  misc_feature: MA Experiment 20000527 PARAMETER Experiment Name: At_10percent_PEG_P Parameter: Timepoint (day) Value: 20
  misc_feature: MA Experiment 20000527 PARAMETER Experiment Name: At_10percent_PEG_P Parameter: Tissue Value: Whole Plant
  misc_feature: MA Experiment 20000527 PARAMETER Experiment Name: At_10percent_PEG_P Parameter: Treatment Value: 10percent PEG vs. No Treatment
  misc_feature: MA Experiment ID: 20000573 Result: Up-regulated in Transcription
  misc_feature: MA Experiment 20000573 PARAMETER Experiment Name: At_100uM_ABA_Mutants__P Parameter: Organism Value: A. thaliana
  misc_feature: MA Experiment 20000573 PARAMETER Experiment Name: At_100uM_ABA_Mutants__P Parameter: Plant Line Value: CS22 vs. Ler wt
  misc_feature: MA Experiment 20000573 PARAMETER Experiment Name: At_100uM_ABA_Mutants__P Parameter: Timepoint (hr) Value: N/A
  misc_feature: MA Experiment 20000573 PARAMETER Experiment Name: At_100uM_ABA_Mutants__P Parameter: Tissue Value: Whole Plant
  misc_feature: MA Experiment 20000573 PARAMETER Experiment Name: At_100uM_ABA_Mutants__P Parameter: Treatment Value: None
  misc_feature: MA Experiment ID: 20000574 Result: Up-regulated in Transcription
  misc_feature: MA Experiment 20000574 PARAMETER Experiment Name: At_100uM_ABA_Mutants__P Parameter: Organism Value: A. thaliana
  misc_feature: MA Experiment 20000574 PARAMETER Experiment Name: At_100uM_ABA_Mutants__P Parameter: Plant Line Value: CS23 vs. Ler wt
  misc_feature: MA Experiment 20000574 PARAMETER Experiment Name: At_100uM_ABA_Mutants__P Parameter: Timepoint (hr) Value: N/A
  misc_feature: MA Experiment 20000574 PARAMETER Experiment Name: At_100uM_ABA_Mutants__P Parameter: Tissue Value: Whole Plant
  misc_feature: MA Experiment 20000574 PARAMETER Experiment Name: At_100uM_ABA_Mutants__P Parameter: Treatment Value: None
  misc_feature: MA Experiment ID: 20000794 Result: Down-regulated in Transcription
  misc_feature: MA Experiment 20000794 PARAMETER Experiment Name: At_Petals_P Parameter: Age (day) Value: 23-25 days
  misc_feature: MA Experiment 20000794 PARAMETER Experiment Name: At_Petals_P Parameter: Plant Line Value: WS
  misc_feature: MA Experiment 20000794 PARAMETER Experiment Name: At_Petals_P Parameter: Tissue Value: Petals vs. Whole plant
  misc_feature: MA Experiment ID: 20001248 Result: Up-regulated in Transcription
  misc_feature: MA Experiment 20001248 PARAMETER Experiment Name: At_Far-red-induction_P Parameter: Age (day) Value: 7
  misc_feature: MA Experiment 20001248 PARAMETER Experiment Name: At_Far-red-induction_P Parameter: Light Value: Far-red vs. White
  misc_feature: MA Experiment 20001248 PARAMETER Experiment Name: At_Far-red-induction_P Parameter: Organism Value: A. thaliana
  misc_feature: MA Experiment 20001248 PARAMETER Experiment Name: At_Far-red-induction_P Parameter: Plant Line Value: Columbia
  misc_feature: MA Experiment 20001248 PARAMETER Experiment Name: At_Far-red-induction_P Parameter: Timepoint (hr) Value: 4
  misc_feature: MA Experiment 20001248 PARAMETER Experiment Name: At_Far-red-induction_P Parameter: Tissue Value: Whole Plant
  misc_feature: MA Experiment ID: 20001450 Result: Up-regulated in Transcription
  misc_feature: MA Experiment 20001450 PARAMETER Experiment Name: At_Far-red-induction_P Parameter: Age (day) Value: 7
  misc_feature: MA Experiment 20001450 PARAMETER Experiment Name: At_Far-red-induction_P Parameter: Light Value: Far-red vs. White
  misc_feature: MA Experiment 20001450 PARAMETER Experiment Name: At_Far-red-induction_P Parameter: Organism Value: A. thaliana
  misc_feature: MA Experiment 20001450 PARAMETER Experiment Name: At_Far-red-induction_P Parameter: Plant Line Value: Columbia
  misc_feature: MA Experiment 20001450 PARAMETER Experiment Name: At_Far-red-induction_P Parameter: Timepoint (hr) Value: 8
  misc_feature: MA Experiment 20001450 PARAMETER Experiment Name: At_Far-red-induction_P Parameter: Tissue Value: Whole Plant
  misc_feature: MA Experiment ID: 20001451 Result: Up-regulated in Transcription
  misc_feature: MA Experiment 20001451 PARAMETER Experiment Name: At_Far-red-induction_P Parameter: Age (day) Value: 7
  misc_feature: MA Experiment 20001451 PARAMETER Experiment Name: At_Far-red-induction_P Parameter: Light Value: Far-red vs. White
  misc_feature: MA Experiment 20001451 PARAMETER Experiment Name: At_Far-red-induction_P Parameter: Organism Value: A. thaliana
  misc_feature: MA Experiment 20001451 PARAMETER Experiment Name: At_Far-red-induction_P Parameter: Plant Line Value: Columbia
  misc_feature: MA Experiment 20001451 PARAMETER Experiment Name: At_Far-red-induction_P Parameter: Timepoint (hr) Value: 24
  misc_feature: MA Experiment 20001451 PARAMETER Experiment Name: At_Far-red-induction_P Parameter: Tissue Value: Whole Plant
  misc_feature: MA Experiment ID: 20001503 Result: Up-regulated in Transcription
  misc_feature: MA Experiment 20001503 PARAMETER Experiment Name: At_Far-red-enriched_P Parameter: Age (day) Value: 7
  misc_feature: MA Experiment 20001503 PARAMETER Experiment Name: At_Far-red-enriched_P Parameter: Light Value: Far-red enriched vs. White
  misc_feature: MA Experiment 20001503 PARAMETER Experiment Name: At_Far-red-enriched_P Parameter: Organism Value: A. thaliana
  misc_feature: MA Experiment 20001503 PARAMETER Experiment Name: At_Far-red-enriched_P Parameter: Plant Line Value: Columbia
  misc_feature: MA Experiment 20001503 PARAMETER Experiment Name: At_Far-red-enriched_P Parameter: Timepoint (day) Value: 3
  misc_feature: MA Experiment 20001503 PARAMETER Experiment Name: At_Far-red-enriched_P Parameter: Tissue Value: Whole Plant
  misc_feature: MA Experiment ID: 20001504 Result: Up-regulated in Transcription
  misc_feature: MA Experiment 20001504 PARAMETER Experiment Name: At_Far-red-enriched_P Parameter: Age (day) Value: 10
  misc_feature: MA Experiment 20001504 PARAMETER Experiment Name: At_Far-red-enriched_P Parameter: Light Value: Far-red enriched vs. White
  misc_feature: MA Experiment 20001504 PARAMETER Experiment Name: At_Far-red-enriched_P Parameter: Organism Value: A. thaliana
  misc_feature: MA Experiment 20001504 PARAMETER Experiment Name: At_Far-red-enriched_P Parameter: Plant Line Value: Columbia
  misc_feature: MA Experiment 20001504 PARAMETER Experiment Name: At_Far-red-enriched_P Parameter: Timepoint (day) Value: 6
  misc_feature: MA Experiment 20001504 PARAMETER Experiment Name: At_Far-red-enriched_P Parameter: Tissue Value: Whole Plant
  misc_feature: MA Experiment ID: 20001554 Result: Down-regulated in Transcription
  misc_feature: MA Experiment 20001554 PARAMETER Experiment Name: At_Drought_Soil_Dry_P Parameter: Age (day) Value: 21
  misc_feature: MA Experiment 20001554 PARAMETER Experiment Name: At_Drought_Soil_Dry_P Parameter: Organism Value: A. thaliana
  misc_feature: MA Experiment 20001554 PARAMETER Experiment Name: At_Drought_Soil_Dry_P Parameter: Plant Line Value: WS
  misc_feature: MA Experiment 20001554 PARAMETER Experiment Name: At_Drought_Soil_Dry_P Parameter: Post Timepoint (hr) Value: None
  misc_feature: MA Experiment 20001554 PARAMETER Experiment Name: At_Drought_Soil_Dry_P Parameter: Post-Treatment Value: None
  misc_feature: MA Experiment 20001554 PARAMETER Experiment Name: At_Drought_Soil_Dry_P Parameter: Timepoint (day) Value: 7
  misc_feature: MA Experiment 20001554 PARAMETER Experiment Name: At_Drought_Soil_Dry_P Parameter: Treatment Value: Drought vs. No Drought
  misc_feature: MA Experiment ID: 20001555 Result: Down-regulated in Transcription
  misc_feature: MA Experiment 20001555 PARAMETER Experiment Name: At_Drought_Soil_Dry_P Parameter: Age (day) Value: 24
  misc_feature: MA Experiment 20001555 PARAMETER Experiment Name: At_Drought_Soil_Dry_P Parameter: Organism Value: A. thaliana
  misc_feature: MA Experiment 20001555 PARAMETER Experiment Name: At_Drought_Soil_Dry_P Parameter: Plant Line Value: WS
  misc_feature: MA Experiment 20001555 PARAMETER Experiment Name: At_Drought_Soil_Dry_P Parameter: Post Timepoint (hr) Value: None
  misc_feature: MA Experiment 20001555 PARAMETER Experiment Name: At_Drought_Soil_Dry_P Parameter: Post-Treatment Value: None
  misc_feature: MA Experiment 20001555 PARAMETER Experiment Name: At_Drought_Soil_Dry_P Parameter: Timepoint (day) Value: 10
  misc_feature: MA Experiment 20001555 PARAMETER Experiment Name: At_Drought_Soil_Dry_P Parameter: Treatment Value: Drought vs. No Drought
  misc_feature: MA Experiment ID: 20001560 Result: Up-regulated in Transcription
  misc_feature: MA Experiment 20001560 PARAMETER Experiment Name: At_Drought_Soil_Dry_P Parameter: Age (day) Value: 28
  misc_feature: MA Experiment 20001560 PARAMETER Experiment Name: At_Drought_Soil_Dry_P Parameter: Organism Value: A. thaliana
  misc_feature: MA Experiment 20001560 PARAMETER Experiment Name: At_Drought_Soil_Dry_P Parameter: Plant Line Value: WS
  misc_feature: MA Experiment 20001560 PARAMETER Experiment Name: At_Drought_Soil_Dry_P Parameter: Post Timepoint (hr) Value: None
  misc_feature: MA Experiment 20001560 PARAMETER Experiment Name: At_Drought_Soil_Dry_P Parameter: Post-Treatment Value: None
  misc_feature: MA Experiment 20001560 PARAMETER Experiment Name: At_Drought_Soil_Dry_P Parameter: Timepoint (day) Value: 14
  misc_feature: MA Experiment 20001560 PARAMETER Experiment Name: At_Drought_Soil_Dry_P Parameter: Treatment Value: Drought vs. No Drought
  misc_feature: MA Experiment ID: 20001761 Result: Up-regulated in Transcription
  misc_feature: MA Experiment 20001761 PARAMETER Experiment Name: At_50mM_NH4NO3_L-to-H_P Parameter: Timepoint (hr) Value: 4
  misc_feature: MA Experiment 20001761 PARAMETER Experiment Name: At_50mM_NH4NO3_L-to-H_P Parameter: Tissue Value: Siliques
  misc_feature: MA Experiment 20001761 PARAMETER Experiment Name: At_50mM_NH4NO3_L-to-H_P Parameter: Treatment Value: 50mM NH4NO3 vs 100mM Mannitol
  misc_feature: MA Experiment ID: 20001770 Result: Up-regulated in Transcription
  misc_feature: MA Experiment 20001770 PARAMETER Experiment Name: At_Far-red-enriched-adult_P Parameter: Age (day) Value: 28
  misc_feature: MA Experiment 20001770 PARAMETER Experiment Name: At_Far-red-enriched-adult_P Parameter: Light Value: Far-red enriched vs. White
  misc_feature: MA Experiment 20001770 PARAMETER Experiment Name: At_Far-red-enriched-adult_P Parameter: Organism Value: A. thaliana
  misc_feature: MA Experiment 20001770 PARAMETER Experiment Name: At_Far-red-enriched-adult_P Parameter: Plant Line Value: Columbia
  misc_feature: MA Experiment 20001770 PARAMETER Experiment Name: At_Far-red-enriched-adult_P Parameter: Timepoint (hr) Value: 8
  misc_feature: MA Experiment 20001770 PARAMETER Experiment Name: At_Far-red-enriched-adult_P Parameter: Tissue Value: Aerial
  misc_feature: MA Experiment ID: 20001771 Result: Up-regulated in Transcription
  misc_feature: MA Experiment 20001771 PARAMETER Experiment Name: At_Far-red-enriched-adult_P Parameter: Age (day) Value: 28
  misc_feature: MA Experiment 20001771 PARAMETER Experiment Name: At_Far-red-enriched-adult_P Parameter: Light Value: Far-red enriched vs. White
  misc_feature: MA Experiment 20001771 PARAMETER Experiment Name: At_Far-red-enriched-adult_P Parameter: Organism Value: A. thaliana
  misc_feature: MA Experiment 20001771 PARAMETER Experiment Name: At_Far-red-enriched-adult_P Parameter: Plant Line Value: Columbia
  misc_feature: MA Experiment 20001771 PARAMETER Experiment Name: At_Far-red-enriched-adult_P Parameter: Timepoint (hr) Value: 16
  misc_feature: MA Experiment 20001771 PARAMETER Experiment Name: At_Far-red-enriched-adult_P Parameter: Tissue Value: Aerial
  misc_feature: MA Experiment ID: 20001910 Result: Down-regulated in Transcription
  misc_feature: MA Experiment 20001910 PARAMETER Experiment Name: At_Drought_Reproduction_P Parameter: Age (day) Value: 37
  misc_feature: MA Experiment 20001910 PARAMETER Experiment Name: At_Drought_Reproduction_P Parameter: Organism Value: A. thaliana
  misc_feature: MA Experiment 20001910 PARAMETER Experiment Name: At_Drought_Reproduction_P Parameter: Plant Line Value: WS
  misc_feature: MA Experiment 20001910 PARAMETER Experiment Name: At_Drought_Reproduction_P Parameter: Timepoint (day) Value: 7
  misc_feature: MA Experiment 20001910 PARAMETER Experiment Name: At_Drought_Reproduction_P Parameter: Tissue Value: Flowers
  misc_feature: MA Experiment 20001910 PARAMETER Experiment Name: At_Drought_Reproduction_P Parameter: Treatment Value: Drought vs. No Drought
atctcacaccaaaacacaaagctctcatcttcttttagtttccaaactcacccccacaactttcatttctatcaaccaaacccaaatgggtccaagttcgagcctcaccaccatcgtggcgactgttcttcttgtgacattgttcggttcggcctacgcaagcaacttcttcgacgagtttgacctcacttggggtgaccacagaggcaaaatcttcaacggaggaaatatgctgtctttgtcgctggaccaggtttccgggtcaggtttcaaatccaaaaaagagtatttgttcggtcggatcgatatgcagctcaaacttgtcgccggaaactcggccggcaccgtcactgcttactacttgtcttcacaaggagcaacacatgacgagatagactttgagtttctaggtaacgagacagggaagccttatgttcttcacaccaatgtctttgctcaagggaaaggagacagagagcaacagttttatctctggttcgacccaaccaagaacttccacacttactccattgtctggagaccccaacacatcatattcttggtggacaatttacccattagagtgttcaacaatgcagagaagctcggcgttcctttcccaaagagtcaacccatgaggatctactctagcctgtggaatgcagacgattgggccacgagaggtggtctagtcaagactgactggtccaaggctcctttcacagcttactacagaggattcaacgctgcggcttgcacagcctcttcaggatgtgaccctaaattcaagagttcttttggtgatggtaaattgcaagtggcaaccgagctcaatgcttatggcaggaggagactcagatgggttcagaaatacttcatgatctataattattgctctgatctcaaaaggttccctcgtggattccctccagaatgcaagaagtccagagtctgatgaacacatattacctcatatttctctgcttgtttgatgcaattcttaaattcctctgttattccattgtacattgtcaagatcaataaagcattcctggtttcaaaat

SEQ ID NO: 22464 - protein, 317 aa, Arabidopsis thaliana
  peptide (1)..(317): Ceres Seq. ID no. 12334653
  misc_feature (56)..(237): Pfam Name: Glycosyl hydrolases family 16 Pfam Description: Glycosyl hydrolases family 16
  misc_feature (32)..(313): Homolog of NCBI NO: 8886865 NR Description: xyloglucan endotransglycosylase XET1 [Asparagus
  misc_feature (35)..(312): Homolog of NCBI NO: 8886867 NR Description: xyloglucan endotransglycosylase XET2 [Asparagus
  misc_feature (29)..(314): Homolog of NCBI NO: 543905 NR Description: Brassinosteroid-regulated protein BRU1 precursor
  misc_feature (37)..(317): Homolog of NCBI NO: 21536689 NR Description: xyloglucan endotransglycosylase, putative
  misc_feature (37)..(317): Homolog of NCBI NO: 18403867 NR Description: xyloglucan endotransglycosylase, putative
  misc_feature (29)..(317): Homolog of NCBI NO: 15236412 NR Description: xyloglucan endotransglycosylase (XTR7)
  misc_feature (29)..(317): Homolog of NCBI NO: 38605153 NR Description: Probable xyloglucan
SHTKTQSSHLLLVSKLTPTTFISINQTQMGPSSSLTTIVATVLLVTLFGSAYASNFFDEFDLTWGDHRGKIFNGGNMLSLSLDQVSGSGFKSKKEYLFGRIDMQLKLVAGNSAGTVTAYYLSSQGATHDEIDFEFLGNETGKPYVLHTNVFAQGKGDREQQFYLWFDPTKNFHTYSIVWRPQHIIFLVDNLPIRVFNNAEKLGVPFPKSQPMRIYSSLWNADDWATRGGLVKTDWSKAPFTAYYRGFNAAACTASSGCDPKFKSSFGDGKLQVATELNAYGRRRLRWVQKYFMIYNYCSDLKRFPRGFPPECKKSRV

SEQ ID NO: 22465 - protein, 289 aa, Arabidopsis thaliana
  peptide (1)..(289): Ceres Seq. ID no. 12334654
  misc_feature (28)..(209): Pfam Name: Glycosyl hydrolases family 16 Pfam Description: Glycosyl hydrolases family 16
  misc_feature (4)..(285): Homolog of NCBI NO: 8886865 NR Description: xyloglucan endotransglycosylase XET1 [Asparagus
  misc_feature (7)..(284): Homolog of NCBI NO: 8886867 NR Description: xyloglucan endotransglycosylase XET2 [Asparagus
  misc_feature (1)..(286): Homolog of NCBI NO: 543905 NR Description: Brassinosteroid-regulated protein BRU1 precursor
  misc_feature (9)..(289): Homolog of NCBI NO: 21536689 NR Description: xyloglucan endotransglycosylase, putative
  misc_feature (9)..(289): Homolog of NCBI NO: 18403867 NR Description: xyloglucan endotransglycosylase, putative
  misc_feature (1)..(289): Homolog of NCBI NO: 15236412 NR Description: xyloglucan endotransglycosylase (XTR7)
  misc_feature (1)..(289): Homolog of NCBI NO: 38605153 NR Description: Probable xyloglucan
MGPSSSLTTIVATVLLVTLFGSAYASNFFDEFDLTWGDHRGKIFNGGNMLSLSLDQVSGSGFKSKKEYLFGRIDMQLKLVAGNSAGTVTAYYLSSQGATHDEIDFEFLGNETGKPYVLHTNVFAQGKGDREQQFYLWFDPTKNFHTYSIVWRPQHIIFLVDNLPIRVFNNAEKLGVPFPKSQPMRIYSSLWNADDWATRGGLVKTDWSKAPFTAYYRGFNAAACTASSGCDPKFKSSFGDGKLQVATELNAYGRRRLRWVQKYFMIYNYCSDLKRFPRGFPPECKKSRV

SEQ ID NO: 22466 - protein, 241 aa, Arabidopsis thaliana
  peptide (1)..(241): Ceres Seq. ID no. 12334655
  misc_feature (1)..(161): Pfam Name: Glycosyl hydrolases family 16 Pfam Description: Glycosyl hydrolases family 16
  misc_feature (1)..(237): Homolog of NCBI NO: 8886865 NR Description: xyloglucan endotransglycosylase XET1 [Asparagus
  misc_feature (1)..(236): Homolog of NCBI NO: 8886867 NR Description: xyloglucan endotransglycosylase XET2 [Asparagus
  misc_feature (1)..(238): Homolog of NCBI NO: 543905 NR Description: Brassinosteroid-regulated protein BRU1 precursor
  misc_feature (1)..(241): Homolog of NCBI NO: 21536689 NR Description: xyloglucan endotransglycosylase, putative
  misc_feature (1)..(241): Homolog of NCBI NO: 18403867 NR Description: xyloglucan endotransglycosylase, putative
  misc_feature (1)..(241): Homolog of NCBI NO: 15236412 NR Description: xyloglucan endotransglycosylase (XTR7)
  misc_feature (1)..(241): Homolog of NCBI NO: 38605153 NR Description: Probable xyloglucan
MLSLSLDQVSGSGFKSKKEYLFGRIDMQLKLVAGNSAGTVTAYYLSSQGATHDEIDFEFLGNETGKPYVLHTNVFAQGKGDREQQFYLWFDPTKNFHTYSIVWRPQHIIFLVDNLPIRVFNNAEKLGVPFPKSQPMRIYSSLWNADDWATRGGLVKTDWSKAPFTAYYRGFNAAACTASSGCDPKFKSSFGDGKLQVATELNAYGRRRLRWVQKYFMIYNYCSDLKRFPRGFPPECKKSRV

SEQ ID NO: 22467 - DNA, 1242 bp, Arabidopsis thaliana
  misc_feature (1)..(1242): Ceres Seq. ID no. 5678705
  misc_feature: MA Experiment ID: 108434 Result: Up-regulated in Transcription
  misc_feature: MA Experiment 108434 PARAMETER Experiment Name: At_Root_Tips_cDNA_P Parameter: Tissue Value: Root Tips
  misc_feature: MA Experiment ID: 20000179 Result: Up-regulated in Transcription
  misc_feature: MA Experiment 20000179 PARAMETER Experiment Name: At_Germinating_Seeds_P Parameter: Age (hr) Value: 6 vs. 0
  misc_feature: MA Experiment 20000179 PARAMETER Experiment Name: At_Germinating_Seeds_P Parameter: Tissue Value: Germinating Seeds
  misc_feature: MA Experiment ID: 20000180 Result: Up-regulated in Transcription
  misc_feature: MA Experiment 20000180 PARAMETER Experiment Name: At_Germinating_Seeds_P Parameter: Age (hr) Value: 24 vs. 0
  misc_feature: MA Experiment 20000180 PARAMETER Experiment Name: At_Germinating_Seeds_P Parameter: Tissue Value: Germinating Seeds
  misc_feature: Pfam Name: Mito_carr Pfam Description: Mitochondrial carrier protein
gactacgaaatagaatcaagttgtgttctctgtgatggacattgtgttagtggtaatcaaatccggtgaaaatggagcggagccgagtgaccagagaagcaccgaccggaaccaggatcctgcttgcttcactctctgcgatggttgcagagtcagttacgtttccgattgatctcacaaagactagaatgcagctccatggttcgggatccgcttctggtgcgcatcggattggcgctttcggagtcgtatcggagattgcgagaaaggaaggagtgattggtctctacaaaggtctatctccggcgattatcagacacctgttctacacgcctatcagaatcattggatacgagaatttgaaaggactcatcgtcagatctgaaactaacaatagcgagtctcttcctctcgccacaaaggctctcgtcggaggattttctggtgttatagctcagaaatgcaggtagtggctagtccagctgatttggtcaaagtgagaatgcaagcagatggtagattggtgagccaaggcctgaaaccgaggtactcgggaccaatcgaggcttttaccaaaatcctacaatcagaaggagtaaaagggttatggaaaggtgttcttccaaacatccagagagcatttctagtgaatatgggagaactagcttgctatgatcacgccaaacactttgtcatcgataagaagattgctgaggataacatttttgcgcacactcttgcttctataatgtcgggtcttgcttcgacaagtttgagttgtccagctgatgtggtgaagacgaggatgatgaaccagggtgaaaatgctgtgtacagaaattcttacgactgtttggtgaagacggttaagtttgaaggaataagagctttgtggaaaggtttcttcccgacatgggcaaggcttggaccgtggcagttcgtgttttgggtctcctatgagaagtttagactgctggcaggaatctcttccttctagacctgagaaactggaaaagcaaatttgagatttgtgttctttagttcttacttgttagttgttacacattttgtaagaaccttgagaagtagcatcagtttctgattaacgcgagaagagttatataaatttgggcccaaaagtgtaggcccatagatttatcattttttttttgttgattaaattagattggacatcctaagcaaaaaaatattttaaaaagtaagagattaataaaatattcc

SEQ ID NO: 22468 - protein, 164 aa, Arabidopsis thaliana
  peptide (1)..(164): Ceres Seq. ID no. 5678706
  misc_feature: Pfam Name: Mito_carr Pfam Description: Mitochondrial carrier protein
  misc_feature (1)..(158): Homolog of NCBI NO: 24637836 NR Description: brain mitochondrial carrier protein
  misc_feature (1)..(164): Homolog of NCBI NO: 7505416 NR Description: hypothetical protein K07B1.3 - Caenorhabditis
  misc_feature (1)..(164): Homolog of NCBI NO: 17562272 NR Description: Uncoupling protein [Caenorhabditis elegans]
  misc_feature (1)..(164): Homolog of NCBI NO: 31231996 NR Description: ENSANGP00000020981 [Anopheles gambiae]
  misc_feature (1)..(164): Homolog of NCBI NO: 18860079 NR Description: CG6492-PA [Drosophila melanogaster]
  misc_feature (1)..(164): Homolog of NCBI NO: 21312006 NR Description: RIKEN cDNA 3632410G24 [Mus musculus]
  misc_feature (1)..(164): Homolog of NCBI NO: 16758260 NR Description: uncoupling protein UCP-4 [Rattus norvegicus]
  misc_feature (1)..(164): Homolog of NCBI NO: 31418769 NR Description: Unknown (protein for MGC:63899) [Danio rerio]
  misc_feature (1)..(164): Homolog of NCBI NO: 38344836 NR Description: OSJNBa0064H22.17 [Oryza sativa (japonica
  misc_feature (1)..(164): Homolog of NCBI NO: 15223098 NR Description: mitochondrial carrier protein family
MQADGRLVSQGLKPRYSGPIEAFTKILQSEGVKGLWKGVLPNIQRAFLVNMGELACYDHAKHFVIDKKIAEDNIFAHTLASIMSGLASTSLSCPADVVKTRMMNQGENAVYRNSYDCLVKTVKFEGIRALWKGFFPTWARLGPWQFVFWVSYEKFRLLAGISSF

SEQ ID NO: 22469 - protein, 132 aa, Arabidopsis thaliana
  peptide (1)..(132): Ceres Seq. ID no. 5678707
  misc_feature: Pfam Name: Mito_carr Pfam Description: Mitochondrial carrier protein
  misc_feature (18)..(129): Homolog of NCBI NO: 7505416 NR Description: hypothetical protein K07B1.3 - Caenorhabditis
  misc_feature (14)..(129): Homolog of NCBI NO: 17562272 NR Description: Uncoupling protein [Caenorhabditis elegans]
  misc_feature (17)..(129): Homolog of NCBI NO: 31231996 NR Description: ENSANGP00000020981 [Anopheles gambiae]
  misc_feature (17)..(129): Homolog of NCBI NO: 18860079 NR Description: CG6492-PA [Drosophila melanogaster]
  misc_feature (6)..(129): Homolog of NCBI NO: 21312006 NR Description: RIKEN cDNA 3632410G24 [Mus musculus]
  misc_feature (6)..(129): Homolog of NCBI NO: 16758260 NR Description: uncoupling protein UCP-4 [Rattus norvegicus]
  misc_feature (11)..(129): Homolog of NCBI NO: 31418769 NR Description: Unknown (protein for MGC:63899) [Danio rerio]
  misc_feature (1)..(132): Homolog of NCBI NO: 26450423 NR Description: putative mitochondrial uncoupling protein
  misc_feature (12)..(129): Homolog of NCBI NO: 38344836 NR Description: OSJNBa0064H22.17 [Oryza sativa (japonica
  misc_feature (1)..(129): Homolog of NCBI NO: 15223098 NR Description: mitochondrial carrier protein family
MERSRVTREAPTGTRILLASLSAMVAESVTFPIDLTKTRMQLHGSGSASGAHRIGAFGVVSEIARKEGVIGLYKGLSPAIIRHLFYTPIRIIGYENLKGLIVRSETNNSESLPLATKALVGGFSGVIAQKCR

SEQ ID NO: 22470 - protein, 178 aa, Arabidopsis thaliana
  peptide (1)..(178): Ceres Seq. ID no. 5678708
  misc_feature: Pfam Name: Mito_carr Pfam Description: Mitochondrial carrier protein
  misc_feature (4)..(172): Homolog of NCBI NO: 24637836 NR Description: brain mitochondrial carrier protein
  misc_feature (2)..(178): Homolog of NCBI NO: 7505416 NR Description: hypothetical protein K07B1.3 - Caenorhabditis
  misc_feature (2)..(178): Homolog of NCBI NO: 17562272 NR Description: Uncoupling protein [Caenorhabditis elegans]
  misc_feature (2)..(178): Homolog of NCBI NO: 31231996 NR Description: ENSANGP00000020981 [Anopheles gambiae]
  misc_feature (2)..(178): Homolog of NCBI NO: 18860079 NR Description: CG6492-PA [Drosophila melanogaster]
  misc_feature (2)..(178): Homolog of NCBI NO: 21312006 NR Description: RIKEN cDNA 3632410G24 [Mus musculus]
  misc_feature (2)..(178): Homolog of NCBI NO: 16758260 NR Description: uncoupling protein UCP-4 [Rattus norvegicus]
  misc_feature (2)..(178): Homolog of NCBI NO: 31418769 NR Description: Unknown (protein for MGC:63899) [Danio rerio]
  misc_feature (2)..(178): Homolog of NCBI NO: 38344836 NR Description: OSJNBa0064H22.17 [Oryza sativa (japonica
  misc_feature (2)..(178): Homolog of NCBI NO: 15223098 NR Description: mitochondrial carrier protein family
MQVVASPADLVKVRMQADGRLVSQGLKPRYSGPIEAFTKILQSEGVKGLWKGVLPNIQRAFLVNMGELACYDHAKHFVIDKKIAEDNIFAHTLASIMSGLASTSLSCPADVVKTRMMNQGENAVYRNSYDCLVKTVKFEGIRALWKGFFPTWARLGPWQFVFWVSYEKFRLLAGISSF

SEQ ID NO: 22471 - DNA, 1792 bp, Arabidopsis thaliana
  misc_feature (1)..(1792): Ceres Seq. ID no. 13490532
  misc_feature: MA Experiment ID: 20000169 Result: Up-regulated in Transcription
  misc_feature: MA Experiment 20000169 PARAMETER Experiment Name: At_100uM_ABA_P Parameter: Age (day) Value: 14
  misc_feature: MA Experiment 20000169 PARAMETER Experiment Name: At_100uM_ABA_P Parameter: Organism Value: A. thaliana
  misc_feature: MA Experiment 20000169 PARAMETER Experiment Name: At_100uM_ABA_P Parameter: Plant Line Value: WS
  misc_feature: MA Experiment 20000169 PARAMETER Experiment Name: At_100uM_ABA_P Parameter: Timepoint (hr) Value: 6
  misc_feature: MA Experiment 20000169 PARAMETER Experiment Name: At_100uM_ABA_P Parameter: Tissue Value: Aerial
  misc_feature: MA Experiment 20000169 PARAMETER Experiment Name: At_100uM_ABA_P Parameter: Treatment Value: 100uM ABA vs. No Treatment
  misc_feature: MA Experiment ID: 20000173 Result: Down-regulated in Transcription
  misc_feature: MA Experiment 20000173 PARAMETER Experiment Name: At_42deg_Heat_P Parameter: Age (day) Value: 14
  misc_feature: MA Experiment 20000173 PARAMETER Experiment Name: At_42deg_Heat_P Parameter: Organism Value: A. thaliana
  misc_feature: MA Experiment 20000173 PARAMETER Experiment Name: At_42deg_Heat_P Parameter: Plant Line Value: WS
  misc_feature: MA Experiment 20000173 PARAMETER Experiment Name: At_42deg_Heat_P Parameter: Temperature (deg C) Value: 42 vs. 22
  misc_feature: MA Experiment 20000173 PARAMETER Experiment Name: At_42deg_Heat_P Parameter: Timepoint (hr) Value: 6
  misc_feature: MA Experiment 20000173 PARAMETER Experiment Name: At_42deg_Heat_P Parameter: Tissue Value: Aerial
  misc_feature: MA Experiment ID: 20000179 Result: Up-regulated in Transcription
  misc_feature: MA Experiment 20000179 PARAMETER Experiment Name: At_Germinating_Seeds_P Parameter: Age (hr) Value: 6 vs. 0
  misc_feature: MA Experiment 20000179 PARAMETER Experiment Name: At_Germinating_Seeds_P Parameter: Tissue Value: Germinating Seeds
  misc_feature: MA Experiment ID: 20000180 Result: Up-regulated in Transcription
  misc_feature: MA Experiment 20000180 PARAMETER Experiment Name: At_Germinating_Seeds_P Parameter: Age (hr) Value: 24 vs. 0
  misc_feature: MA Experiment 20000180 PARAMETER Experiment Name: At_Germinating_Seeds_P Parameter: Tissue Value: Germinating Seeds
  misc_feature: MA Experiment ID: 20000184 Result: Up-regulated in Transcription
  misc_feature: MA Experiment 20000184 PARAMETER Experiment Name: At_Shoots__P Parameter: Age (day) Value: 7
  misc_feature: MA Experiment 20000184 PARAMETER Experiment Name: At_Shoots__P Parameter: Tissue Value: Shoots vs. Whole Plant
  misc_feature: MA Experiment ID: 20000185 Result: Up-regulated in Transcription
  misc_feature: MA Experiment 20000185 PARAMETER Experiment Name: At_Roots__P Parameter: Age (day) Value: 7 vs. 21
  misc_feature: MA Experiment 20000185 PARAMETER Experiment Name: At_Roots__P Parameter: Organism Value: A. thaliana
  misc_feature: MA Experiment 20000185 PARAMETER Experiment Name: At_Roots__P Parameter: Tissue Value: Roots vs. Whole Plant
  misc_feature: MA Experiment ID: 20000235 Result: Down-regulated in Transcription
  misc_feature: MA Experiment 20000235 PARAMETER Experiment Name: At_Siliques_P Parameter: Age (day) Value: 21
  misc_feature: MA Experiment 20000235 PARAMETER Experiment Name: At_Siliques_P Parameter: Organism Value: A. thaliana
  misc_feature: MA Experiment 20000235 PARAMETER Experiment Name: At_Siliques_P Parameter: Plant Line Value: WS
  misc_feature: MA Experiment 20000235 PARAMETER Experiment Name: At_Siliques_P Parameter: Tissue Value: 5-10mm Siliques vs. Whole Plant
  misc_feature: MA Experiment ID: 20000264 Result: Down-regulated in Transcription
  misc_feature: MA Experiment 20000264 PARAMETER Experiment Name: At_Open_Flower_P Parameter: Age (day) Value: 21
  misc_feature: MA Experiment 20000264 PARAMETER Experiment Name: At_Open_Flower_P Parameter: Plant Line Value: WS
  misc_feature: MA Experiment 20000264 PARAMETER Experiment Name: At_Open_Flower_P Parameter: Tissue Value: Open Flower vs. Whole Plant
  misc_feature: MA Experiment ID: 20000286 Result: Down-regulated in Transcription
  misc_feature: MA Experiment 20000286 PARAMETER Experiment Name: At_Open_Flower_P Parameter: Age (day) Value: 21
  misc_feature: MA Experiment 20000286 PARAMETER Experiment Name: At_Open_Flower_P Parameter: Plant Line Value: WS
  misc_feature: MA Experiment 20000286 PARAMETER Experiment Name: At_Open_Flower_P Parameter: Tissue Value: Half Open vs. Whole Plant
  misc_feature: MA Experiment ID: 20000438 Result: Up-regulated in Transcription
  misc_feature: MA Experiment 20000438 PARAMETER Experiment Name: At_Shoots__P Parameter: Age (day) Value: 14
  misc_feature: MA Experiment 20000438 PARAMETER Experiment Name: At_Shoots__P Parameter: Tissue Value: Shoots vs. Whole Plant
  misc_feature: MA Experiment ID: 20000439 Result: Up-regulated in Transcription
  misc_feature: MA Experiment 20000439 PARAMETER Experiment Name: At_Roots__P Parameter: Age (day) Value: 14 vs. 21
  misc_feature: MA Experiment 20000439 PARAMETER Experiment Name: At_Roots__P Parameter: Organism Value: A. thaliana
  misc_feature: MA Experiment 20000439 PARAMETER Experiment Name: At_Roots__P Parameter: Tissue Value: Roots vs. Whole Plant
  misc_feature: MA Experiment ID: 20000445 Result: Down-regulated in Transcription
  misc_feature: MA Experiment 20000445 PARAMETER Experiment Name: At_100uM_NAA__P Parameter: Age (day) Value: 14
  misc_feature: MA Experiment 20000445 PARAMETER Experiment Name: At_100uM_NAA__P Parameter: Organism Value: A. thaliana
  misc_feature: MA Experiment 20000445 PARAMETER Experiment Name: At_100uM_NAA__P Parameter: Plant Line Value: WS
  misc_feature: MA Experiment 20000445 PARAMETER Experiment Name: At_100uM_NAA__P Parameter: Timepoint (hr) Value: 6
  misc_feature: MA Experiment 20000445 PARAMETER Experiment Name: At_100uM_NAA__P Parameter: Tissue Value: Aerial
  misc_feature: MA Experiment 20000445 PARAMETER Experiment Name: At_100uM_NAA__P Parameter: Treatment Value: 100uM NAA vs. No Treatment
  misc_feature: MA Experiment ID: 20000452 Result: Up-regulated in Transcription
  misc_feature: MA Experiment 20000452 PARAMETER Experiment Name: At_CS6879_Shoots-Roots_P Parameter: Age (day) Value: 14
  misc_feature: MA Experiment 20000452 PARAMETER Experiment Name: At_CS6879_Shoots-Roots_P Parameter: Organism Value: A. thaliana
  misc_feature: MA Experiment 20000452 PARAMETER Experiment Name: At_CS6879_Shoots-Roots_P Parameter: Plant Line Value: CS6879 vs. WS
  misc_feature: MA Experiment 20000452 PARAMETER Experiment Name: At_CS6879_Shoots-Roots_P Parameter: Tissue Value: Shoots
  misc_feature: MA Experiment ID: 20000453 Result: Up-regulated in Transcription
  misc_feature: MA Experiment 20000453 PARAMETER Experiment Name: At_100uM_ABA_P Parameter: Age (day) Value: 15
  misc_feature: MA Experiment 20000453 PARAMETER Experiment Name: At_100uM_ABA_P Parameter: Organism Value: A. thaliana
  misc_feature: MA Experiment 20000453 PARAMETER Experiment Name: At_100uM_ABA_P Parameter: Plant Line Value: WS
  misc_feature: MA Experiment 20000453 PARAMETER Experiment Name: At_100uM_ABA_P Parameter: Timepoint (hr) Value: 24
  misc_feature: MA Experiment 20000453 PARAMETER Experiment Name: At_100uM_ABA_P Parameter: Tissue Value: Aerial
  misc_feature: MA Experiment 20000453 PARAMETER Experiment Name: At_100uM_ABA_P Parameter: Treatment Value: 100uM ABA vs. No Treatment
  misc_feature: MA Experiment ID: 20000455 Result: Up-regulated in Transcription
  misc_feature: MA Experiment 20000455 PARAMETER Experiment Name: At_100uM_ABA_P Parameter: Age (day) Value: 16
  misc_feature: MA Experiment 20000455 PARAMETER Experiment Name: At_100uM_ABA_P Parameter: Organism Value: A. thaliana
  misc_feature: MA Experiment 20000455 PARAMETER Experiment Name: At_100uM_ABA_P Parameter: Plant Line Value: WS
  misc_feature: MA Experiment 20000455 PARAMETER Experiment Name: At_100uM_ABA_P Parameter: Timepoint (hr) Value: 48
  misc_feature: MA Experiment 20000455 PARAMETER Experiment Name: At_100uM_ABA_P Parameter: Tissue Value: Aerial
  misc_feature: MA Experiment 20000455 PARAMETER Experiment Name: At_100uM_ABA_P Parameter: Treatment Value: 100uM ABA vs. No Treatment
  misc_feature: MA Experiment ID: 20000495 Result: Up-regulated in Transcription
  misc_feature: MA Experiment 20000495 PARAMETER Experiment Name: At_Guard_Cells_P Parameter: Harvest Date Value: 8/2/2002
  misc_feature: MA Experiment 20000495 PARAMETER Experiment Name: At_Guard_Cells_P Parameter: Organism Value: A. thaliana
  misc_feature: MA Experiment 20000495 PARAMETER Experiment Name: At_Guard_Cells_P Parameter: Tissue Value: Guard Cells vs. Leaves
  misc_feature: MA Experiment ID: 20000794 Result: Down-regulated in Transcription
  misc_feature: MA Experiment 20000794 PARAMETER Experiment Name: At_Petals_P Parameter: Age (day) Value: 23-25 days
  misc_feature: MA Experiment 20000794 PARAMETER Experiment Name: At_Petals_P Parameter: Plant Line Value: WS
  misc_feature: MA Experiment 20000794 PARAMETER Experiment Name: At_Petals_P Parameter: Tissue Value: Petals vs. Whole plant
  misc_feature: MA Experiment ID: 20001450 Result: Down-regulated in Transcription
  misc_feature: MA Experiment 20001450 PARAMETER Experiment Name: At_Far-red-induction_P Parameter: Age (day) Value: 7
  misc_feature: MA Experiment 20001450 PARAMETER Experiment Name: At_Far-red-induction_P Parameter: Light Value: Far-red vs. White
  misc_feature: MA Experiment 20001450 PARAMETER Experiment Name: At_Far-red-induction_P Parameter: Organism Value: A. thaliana
  misc_feature: MA Experiment 20001450 PARAMETER Experiment Name: At_Far-red-induction_P Parameter: Plant Line Value: Columbia
  misc_feature: MA Experiment 20001450 PARAMETER Experiment Name: At_Far-red-induction_P Parameter: Timepoint (hr) Value: 8
  misc_feature: MA Experiment 20001450 PARAMETER Experiment Name: At_Far-red-induction_P Parameter: Tissue Value: Whole Plant
  misc_feature: MA Experiment ID: 20001451 Result: Down-regulated in Transcription
  misc_feature: MA Experiment 20001451 PARAMETER Experiment Name: At_Far-red-induction_P Parameter: Age (day) Value: 7
  misc_feature: MA Experiment 20001451 PARAMETER Experiment Name: At_Far-red-induction_P Parameter: Light Value: Far-red vs. White
  misc_feature: MA Experiment 20001451 PARAMETER Experiment Name: At_Far-red-induction_P Parameter: Organism Value: A. thaliana
  misc_feature: MA Experiment 20001451 PARAMETER Experiment Name: At_Far-red-induction_P Parameter: Plant Line Value: Columbia
  misc_feature: MA Experiment 20001451 PARAMETER Experiment Name: At_Far-red-induction_P Parameter: Timepoint (hr) Value: 24
  misc_feature: MA Experiment 20001451 PARAMETER Experiment Name: At_Far-red-induction_P Parameter: Tissue Value: Whole Plant
  misc_feature: MA Experiment ID: 20001558 Result: Down-regulated in Transcription
  misc_feature: MA Experiment 20001558 PARAMETER Experiment Name: At_Drought_Soil_Dry_P Parameter: Age (day) Value: 27
  misc_feature: MA Experiment 20001558 PARAMETER Experiment Name: At_Drought_Soil_Dry_P Parameter: Organism Value: A. thaliana
  misc_feature: MA Experiment 20001558 PARAMETER Experiment Name: At_Drought_Soil_Dry_P Parameter: Plant Line Value: WS
  misc_feature: MA Experiment 20001558 PARAMETER Experiment Name: At_Drought_Soil_Dry_P Parameter: Post Timepoint (hr) Value: 6
  misc_feature: MA Experiment 20001558 PARAMETER Experiment Name: At_Drought_Soil_Dry_P Parameter: Post-Treatment Value: Re-Water vs. No Drought
  misc_feature: MA Experiment 20001558 PARAMETER Experiment Name: At_Drought_Soil_Dry_P Parameter: Timepoint (day) Value: 13
  misc_feature: MA Experiment 20001558 PARAMETER Experiment Name: At_Drought_Soil_Dry_P Parameter: Treatment Value: Drought vs. No Drought
  misc_feature: MA Experiment ID: 20001768 Result: Down-regulated in Transcription
  misc_feature: MA Experiment 20001768 PARAMETER Experiment Name: At_Far-red-enriched-adult_P Parameter: Age (day) Value: 28
  misc_feature: MA Experiment 20001768 PARAMETER Experiment Name: At_Far-red-enriched-adult_P Parameter: Light Value: Far-red enriched vs. White
  misc_feature: MA Experiment 20001768 PARAMETER Experiment Name: At_Far-red-enriched-adult_P Parameter: Organism Value: A. thaliana
  misc_feature: MA Experiment 20001768 PARAMETER Experiment Name: At_Far-red-enriched-adult_P Parameter: Plant Line Value: Columbia
  misc_feature: MA Experiment 20001768 PARAMETER Experiment Name: At_Far-red-enriched-adult_P Parameter: Timepoint (hr) Value: 1
  misc_feature: MA Experiment 20001768 PARAMETER Experiment Name: At_Far-red-enriched-adult_P Parameter: Tissue Value: Aerial
accatcctaaacattttttcttgaataaaatcagaattacaaacaaaaatggttttgcaaaagcttcctctcattgggctgcttttgctcctgaccatcgtcgcctctccagcaaatgcagatggacctgtttgcccgccgtcgaacaaactaagccgggcaagtttccctgaaggttttttatttggcacggctactgcggcataccaggtcgaaggtgcgattaatgaaacttgtcgtggaccagccttatgggacatctactgtagaagatatccagagaggtgcaataacgataacggcgatgtggccgttgatttcttccatcgttataaggaagatatccaactaatgaagaatctaaacacagacgcctttagaatgtctatcgcatggccaagaatatttcctcatgggagaaaggagaaaggagtgagtcaagctggtgtgcaattctaccacgacctcatcgacgagctcataaaaaatggtataactccattcgttactgtttttcactgggacactccacaagatttagaagatgaatatggcggctttttaagcgaaaggattgtgaaggatttccgagagtatgcagattttgttttccaagaatacggtggaaaagtgaaacattggatcactttcaatgagccatgggttttctcgcacgctggctatgacgtaggcaaaaaggcacctggtcgttgctcttcttacgtcaatgctaaatgccaagacggacgatcaggatacgaggcttaccttgtcactcacaatctccttatctctcacgcagaagcagttgaagcttaccggaaatgcgaaaagtgtaaaggtgggaagatcggaattgcacatagtcctgcttggttcgaagcacatgaccttgctgattcacaagacggtgcgtccatcgaccgtgcacttgactttattttgggatggcatctagacacaactacatttggagattatccacagatcatgaaagacattgttggacatagattgcctaaatttacaactgagcagaaagcaaaactgaaagcttctaccgatttcgttgggctcaactactatacttcagtgttttcaaaccatttggagaaacctgatccttcaaaaccaagatggatgcaagattctcttattacatgggagtctaagaatgcgcaaaattacgccattggtagcaagcctttgaccgctgcattgaacgtttactcgagaggttttagaagtctgttgaagtacattaaggacaaatacgcaaatccggaaattatgatcatggaaaacggatatggagaagaactaggggcctcagattctgttgctgttggtaccgctgatcataacaggaaatattatcttcagaggcatcttttgagtatgcaagaagctgtttgcatcgacaaagtgaatgttacaggatactttgtatggtcattgttggataacttcgagtggcaagatggttacaaaaacagatttggactctactacgttgatttcaaaaataacctcacacgttacgagaaagaatccggcaagtattacaaggatttcctcagtcaaggtgttcgtccatccgcgctcaagaaggatgagctttaagctatttctgtttcaatgtgtttttcctatgttttactttgtgagtgaccaagattcatgaggtcttggttctaataaaaagagtttatttttcttctcatttttcattgtctacatgatttgccagatctacaaggctctggttataataaaatgatcctttgtgcct

SEQ ID NO: 22472 - protein, 524 aa, Arabidopsis thaliana
  peptide (1)..(524): Ceres Seq. ID no. 13490533
  misc_feature (4)..(522): Homolog of NCBI NO: 12043529 NR Description: beta-glucosidase 1 [Arabidopsis thaliana]
  misc_feature (89)..(524): Homolog of NCBI NO: 1732572 NR Description: beta-glucosidase [Brassica nigra]
  misc_feature (1)..(524): Homolog of NCBI NO: 15241841 NR Description: glycosyl hydrolase family 1 [Arabidopsis thaliana]
  misc_feature (1)..(524): Homolog of NCBI NO: 30697327 NR Description: glycosyl hydrolase family 1, beta-glucosidase
  misc_feature (1)..(524): Homolog of NCBI NO: 2286069 NR Description: beta-glucosidase [Arabidopsis thaliana]
  misc_feature (1)..(524): Homolog of NCBI NO: 15219605 NR Description: glycosyl hydrolase family 1, beta-glucosidase
  misc_feature (1)..(524): Homolog of NCBI NO: 15219623 NR Description: glycosyl hydrolase family 1 [Arabidopsis
  misc_feature (1)..(524): Homolog of NCBI NO: 1732570 NR Description: beta-glucosidase [Arabidopsis thaliana]
  misc_feature (1)..(524): Homolog of NCBI NO: 1363489 NR Description: thioglucosidase (EC 3.2.1.147) 3D precursor -
  misc_feature (1)..(524): Homolog of NCBI NO: 15232626 NR Description: glycosyl hydrolase family 1 [Arabidopsis
  misc_feature (4)..(522): Homolog of NCBI NO: 12043529 NR Description: beta-glucosidase 1 [Arabidopsis thaliana]
  misc_feature (89)..(524): Homolog of NCBI NO: 1732572 NR Description: beta-glucosidase [Brassica nigra]
  misc_feature (1)..(524): Homolog of NCBI NO: 15241841 NR Description: glycosyl hydrolase family 1 [Arabidopsis thaliana]
  misc_feature (1)..(524): Homolog of NCBI NO: 30697327 NR Description: glycosyl hydrolase family 1, beta-glucosidase
  misc_feature (1)..(524): Homolog of NCBI NO: 2286069 NR Description: beta-glucosidase [Arabidopsis thaliana]
  misc_feature (1)..(524): Homolog of NCBI NO: 15219605 NR Description: glycosyl hydrolase family 1, beta-glucosidase
  misc_feature (1)..(524): Homolog of NCBI NO: 15219623 NR Description: glycosyl hydrolase family 1 [Arabidopsis
  misc_feature (1)..(524): Homolog of NCBI NO: 1732570 NR Description: beta-glucosidase [Arabidopsis thaliana]
  misc_feature (1)..(524): Homolog of NCBI NO: 1363489 NR Description: thioglucosidase (EC 3.2.1.147) 3D precursor -
  misc_feature (1)..(524): Homolog of NCBI NO: 15232626 NR Description: glycosyl hydrolase family 1 [Arabidopsis
MVLQKLPLIGLLLLLTIVASPANADGPVCPPSNKLSRASFPEGFLFGTATAAYQVEGAINETCRGPALWDIYCRRYPERCNNDNGDVAVDFFHRYKEDIQLMKNLNTDAFRMSIAWPRIFPHGRKEKGVSQAGVQFYHDLIDELIKNGITPFVTVFHWDTPQDLEDEYGGFLSERIVKDFREYADFVFQEYGGKVKHWITFNEPWVFSHAGYDVGKKAPGRCSSYVNAKCQDGRSGYEAYLVTHNLLISHAEAVEAYRKCEKCKGGKIGIAHSPAWFEAHDLADSQDGASIDRALDFILGWHLDTTTFGDYPQIMKDIVGHRLPKFTTEQKAKLKASTDFVGLNYYTSVFSNHLEKPDPSKPRWMQDSLITWESKNAQNYAIGSKPLTAALNVYSRGFRSLLKYIKDKYANPEIMIMENGYGEELGASDSVAVGTADHNRKYYLQRHLLSMQEAVCIDKVNVTGYFVWSLLDNFEWQDGYKNRFGLYYVDFKNNLTRYEKESGKYYKDFLSQGVRPSALKKDEL

SEQ ID NO: 22473 - protein, 423 aa, Arabidopsis thaliana
  peptide (1)..(423): Ceres Seq. ID no. 13490534
  misc_feature (1)..(421): Homolog of NCBI NO: 12043529 NR Description: beta-glucosidase 1 [Arabidopsis thaliana]
  misc_feature (1)..(423): Homolog of NCBI NO: 1732572 NR Description: beta-glucosidase [Brassica nigra]
  misc_feature (1)..(423): Homolog of NCBI NO: 15241841 NR Description: glycosyl hydrolase family 1 [Arabidopsis thaliana]
  misc_feature (1)..(423): Homolog of NCBI NO: 30697327 NR Description: glycosyl hydrolase family 1, beta-glucosidase
  misc_feature (1)..(423): Homolog of NCBI NO: 2286069 NR Description: beta-glucosidase [Arabidopsis thaliana]
  misc_feature (1)..(423): Homolog of NCBI NO: 15219605 NR Description: glycosyl hydrolase family 1, beta-glucosidase
  misc_feature (1)..(423): Homolog of NCBI NO: 15219623 NR Description: glycosyl hydrolase family 1 [Arabidopsis
  misc_feature (1)..(423): Homolog of NCBI NO: 1732570 NR Description: beta-glucosidase [Arabidopsis thaliana]
  misc_feature (1)..(423): Homolog of NCBI NO: 1363489 NR Description: thioglucosidase (EC 3.2.1.147) 3D precursor -
  misc_feature (1)..(423): Homolog of NCBI NO: 15232626 NR Description: glycosyl hydrolase family 1 [Arabidopsis
  misc_feature (1)..(421): Homolog of NCBI NO: 12043529 NR Description: beta-glucosidase 1 [Arabidopsis thaliana]
  misc_feature (1)..(423): Homolog of NCBI NO: 1732572 NR Description: beta-glucosidase [Brassica nigra]
  misc_feature (1)..(423): Homolog of NCBI NO: 15241841 NR Description: glycosyl hydrolase family 1 [Arabidopsis thaliana]
  misc_feature (1)..(423): Homolog of NCBI NO: 30697327 NR Description: glycosyl hydrolase family 1, beta-glucosidase
  misc_feature (1)..(423): Homolog of NCBI NO: 2286069 NR Description: beta-glucosidase [Arabidopsis thaliana]
  misc_feature (1)..(423): Homolog of NCBI NO: 15219605 NR Description: glycosyl hydrolase family 1, beta-glucosidase
  misc_feature (1)..(423): Homolog of NCBI NO: 15219623 NR Description: glycosyl hydrolase family 1 [Arabidopsis
  misc_feature (1)..(423): Homolog of NCBI NO: 1732570 NR Description: beta-glucosidase [Arabidopsis thaliana]
  misc_feature (1)..(423): Homolog of NCBI NO: 1363489 NR Description: thioglucosidase (EC 3.2.1.147) 3D precursor -
  misc_feature (1)..(423): Homolog of NCBI NO: 15232626 NR Description: glycosyl hydrolase family 1 [Arabidopsis
MKNLNTDAFRMSIAWPRIFPHGRKEKGVSQAGVQFYHDLIDELIKNGITPFVTVFHWDTPQDLEDEYGGFLSERIVKDFREYADFVFQEYGGKVKHWITFNEPWVFSHAGYDVGKKAPGRCSSYVNAKCQDGRSGYEAYLVTHNLLISHAEAVEAYRKCEKCKGGKIGIAHSPAWFEAHDLADSQDGASIDRALDFILGWHLDTTTFGDYPQIMKDIVGHRLPKFTTEQKAKLKASTDFVGLNYYTSVFSNHLEKPDPSKPRWMQDSLITWESKNAQNYAIGSKPLTAALNVYSRGFRSLLKYIKDKYANPEIMIMENGYGEELGASDSVAVGTADHNRKYYLQRHLLSMQEAVCIDKVNVTGYFVWSLLDNFEWQDGYKNRFGLYYVDFKNNLTRYEKESGKYYKDFLSQGVRPSALKKDEL

SEQ ID NO: 22474 - protein, 413 aa, Arabidopsis thaliana
  peptide (1)..(413): Ceres Seq. ID no. 13490535
  misc_feature (1)..(411): Homolog of NCBI NO: 12043529 NR Description: beta-glucosidase 1 [Arabidopsis thaliana]
  misc_feature (1)..(413): Homolog of NCBI NO: 1732572 NR Description: beta-glucosidase [Brassica nigra]
  misc_feature (1)..(413): Homolog of NCBI NO: 15241841 NR Description: glycosyl hydrolase family 1 [Arabidopsis thaliana]
  misc_feature (1)..(413): Homolog of NCBI NO: 30697327 NR Description: glycosyl hydrolase family 1, beta-glucosidase
  misc_feature (1)..(413): Homolog of NCBI NO: 2286069 NR Description: beta-glucosidase [Arabidopsis thaliana]
  misc_feature (1)..(413): Homolog of NCBI NO: 15219605 NR Description: glycosyl hydrolase family 1, beta-glucosidase
  misc_feature (1)..(413): Homolog of NCBI NO: 15219623 NR Description: glycosyl hydrolase family 1 [Arabidopsis
  misc_feature (1)..(413): Homolog of NCBI NO: 1732570 NR Description: beta-glucosidase [Arabidopsis thaliana]
  misc_feature (1)..(413): Homolog of NCBI NO: 1363489 NR Description: thioglucosidase (EC 3.2.1.147) 3D precursor -
  misc_feature (1)..(413): Homolog of NCBI NO: 15232626 NR Description: glycosyl hydrolase family 1 [Arabidopsis
  misc_feature (1)..(411): Homolog of NCBI NO: 12043529 NR Description: beta-glucosidase 1 [Arabidopsis thaliana]
  misc_feature (1)..(413): Homolog of NCBI NO: 1732572 NR Description: beta-glucosidase [Brassica nigra]
  misc_feature (1)..(413): Homolog of NCBI NO: 15241841 NR Description: glycosyl hydrolase family 1 [Arabidopsis thaliana]
  misc_feature (1)..(413): Homolog of NCBI NO: 30697327 NR Description: glycosyl hydrolase family 1, beta-glucosidase
  misc_feature (1)..(413): Homolog of NCBI NO: 2286069 NR Description: beta-glucosidase [Arabidopsis thaliana]
  misc_feature (1)..(413): Homolog of NCBI NO: 15219605 NR Description: glycosyl hydrolase family 1, beta-glucosidase
  misc_feature (1)..(413): Homolog of NCBI NO: 15219623 NR Description: glycosyl hydrolase family 1 [Arabidopsis
  misc_feature (1)..(413): Homolog of NCBI NO: 1732570 NR Description: beta-glucosidase [Arabidopsis thaliana]
  misc_feature (1)..(413): Homolog of NCBI NO: 1363489 NR Description: thioglucosidase (EC 3.2.1.147) 3D precursor -
  misc_feature (1)..(413): Homolog of NCBI NO: 15232626 NR Description: glycosyl hydrolase family 1 [Arabidopsis
MSIAWPRIFPHGRKEKGVSQAGVQFYHDLIDELIKNGITPFVTVFHWDTPQDLEDEYGGFLSERIVKDFREYADFVFQEYGGKVKHWITFNEPWVFSHAGYDVGKKAPGRCSSYVNAKCQDGRSGYEAYLVTHNLLISHAEAVEAYRKCEKCKGGKIGIAHSPAWFEAHDLADSQDGASIDRALDFILGWHLDTTTFGDYPQIMKDIVGHRLPKFTTEQKAKLKASTDFVGLNYYTSVFSNHLEKPDPSKPRWMQDSLITWESKNAQNYAIGSKPLTAALNVYSRGFRSLLKYIKDKYANPEIMIMENGYGEELGASDSVAVGTADHNRKYYLQRHLLSMQEAVCIDKVNVTGYFVWSLLDNFEWQDGYKNRFGLYYVDFKNNLTRYEKESGKYYKDFLSQGVRPSALKKDEL

SEQ ID NO: 22475 - DNA, 1382 bp, Arabidopsis thaliana
  misc_feature (1)..(1382): Ceres Seq. ID no. 13592682
  misc_feature: MA Experiment ID: 108461 Result: Up-regulated in Transcription
  misc_feature: MA Experiment 108461 PARAMETER Experiment Name: At_Germinating_Seeds_cDNA_P Parameter: Age (day) Value: 1 vs. 0
  misc_feature: MA Experiment 108461 PARAMETER Experiment Name: At_Germinating_Seeds_cDNA_P Parameter: Tissue Value: Germinating Seeds
  misc_feature: MA Experiment ID: 108569 Result: Up-regulated in Transcription
  misc_feature: MA Experiment 108569 PARAMETER Experiment Name: At_0.001%_MeJA__cDNA_P Parameter: Timepoint (hr) Value: 6
  misc_feature: MA Experiment 108569 PARAMETER Experiment Name: At_0.001%_MeJA__cDNA_P Parameter: Tissue Value: Aerial
  misc_feature: MA Experiment 108569 PARAMETER Experiment Name: At_0.001%_MeJA__cDNA_P Parameter: Treatment Value: 0.001% MeJA vs. No Treatment
  misc_feature: MA Experiment ID: 108585 Result: Up-regulated in Transcription
  misc_feature: MA Experiment 108585 PARAMETER Experiment Name: At_5mM_NaNP_cDNA_P Parameter: Timepoint (hr) Value: 6
  misc_feature: MA Experiment 108585 PARAMETER Experiment Name: At_5mM_NaNP_cDNA_P Parameter: Tissue Value: Aerial
  misc_feature: MA Experiment 108585 PARAMETER Experiment Name: At_5mM_NaNP_cDNA_P Parameter: Treatment Value: null
  misc_feature: MA Experiment ID: 20000180 Result: Up-regulated in Transcription
  misc_feature: MA Experiment 20000180 PARAMETER Experiment Name: At_Germinating_Seeds_P Parameter: Age (hr) Value: 24 vs. 0
  misc_feature: MA Experiment 20000180 PARAMETER Experiment Name: At_Germinating_Seeds_P Parameter: Tissue Value: Germinating Seeds
  misc_feature: MA Experiment ID: 20000184 Result: Up-regulated in Transcription
  misc_feature: MA Experiment 20000184 PARAMETER Experiment Name: At_Shoots__P Parameter: Age (day) Value: 7
  misc_feature: MA Experiment 20000184 PARAMETER Experiment Name: At_Shoots__P Parameter: Tissue Value: Shoots vs. Whole Plant
  misc_feature: MA Experiment ID: 20000185 Result: Up-regulated in Transcription
  misc_feature: MA Experiment 20000185 PARAMETER Experiment Name: At_Roots__P Parameter: Age (day) Value: 7 vs. 21
  misc_feature: MA Experiment 20000185 PARAMETER Experiment Name: At_Roots__P Parameter: Organism Value: A. thaliana
  misc_feature: MA Experiment 20000185 PARAMETER Experiment Name: At_Roots__P Parameter: Tissue Value: Roots vs. Whole Plant
  misc_feature: MA Experiment ID: 20000234 Result: Up-regulated in Transcription
  misc_feature: MA Experiment 20000234 PARAMETER Experiment Name: At_Siliques_P Parameter: Age (day) Value: 21
  misc_feature: MA Experiment 20000234 PARAMETER Experiment Name: At_Siliques_P Parameter: Organism Value: A. thaliana
  misc_feature: MA Experiment 20000234 PARAMETER Experiment Name: At_Siliques_P Parameter: Plant Line Value: WS
  misc_feature: MA Experiment 20000234 PARAMETER Experiment Name: At_Siliques_P Parameter: Tissue Value: Less Than 5mm Siliques vs. Whole Plant
  misc_feature: MA Experiment ID: 20000235 Result: Up-regulated in Transcription
  misc_feature: MA Experiment 20000235 PARAMETER Experiment Name: At_Siliques_P Parameter: Age (day) Value: 21
  misc_feature: MA Experiment 20000235 PARAMETER Experiment Name: At_Siliques_P Parameter: Organism Value: A. thaliana
  misc_feature: MA Experiment 20000235 PARAMETER Experiment Name: At_Siliques_P Parameter: Plant Line Value: WS
  misc_feature: MA Experiment 20000235 PARAMETER Experiment Name: At_Siliques_P Parameter: Tissue Value: 5-10mm Siliques vs. Whole Plant
  misc_feature: MA Experiment ID: 20000264 Result: Up-regulated in Transcription
  misc_feature: MA Experiment 20000264 PARAMETER Experiment Name: At_Open_Flower_P Parameter: Age (day) Value: 21
  misc_feature: MA Experiment 20000264 PARAMETER Experiment Name: At_Open_Flower_P Parameter: Plant Line Value: WS
  misc_feature: MA Experiment 20000264 PARAMETER Experiment Name: At_Open_Flower_P Parameter: Tissue Value: Open Flower vs. Whole Plant
  misc_feature: MA Experiment ID: 20000265 Result: Up-regulated in Transcription
  misc_feature: MA Experiment 20000265 PARAMETER Experiment Name: At_Open_Flower_P Parameter: Age (day) Value: 21
  misc_feature: MA Experiment 20000265 PARAMETER Experiment Name: At_Open_Flower_P Parameter: Plant Line Value: WS
  misc_feature: MA Experiment 20000265 PARAMETER Experiment Name: At_Open_Flower_P Parameter: Tissue Value: Closed Flower vs. Whole Plant
  misc_feature: MA Experiment ID: 20000286 Result: Up-regulated in Transcription
  misc_feature: MA Experiment 20000286 PARAMETER Experiment Name: At_Open_Flower_P Parameter: Age (day) Value: 21
  misc_feature: MA Experiment 20000286 PARAMETER Experiment Name: At_Open_Flower_P Parameter: Plant Line Value: WS
  misc_feature: MA Experiment 20000286 PARAMETER Experiment Name: At_Open_Flower_P Parameter: Tissue Value: Half Open vs. Whole Plant
  misc_feature: MA Experiment ID: 20000439 Result: Up-regulated in Transcription
  misc_feature: MA Experiment 20000439 PARAMETER Experiment Name: At_Roots__P Parameter: Age (day) Value: 14 vs. 21
  misc_feature: MA Experiment 20000439 PARAMETER Experiment Name: At_Roots__P Parameter: Organism Value: A. thaliana
  misc_feature: MA Experiment 20000439 PARAMETER Experiment Name: At_Roots__P Parameter: Tissue Value: Roots vs. Whole Plant
  misc_feature: MA Experiment ID: 20001451 Result: Down-regulated in Transcription
  misc_feature: MA Experiment 20001451 PARAMETER Experiment Name: At_Far-red-induction_P Parameter: Age (day) Value: 7
  misc_feature: MA Experiment 20001451 PARAMETER Experiment Name: At_Far-red-induction_P Parameter: Light Value: Far-red vs. White
  misc_feature: MA Experiment 20001451 PARAMETER Experiment Name: At_Far-red-induction_P Parameter: Organism Value: A. thaliana
  misc_feature: MA Experiment 20001451 PARAMETER Experiment Name: At_Far-red-induction_P Parameter: Plant Line Value: Columbia
  misc_feature: MA Experiment 20001451 PARAMETER Experiment Name: At_Far-red-induction_P Parameter: Timepoint (hr) Value: 24
  misc_feature: MA Experiment 20001451 PARAMETER Experiment Name: At_Far-red-induction_P Parameter: Tissue Value: Whole Plant
  misc_feature: MA Experiment ID: 20001557 Result: Up-regulated in Transcription
  misc_feature: MA Experiment 20001557 PARAMETER Experiment Name: At_Drought_Soil_Dry_P Parameter: Age (day) Value: 27
  misc_feature: MA Experiment 20001557 PARAMETER Experiment Name: At_Drought_Soil_Dry_P Parameter: Organism Value: A. thaliana
  misc_feature: MA Experiment 20001557 PARAMETER Experiment Name: At_Drought_Soil_Dry_P Parameter: Plant Line Value: WS
  misc_feature: MA Experiment 20001557 PARAMETER Experiment Name: At_Drought_Soil_Dry_P Parameter: Post Timepoint (hr) Value: 3
  misc_feature: MA Experiment 20001557 PARAMETER Experiment Name: At_Drought_Soil_Dry_P Parameter: Post-Treatment Value: Re-Water vs. No Drought
  misc_feature: MA Experiment 20001557 PARAMETER Experiment Name: At_Drought_Soil_Dry_P Parameter: Timepoint (day) Value: 13
  misc_feature: MA Experiment 20001557 PARAMETER Experiment Name: At_Drought_Soil_Dry_P Parameter: Treatment Value: Drought vs. No Drought
  misc_feature: MA Experiment ID: 20001558 Result: Up-regulated in Transcription
  misc_feature: MA Experiment 20001558 PARAMETER Experiment Name: At_Drought_Soil_Dry_P Parameter: Age (day) Value: 27
  misc_feature: MA Experiment 20001558 PARAMETER Experiment Name: At_Drought_Soil_Dry_P Parameter: Organism Value: A. thaliana
  misc_feature: MA Experiment 20001558 PARAMETER Experiment Name: At_Drought_Soil_Dry_P Parameter: Plant Line Value: WS
  misc_feature: MA Experiment 20001558 PARAMETER Experiment Name: At_Drought_Soil_Dry_P Parameter: Post Timepoint (hr) Value: 6
  misc_feature: MA Experiment 20001558 PARAMETER Experiment Name: At_Drought_Soil_Dry_P Parameter: Post-Treatment Value: Re-Water vs. No Drought
  misc_feature: MA Experiment 20001558 PARAMETER Experiment Name: At_Drought_Soil_Dry_P Parameter: Timepoint (day) Value: 13
  misc_feature: MA Experiment 20001558 PARAMETER Experiment Name: At_Drought_Soil_Dry_P Parameter: Treatment Value: Drought vs. No Drought
  misc_feature: MA Experiment ID: 20001560 Result: Up-regulated in Transcription
  misc_feature: MA Experiment 20001560 PARAMETER Experiment Name: At_Drought_Soil_Dry_P Parameter: Age (day) Value: 28
  misc_feature: MA Experiment 20001560 PARAMETER Experiment Name: At_Drought_Soil_Dry_P Parameter: Organism Value: A. thaliana
  misc_feature: MA Experiment 20001560 PARAMETER Experiment Name: At_Drought_Soil_Dry_P Parameter: Plant Line Value: WS
  misc_feature: MA Experiment 20001560 PARAMETER Experiment Name: At_Drought_Soil_Dry_P Parameter: Post Timepoint (hr) Value: None
  misc_feature: MA Experiment 20001560 PARAMETER Experiment Name: At_Drought_Soil_Dry_P Parameter: Post-Treatment Value: None
  misc_feature: MA Experiment 20001560 PARAMETER Experiment Name: At_Drought_Soil_Dry_P Parameter: Timepoint (day) Value: 14
  misc_feature: MA Experiment 20001560 PARAMETER Experiment Name: At_Drought_Soil_Dry_P Parameter: Treatment Value: Drought vs. No Drought
  misc_feature: MA Experiment ID: 20001905 Result: Up-regulated in Transcription
  misc_feature: MA Experiment 20001905 PARAMETER Experiment Name: At_Drought_Reproduction_P Parameter: Age (day) Value: 40
  misc_feature: MA Experiment 20001905 PARAMETER Experiment Name: At_Drought_Reproduction_P Parameter: Organism Value: A. thaliana
  misc_feature: MA Experiment 20001905 PARAMETER Experiment Name: At_Drought_Reproduction_P Parameter: Plant Line Value: WS
  misc_feature: MA Experiment 20001905 PARAMETER Experiment Name: At_Drought_Reproduction_P Parameter: Timepoint (day) Value: 10
  misc_feature: MA Experiment 20001905 PARAMETER Experiment Name: At_Drought_Reproduction_P Parameter: Tissue Value: Rosettes
  misc_feature: MA Experiment 20001905 PARAMETER Experiment Name: At_Drought_Reproduction_P Parameter: Treatment Value: Drought vs. No Drought
cgaatcacctccgatctcaaatctcacaatcttttctctccaaattctcttctctctgaatcaatccaatcatggttgagccggcgaacaccgttggaattccggtgaaccacatcccattgttgaaggatgagctcgatatcgtgatccccacgatccgtaacctcgatttcctggagatgtggaggccttttcttcagccttaccatctgattatcgtccaagatggagatccatcgaagaccattgctgtccctgaagggttcgattacgaactctacaacaggaacgacatcaaccgtatccttggtcctaaagcttcctgcatttccttcaaggactctgcttgtcgttgcttcggctacatggtctccaagaagaagtacatcttcactattgatgacgattgcttcgttgctaaggatccatctggaaaagctgtgaacgctcttgagcaacacatcaagaaccttctctgcccatcaactccatttttcttcaacaccttgtacgacccataccgtgaaggtgctgacttcgtccgtggataccctttcagtctccgtgagggtgtttccaccgctgtttcccacggtctgtggctcaacatccctgattacgatgcccctacccaacttgtgaagcctaaggaaaggaacacaaggtatgtggatgctgtcatgaccatcccaaagggaactcttttccctatgtgtggtatgaacttggcctttgaccgtgagctcattggtccggctatgtactttggtctcatgggtgatggtcagcctattggtcgctacgacgatatgtgggctggatggtgtatcaaggtgatctgtgaccatttgggattgggagtgaagacaggtttgccctacatttaccacagcaaagccagcaacccgtttgtgaacttgaagaaggagtacaagggaatcttctggcaggaggatatcattcctttcttccagagcgcaaagctcacgaaagaagctgtgacagttcaacaatgctacatggagctgtccaagttggtgaaggagaagctaagccccattgatccttactttgacaagcttgcagatgctatggtcacttggattgaagcttgggatgagcttaacccacccactaaagcttgagcagcaaaaaaaccaccaccgcagttttggttattagctcaacatatcatctatcttctccgttttgtttttgttttgtcttttctcaaattttccggcgattcttcagttcgtttttaagttgccggagtttatttaaatagtgaatggtgtagttctatttatgaccgagacaatctctcttttgaggtttttcgtttttgtttcaataataaaaaatcataagagagaactagt

SEQ ID NO: 22476 - protein, 357 aa, Arabidopsis thaliana
  peptide (1)..(357): Ceres Seq. ID no. 13592683
  misc_feature (13)..(356): Pfam Name: Reversibly glycosylated polypeptide Pfam Description: Reversibly glycosylated polypeptide
  misc_feature (13)..(356): Pfam Name: Reversibly glycosylated polypeptide Pfam Description: Reversibly glycosylated polypeptide
  misc_feature (5)..(357): Homolog of NCBI NO: 34588146 NR Description: Alpha-1,4-glucan-protein synthase
  misc_feature (5)..(357): Homolog of NCBI NO: 4158232 NR Description: reversibly glycosylated polypeptide [Triticum
  misc_feature (5)..(357): Homolog of NCBI NO: 34915190 NR Description: reversibly glycosylated polypeptide
  misc_feature (5)..(357): Homolog of NCBI NO: 4158221 NR Description: reversibly glycosylated polypeptide
  misc_feature (9)..(357): Homolog of NCBI NO: 34582499 NR Description: Alpha-1,4-glucan-protein synthase
  misc_feature (5)..(357): Homolog of NCBI NO: 34588146 NR Description: Alpha-1,4-glucan-protein synthase
  misc_feature (5)..(357): Homolog of NCBI NO: 34915190 NR Description: reversibly glycosylated polypeptide
  misc_feature (1)..(357): Homolog of NCBI NO: 2317729 NR Description: reversibly glycosylated polypeptide-1
  misc_feature (1)..(354): Homolog of NCBI NO: 15242351 NR Description: reversibly glycosylated polypeptide-3
  misc_feature (1)..(354): Homolog of NCBI NO: 2317731 NR Description: reversibly glycosylated polypeptide-2
  misc_feature (1)..(354): Homolog of NCBI NO: 21593071 NR Description: reversibly glycosylated polypeptide-3
  misc_feature (9)..(357): Homolog of NCBI NO: 34582499 NR Description: Alpha-1,4-glucan-protein synthase
  misc_feature (5)..(357): Homolog of NCBI NO: 4158221 NR Description: reversibly glycosylated polypeptide
  misc_feature (5)..(357): Homolog of NCBI NO: 4158232 NR Description: reversibly glycosylated polypeptide [Triticum
  misc_feature (1)..(357): Homolog of NCBI NO: 15232865 NR Description: reversibly glycosylated polypeptide-1
  misc_feature (1)..(354): Homolog of NCBI NO: 21593071 NR Description: reversibly glycosylated polypeptide-3
  misc_feature (1)..(354): Homolog of NCBI NO: 2317731 NR Description: reversibly glycosylated polypeptide-2
  misc_feature (1)..(354): Homolog of NCBI NO: 15242351 NR Description: reversibly glycosylated polypeptide-3
  misc_feature (1)..(357): Homolog of NCBI NO: 2317729 NR Description: reversibly glycosylated polypeptide-1
  misc_feature (1)..(357): Homolog of NCBI NO: 15232865 NR Description: reversibly glycosylated polypeptide-1
MVEPANTVGIPVNHIPLLKDELDIVIPTIRNLDFLEMWRPFLQPYHLIIVQDGDPSKTIAVPEGFDYELYNRNDINRILGPKASCISFKDSACRCFGYMVSKKKYIFTIDDDCFVAKDPSGKAVNALEQHIKNLLCPSTPFFFNTLYDPYREGADFVRGYPFSLREGVSTAVSHGLWLNIPDYDAPTQLVKPKERNTRYVDAVMTIPKGTLFPMCGMNLAFDRELIGPAMYFGLMGDGQPIGRYDDMWAGWCIKVICDHLGLGVKTGLPYIYHSKASNPFVNLKKEYKGIFWQEDIIPFFQSAKLTKEAVTVQQCYMELSKLVKEKLSPIDPYFDKLADAMVTWIEAWDELNPPTKA

SEQ ID NO: 22477 - protein, 321 aa, Arabidopsis thaliana
  peptide (1)..(321): Ceres Seq. ID no. 13592684
  misc_feature (1)..(320): Pfam Name: Reversibly glycosylated polypeptide Pfam Description: Reversibly glycosylated polypeptide
  misc_feature (1)..(320): Pfam Name: Reversibly glycosylated polypeptide Pfam Description: Reversibly glycosylated polypeptide
  misc_feature (1)..(321): Homolog of NCBI NO: 34588146 NR Description: Alpha-1,4-glucan-protein synthase
  misc_feature (1)..(321): Homolog of NCBI NO: 4158232 NR Description: reversibly glycosylated polypeptide [Triticum
  misc_feature (1)..(321): Homolog of NCBI NO: 34915190 NR Description: reversibly glycosylated polypeptide
  misc_feature (1)..(321): Homolog of NCBI NO: 4158221 NR Description: reversibly glycosylated polypeptide
  misc_feature (1)..(321): Homolog of NCBI NO: 34582499 NR Description: Alpha-1,4-glucan-protein synthase
  misc_feature (1)..(321): Homolog of NCBI NO: 34588146 NR Description: Alpha-1,4-glucan-protein synthase
  misc_feature (1)..(321): Homolog of NCBI NO: 34915190 NR Description: reversibly glycosylated polypeptide
  misc_feature (1)..(321): Homolog of NCBI NO: 34582499 NR Description: Alpha-1,4-glucan-protein synthase
  misc_feature (1)..(321): Homolog of NCBI NO: 15232865 NR Description: reversibly glycosylated polypeptide-1
  misc_feature (1)..(321): Homolog of NCBI NO: 2317729 NR Description: reversibly glycosylated polypeptide-1
  misc_feature (1)..(318): Homolog of NCBI NO: 15242351 NR Description: reversibly glycosylated polypeptide-3
  misc_feature (1)..(318): Homolog of NCBI NO: 2317731 NR Description: reversibly glycosylated polypeptide-2
  misc_feature (1)..(318): Homolog of NCBI NO: 21593071 NR Description: reversibly glycosylated polypeptide-3
  misc_feature (1)..(321): Homolog of NCBI NO: 4158221 NR Description: reversibly glycosylated polypeptide
  misc_feature (1)..(321): Homolog of NCBI NO: 4158232 NR Description: reversibly glycosylated polypeptide [Triticum
  misc_feature (1)..(318): Homolog of NCBI NO: 21593071 NR Description: reversibly glycosylated polypeptide-3
  misc_feature (1)..(318): Homolog of NCBI NO: 2317731 NR Description: reversibly glycosylated polypeptide-2
  misc_feature (1)..(318): Homolog of NCBI NO: 15242351 NR Description: reversibly glycosylated polypeptide-3
  misc_feature (1)..(321): Homolog of NCBI NO: 2317729 NR Description: reversibly glycosylated polypeptide-1
  misc_feature (1)..(321): Homolog of NCBI NO: 15232865 NR Description: reversibly glycosylated polypeptide-1
MWRPFLQPYHLIIVQDGDPSKTIAVPEGFDYELYNRNDINRILGPKASCISFKDSACRCFGYMVSKKKYIFTIDDDCFVAKDPSGKAVNALEQHIKNLLCPSTPFFFNTLYDPYREGADFVRGYPFSLREGVSTAVSHGLWLNIPDYDAPTQLVKPKERNTRYVDAVMTIPKGTLFPMCGMNLAFDRELIGPAMYFGLMGDGQPIGRYDDMWAGWCIKVICDHLGLGVKTGLPYIYHSKASNPFVNLKKEYKGIFWQEDIIPFFQSAKLTKEAVTVQQCYMELSKLVKEKLSPIDPYFDKLADAMVTWIEAWDELNPPTKA

SEQ ID NO: 22478 - protein, 259 aa, Arabidopsis thaliana
  peptide (1)..(259): Ceres Seq. ID no. 13592685
  misc_feature (1)..(258): Pfam Name: Reversibly glycosylated polypeptide Pfam Description: Reversibly glycosylated polypeptide
  misc_feature (1)..(258): Pfam Name: Reversibly glycosylated polypeptide Pfam Description: Reversibly glycosylated polypeptide
  misc_feature (1)..(259): Homolog of NCBI NO: 34588146 NR Description: Alpha-1,4-glucan-protein synthase
  misc_feature (1)..(259): Homolog of NCBI NO: 4158232 NR Description: reversibly glycosylated polypeptide [Triticum
  misc_feature (1)..(259): Homolog of NCBI NO: 34915190 NR Description: reversibly glycosylated polypeptide
  misc_feature (1)..(259): Homolog of NCBI NO: 4158221 NR Description: reversibly glycosylated polypeptide
  misc_feature (1)..(259): Homolog of NCBI NO: 34582499 NR Description: Alpha-1,4-glucan-protein synthase
  misc_feature (1)..(259): Homolog of NCBI NO: 34588146 NR Description: Alpha-1,4-glucan-protein synthase
  misc_feature (1)..(259): Homolog of NCBI NO: 34915190 NR Description: reversibly glycosylated polypeptide
  misc_feature (1)..(259): Homolog of NCBI NO: 34582499 NR Description: Alpha-1,4-glucan-protein synthase
  misc_feature (1)..(259): Homolog of NCBI NO: 15232865 NR Description: reversibly glycosylated polypeptide-1
  misc_feature (1)..(259): Homolog of NCBI NO: 2317729 NR Description: reversibly glycosylated polypeptide-1
  misc_feature (1)..(256): Homolog of NCBI NO: 15242351 NR Description: reversibly glycosylated polypeptide-3
  misc_feature (1)..(256): Homolog of NCBI NO: 2317731 NR Description: reversibly glycosylated polypeptide-2
  misc_feature (1)..(256): Homolog of NCBI NO: 21593071 NR Description: reversibly glycosylated polypeptide-3
  misc_feature (1)..(259): Homolog of NCBI NO: 4158221 NR Description: reversibly glycosylated polypeptide
  misc_feature (1)..(259): Homolog of NCBI NO: 4158232 NR Description: reversibly glycosylated polypeptide [Triticum
  misc_feature (1)..(256): Homolog of NCBI NO: 21593071 NR Description: reversibly glycosylated polypeptide-3
  misc_feature (1)..(256): Homolog of NCBI NO: 2317731 NR Description: reversibly glycosylated polypeptide-2
  misc_feature (1)..(256): Homolog of NCBI NO: 15242351 NR Description: reversibly glycosylated polypeptide-3
  misc_feature (1)..(259): Homolog of NCBI NO: 2317729 NR Description: reversibly glycosylated polypeptide-1
  misc_feature (1)..(259): Homolog of NCBI NO: 15232865 NR Description: reversibly glycosylated polypeptide-1
MVSKKKYIFTIDDDCFVAKDPSGKAVNALEQHIKNLLCPSTPFFFNTLYDPYREGADFVRGYPFSLREGVSTAVSHGLWLNIPDYDAPTQLVKPKERNTRYVDAVMTIPKGTLFPMCGMNLAFDRELIGPAMYFGLMGDGQPIGRYDDMWAGWCIKVICDHLGLGVKTGLPYIYHSKASNPFVNLKKEYKGIFWQEDIIPFFQSAKLTKEAVTVQQCYMELSKLVKEKLSPIDPYFDKLADAMVTWIEAWDELNPPTKA

SEQ ID NO: 22479 - DNA, 873 bp, Arabidopsis thaliana
  misc_feature (1)..(873): Ceres Seq. ID no. 13493860
  misc_feature: MA Experiment ID: 108462 Result: Up-regulated in Transcription
  misc_feature: MA Experiment 108462 PARAMETER Experiment Name: At_Germinating_Seeds_cDNA_P Parameter: Age (day) Value: 2 vs. 0
  misc_feature: MA Experiment 108462 PARAMETER Experiment Name: At_Germinating_Seeds_cDNA_P Parameter: Tissue Value: Germinating Seeds
  misc_feature: MA Experiment ID: 108464 Result: Up-regulated in Transcription
  misc_feature: MA Experiment 108464 PARAMETER Experiment Name: At_Germinating_Seeds_cDNA_P Parameter: Age (day) Value: 4 vs. 0
  misc_feature: MA Experiment 108464 PARAMETER Experiment Name: At_Germinating_Seeds_cDNA_P Parameter: Tissue Value: Germinating Seeds
  misc_feature: MA Experiment ID: 20000070 Result: Up-regulated in Transcription
  misc_feature: MA Experiment 20000070 PARAMETER Experiment Name: At_100uM_ABA_Mutants_cDNA_P Parameter: Plant Line Value: CS24
  misc_feature: MA Experiment 20000070 PARAMETER Experiment Name: At_100uM_ABA_Mutants_cDNA_P Parameter: Timepoint (hr) Value: 6
  misc_feature: MA Experiment 20000070 PARAMETER Experiment Name: At_100uM_ABA_Mutants_cDNA_P Parameter: Tissue Value: Aerial
  misc_feature: MA Experiment 20000070 PARAMETER Experiment Name: At_100uM_ABA_Mutants_cDNA_P Parameter: Treatment Value: 100uM ABA vs. No Treatment
  misc_feature: MA Experiment ID: 20000088 Result: Up-regulated in Transcription
  misc_feature: MA Experiment 20000088 PARAMETER Experiment Name: At_100uM_ABA_Mutants_cDNA_P Parameter: Plant Line Value: Landsberg
  misc_feature: MA Experiment 20000088 PARAMETER Experiment Name: At_100uM_ABA_Mutants_cDNA_P Parameter: Timepoint (hr) Value: 6
  misc_feature: MA Experiment 20000088 PARAMETER Experiment Name: At_100uM_ABA_Mutants_cDNA_P Parameter: Tissue Value: Aerial
  misc_feature: MA Experiment 20000088 PARAMETER Experiment Name: At_100uM_ABA_Mutants_cDNA_P Parameter: Treatment Value: 100uM ABA vs. No Treatment
  misc_feature: MA Experiment ID: 20000090 Result: Up-regulated in Transcription
  misc_feature: MA Experiment ID: 20000173 Result: Down-regulated in Transcription
  misc_feature: MA Experiment 20000173 PARAMETER Experiment Name: At_42deg_Heat_P Parameter: Age (day) Value: 14
  misc_feature: MA Experiment 20000173 PARAMETER Experiment Name: At_42deg_Heat_P Parameter: Organism Value: A. thaliana
  misc_feature: MA Experiment 20000173 PARAMETER Experiment Name: At_42deg_Heat_P Parameter: Plant Line Value: WS
  misc_feature: MA Experiment 20000173 PARAMETER Experiment Name: At_42deg_Heat_P Parameter: Temperature (deg C) Value: 42 vs. 22
  misc_feature: MA Experiment 20000173 PARAMETER Experiment Name: At_42deg_Heat_P Parameter: Timepoint (hr) Value: 6
  misc_feature: MA Experiment 20000173 PARAMETER Experiment Name: At_42deg_Heat_P Parameter: Tissue Value: Aerial
  misc_feature: MA Experiment ID: 20000180 Result: Up-regulated in Transcription
  misc_feature: MA Experiment 20000180 PARAMETER Experiment Name: At_Germinating_Seeds_P Parameter: Age (hr) Value: 24 vs. 0
  misc_feature: MA Experiment 20000180 PARAMETER Experiment Name: At_Germinating_Seeds_P Parameter: Tissue Value: Germinating Seeds
  misc_feature: MA Experiment ID: 20000184 Result: Down-regulated in Transcription
  misc_feature: MA Experiment 20000184 PARAMETER Experiment Name: At_Shoots__P Parameter: Age (day) Value: 7
  misc_feature: MA Experiment 20000184 PARAMETER Experiment Name: At_Shoots__P Parameter: Tissue Value: Shoots vs. Whole Plant
  misc_feature: MA Experiment ID: 20000214 Result: Up-regulated in Transcription
  misc_feature: MA Experiment 20000214 PARAMETER Experiment Name: At_4deg_Cold_P Parameter: Timepoint (hr) Value: 6
  misc_feature: MA Experiment ID: 20000234 Result: Down-regulated in Transcription
  misc_feature: MA Experiment 20000234 PARAMETER Experiment Name: At_Siliques_P Parameter: Age (day) Value: 21
  misc_feature: MA Experiment 20000234 PARAMETER Experiment Name: At_Siliques_P Parameter: Organism Value: A. thaliana
  misc_feature: MA Experiment 20000234 PARAMETER Experiment Name: At_Siliques_P Parameter: Plant Line Value: WS
  misc_feature: MA Experiment 20000234 PARAMETER Experiment Name: At_Siliques_P Parameter: Tissue Value: Less Than 5mm Siliques vs. Whole Plant
  misc_feature: MA Experiment ID: 20000264 Result: Down-regulated in Transcription
  misc_feature: MA Experiment 20000264 PARAMETER Experiment Name: At_Open_Flower_P Parameter: Age (day) Value: 21
  misc_feature: MA Experiment 20000264 PARAMETER Experiment Name: At_Open_Flower_P Parameter: Plant Line Value: WS
  misc_feature: MA Experiment 20000264 PARAMETER Experiment Name: At_Open_Flower_P Parameter: Tissue Value: Open Flower vs. Whole Plant
  misc_feature: MA Experiment ID: 20000265 Result: Down-regulated in Transcription
  misc_feature: MA Experiment 20000265 PARAMETER Experiment Name: At_Open_Flower_P Parameter: Age (day) Value: 21
  misc_feature: MA Experiment 20000265 PARAMETER Experiment Name: At_Open_Flower_P Parameter: Plant Line Value: WS
  misc_feature: MA Experiment 20000265 PARAMETER Experiment Name: At_Open_Flower_P Parameter: Tissue Value: Closed Flower vs. Whole Plant
  misc_feature: MA Experiment ID: 20000286 Result: Down-regulated in Transcription
  misc_feature: MA Experiment 20000286 PARAMETER Experiment Name: At_Open_Flower_P Parameter: Age (day) Value: 21
  misc_feature: MA Experiment 20000286 PARAMETER Experiment Name: At_Open_Flower_P Parameter: Plant Line Value: WS
  misc_feature: MA Experiment 20000286 PARAMETER Experiment Name: At_Open_Flower_P Parameter: Tissue Value: Half Open vs. Whole Plant
  misc_feature: MA Experiment ID: 20000438 Result: Down-regulated in Transcription
  misc_feature: MA Experiment 20000438 PARAMETER Experiment Name: At_Shoots__P Parameter: Age (day) Value: 14
  misc_feature: MA Experiment 20000438 PARAMETER Experiment Name: At_Shoots__P Parameter: Tissue Value: Shoots vs. Whole Plant
  misc_feature: MA Experiment ID: 20001450 Result: Down-regulated in Transcription
  misc_feature: MA Experiment 20001450 PARAMETER Experiment Name: At_Far-red-induction_P Parameter: Age (day) Value: 7
  misc_feature: MA Experiment 20001450 PARAMETER Experiment Name: At_Far-red-induction_P Parameter: Light Value: Far-red vs. White
  misc_feature: MA Experiment 20001450 PARAMETER Experiment Name: At_Far-red-induction_P Parameter: Organism Value: A. thaliana
  misc_feature: MA Experiment 20001450 PARAMETER Experiment Name: At_Far-red-induction_P Parameter: Plant Line Value: Columbia
  misc_feature: MA Experiment 20001450 PARAMETER Experiment Name: At_Far-red-induction_P Parameter: Timepoint (hr) Value: 8
  misc_feature: MA Experiment 20001450 PARAMETER Experiment Name: At_Far-red-induction_P Parameter: Tissue Value: Whole Plant
  misc_feature: MA Experiment ID: 20001451 Result: Down-regulated in Transcription
  misc_feature: MA Experiment 20001451 PARAMETER Experiment Name: At_Far-red-induction_P Parameter: Age (day) Value: 7
  misc_feature: MA Experiment 20001451 PARAMETER Experiment Name: At_Far-red-induction_P Parameter: Light Value: Far-red vs. White
  misc_feature: MA Experiment 20001451 PARAMETER Experiment Name: At_Far-red-induction_P Parameter: Organism Value: A. thaliana
  misc_feature: MA Experiment 20001451 PARAMETER Experiment Name: At_Far-red-induction_P Parameter: Plant Line Value: Columbia
  misc_feature: MA Experiment 20001451 PARAMETER Experiment Name: At_Far-red-induction_P Parameter: Timepoint (hr) Value: 24
  misc_feature: MA Experiment 20001451 PARAMETER Experiment Name: At_Far-red-induction_P Parameter: Tissue Value: Whole Plant
agaaagaaactgatagtagaaaaaaaaagagagaagaaaaatggtgttgacaatctatgctcctttattcgcttcttcaaagagagctgttgtgacattggtggagaagggagtatcattcgaaactgtcaatgtcgatctcatgaaaggagaacagagacagcctgagtatctcgcgattcagcctttcggtaaaatcccagtcctcgtcgacggagactacaaaatcttcgagtcgcgtgcgatcatgaggtatatagcagagaagtatagatcacaaggacctgatcttttggggaagactattgaagagagaggacaagtagagcaatggttagacgttgaggctacaagttaccatccaccactattggctttaacgctcaacattgtctttgcaccacttatgggtttccctgctgatgagaaagttattaaggagagtgaagagaagcttgcagaagtgcttgatgtctatgaagctcagctttctaagaacgaatacttggctggtgattttgtgagtctagctgatttggctcaccttcctttcaccgagtatcttgttggtcctattgggaaggctcatttgatcaaagataggaagcatgttagcgcttggtgggataagattagtagccgtgctgcgtggaaggaggtttccgctaagtactcactacctgtttaaacaaggagatgttgacttggggggtttgtgtgagctttgtgttctttgagggagttcgttttcgggtcgattgtcttgttgtttcaataagaaacggaactctgtctcatttgttgtctctggtttcttgtattctgtaacttttcaagcttttcaataagagtttaaaatcagagtgactcaat

SEQ ID NO: 22480 - protein, 215 aa, Arabidopsis thaliana
  peptide (1)..(215): Ceres Seq. ID no. 13493861
  misc_feature (3)..(75): Pfam Name: Glutathione S-transferase, N-terminal domain Pfam Description: Glutathione S-transferase, N-terminal domain
  misc_feature (3)..(75): Pfam Name: Glutathione S-transferase, N-terminal domain Pfam Description: Glutathione S-transferase, N-terminal domain
  misc_feature (1)..(214): Homolog of NCBI NO: 2462929 NR Description: glutathione transferase [Arabidopsis thaliana]
  misc_feature (1)..(214): Homolog of NCBI NO: 15224581 NR Description: glutathione transferase, putative [Arabidopsis
  misc_feature (1)..(214): Homolog of NCBI NO: 15224581 NR Description: glutathione transferase, putative [Arabidopsis
  misc_feature (1)..(215): Homolog of NCBI NO: 15224582 NR Description: glutathione transferase, putative [Arabidopsis
  misc_feature (1)..(214): Homolog of NCBI NO: 2462929 NR Description: glutathione transferase [Arabidopsis thaliana]
  misc_feature (1)..(215): Homolog of NCBI NO: 15224582 NR Description: glutathione transferase, putative [Arabidopsis
MVLTIYAPLFASSKRAVVTLVEKGVSFETVNVDLMKGEQRQPEYLAIQPFGKIPVLVDGDYKIFESRAIMRYIAEKYRSQGPDLLGKTIEERGQVEQWLDVEATSYHPPLLALTLNIVFAPLMGFPADEKVIKESEEKLAEVLDVYEAQLSKNEYLAGDFVSLADLAHLPFTEYLVGPIGKAHLIKDRKHVSAWWDKISSRAAWKEVSAKYSLPV

SEQ ID NO: 22481 - protein, 181 aa, Arabidopsis thaliana
  peptide (1)..(181): Ceres Seq. ID no. 13493862
  misc_feature (1)..(180): Homolog of NCBI NO: 2462929 NR Description: glutathione transferase [Arabidopsis thaliana]
  misc_feature (1)..(180): Homolog of NCBI NO: 15224581 NR Description: glutathione transferase, putative [Arabidopsis
  misc_feature (1)..(181): Homolog of NCBI NO: 15224582 NR Description: glutathione transferase, putative [Arabidopsis
  misc_feature (1)..(180): Homolog of NCBI NO: 2462929 NR Description: glutathione transferase [Arabidopsis thaliana]
  misc_feature (1)..(180): Homolog of NCBI NO: 15224581 NR Description: glutathione transferase, putative [Arabidopsis
  misc_feature (1)..(181): Homolog of NCBI NO: 15224582 NR Description: glutathione transferase, putative [Arabidopsis
MKGEQRQPEYLAIQPFGKIPVLVDGDYKIFESRAIMRYIAEKYRSQGPDLLGKTIEERGQVEQWLDVEATSYHPPLLALTLNIVFAPLMGFPADEKVIKESEEKLAEVLDVYEAQLSKNEYLAGDFVSLADLAHLPFTEYLVGPIGKAHLIKDRKHVSAWWDKISSRAAWKEVSAKYSLPV

SEQ ID NO: 22482 - protein, 146 aa, Arabidopsis thaliana
  peptide (1)..(146): Ceres Seq. ID no. 13493863
  misc_feature (1)..(145): Homolog of NCBI NO: 2462929 NR Description: glutathione transferase [Arabidopsis thaliana]
  misc_feature (1)..(145): Homolog of NCBI NO: 15224581 NR Description: glutathione transferase, putative [Arabidopsis
  misc_feature (1)..(146): Homolog of NCBI NO: 15224582 NR Description: glutathione transferase, putative [Arabidopsis
  misc_feature (1)..(145): Homolog of NCBI NO: 2462929 NR Description: glutathione transferase [Arabidopsis thaliana]
  misc_feature (1)..(145): Homolog of NCBI NO: 15224581 NR Description: glutathione transferase, putative [Arabidopsis
  misc_feature (1)..(146): Homolog of NCBI NO: 15224582 NR Description: glutathione transferase, putative [Arabidopsis
MRYIAEKYRSQGPDLLGKTIEERGQVEQWLDVEATSYHPPLLALTLNIVFAPLMGFPADEKVIKESEEKLAEVLDVYEAQLSKNEYLAGDFVSLADLAHLPFTEYLVGPIGKAHLIKDRKHVSAWWDKISSRAAWKEVSAKYSLPV

SEQ ID NO: 22483 - DNA, 1094 bp, Arabidopsis thaliana
  misc_feature (1)..(1094): Ceres Seq. ID no. 12322609
  misc_feature: MA Experiment ID: 108434 Result: Up-regulated in Transcription
  misc_feature: MA Experiment 108434 PARAMETER Experiment Name: At_Root_Tips_cDNA_P Parameter: Tissue Value: Root Tips
  misc_feature: MA Experiment ID: 108461 Result: Down-regulated in Transcription
  misc_feature: MA Experiment 108461 PARAMETER Experiment Name: At_Germinating_Seeds_cDNA_P Parameter: Age (day) Value: 1 vs. 0
  misc_feature: MA Experiment 108461 PARAMETER Experiment Name: At_Germinating_Seeds_cDNA_P Parameter: Tissue Value: Germinating Seeds
  misc_feature: MA Experiment ID: 108462 Result: Down-regulated in Transcription
  misc_feature: MA Experiment 108462 PARAMETER Experiment Name: At_Germinating_Seeds_cDNA_P Parameter: Age (day) Value: 2 vs. 0
  misc_feature: MA Experiment 108462 PARAMETER Experiment Name: At_Germinating_Seeds_cDNA_P Parameter: Tissue Value: Germinating Seeds
  misc_feature: MA Experiment ID: 108463 Result: Down-regulated in Transcription
  misc_feature: MA Experiment 108463 PARAMETER Experiment Name: At_Germinating_Seeds_cDNA_P Parameter: Age (day) Value: 3 vs. 0
  misc_feature: MA Experiment 108463 PARAMETER Experiment Name: At_Germinating_Seeds_cDNA_P Parameter: Tissue Value: Germinating Seeds
  misc_feature: MA Experiment ID: 108464 Result: Down-regulated in Transcription
  misc_feature: MA Experiment 108464 PARAMETER Experiment Name: At_Germinating_Seeds_cDNA_P Parameter: Age (day) Value: 4 vs. 0
  misc_feature: MA Experiment 108464 PARAMETER Experiment Name: At_Germinating_Seeds_cDNA_P Parameter: Tissue Value: Germinating Seeds
  misc_feature: MA Experiment ID: 108569 Result: Up-regulated in Transcription
  misc_feature: MA Experiment 108569 PARAMETER Experiment Name: At_0.001%_MeJA__cDNA_P Parameter: Timepoint (hr) Value: 6
  misc_feature: MA Experiment 108569 PARAMETER Experiment Name: At_0.001%_MeJA__cDNA_P Parameter: Tissue Value: Aerial
  misc_feature: MA Experiment 108569 PARAMETER Experiment Name: At_0.001%_MeJA__cDNA_P Parameter: Treatment Value: 0.001% MeJA vs. No Treatment
  misc_feature: MA Experiment ID: 108573 Result: Up-regulated in Transcription
  misc_feature: MA Experiment 108573 PARAMETER Experiment Name: At_Drought_cDNA_P Parameter: Timepoint (hr) Value: 6
  misc_feature: MA Experiment 108573 PARAMETER Experiment Name: At_Drought_cDNA_P Parameter: Tissue Value: Aerial
  misc_feature: MA Experiment 108573 PARAMETER Experiment Name: At_Drought_cDNA_P Parameter: Treatment Value: Drought vs. No Drought
  misc_feature: MA Experiment ID: 108585 Result: Up-regulated in Transcription
  misc_feature: MA Experiment 108585 PARAMETER Experiment Name: At_5mM_NaNP_cDNA_P Parameter: Timepoint (hr) Value: 6
  misc_feature: MA Experiment 108585 PARAMETER Experiment Name: At_5mM_NaNP_cDNA_P Parameter: Tissue Value: Aerial
  misc_feature: MA Experiment 108585 PARAMETER Experiment Name: At_5mM_NaNP_cDNA_P Parameter: Treatment Value: null
  misc_feature: MA Experiment ID: 20000179 Result: Down-regulated in Transcription
  misc_feature: MA Experiment 20000179 PARAMETER Experiment Name: At_Germinating_Seeds_P Parameter: Age (hr) Value: 6 vs. 0
  misc_feature: MA Experiment 20000179 PARAMETER Experiment Name: At_Germinating_Seeds_P Parameter: Tissue Value: Germinating Seeds
  misc_feature: MA Experiment ID: 20000224 Result: Down-regulated in Transcription
actctttcttcttcttctcgtcgtcgtttgtcactttagagctacttcttcttcttctctgctaagcctttcctctcgacttgatacttttctccagtaagggtttgcaaagatgaagcttgatactagtgggttcgagacttccatgcctatgattggatttggctcgagcagtgatatgcttgatgagctttcttctgtaccctcgtttgatctaccccgtactaaagagtttgatggatttcagaaaaaagctaaagacatgttgaagcatgcaaaaggaacaaccactctcgcttttatcttcaaaggtggtgttatggtcgctgctgattctcgggctagcatgggaggatatatctcctcacaatctgtgaagaagattattgaaatcaatccttatatgctcggtacaatggctggaggagctgctgattgccaattctggcacagaaatcttggaattaagtgccgtctacatgagctggcaaacaagaggagaatctctgtttccggagcttcgaaacttcttgccaacatgctctattcataccgtggaatgggactttctgttggtacaatgattgctggatgggacgaaactggtcccggactatactatgtcgacaacgaaggaggacggctcaagggagacaggttttcagtcggttctggttcaccatatgcttacggtgtgctggacagcgggtacaaatatgatatgtcagttgaagaagcttccgagttagcgaggagatcaatctaccatgcgacattccgtgatggagccagtggtggagttgctagcgtgtaccacgttggtcccgaaggatggacgaaactatcaggagatgatgttggggagctacactaccattactaccccgtggcaccagctaccgcagaacaagtcatggaggaagcaacagccgaataaaaatcctgtttagttttctaatcgttcactccctttcttgttgttgcattttgtggtagtatatactgagttgtctctagctgaagctttggtattctattttactgatctgaaatgttgctcgcggattattctctataagattctctttttctgc

SEQ ID NO: 22484 - protein, 274 aa, Arabidopsis thaliana
  peptide (1)..(274): Ceres Seq. ID no. 12322610
  misc_feature (54)..(236): Pfam Name: Proteasome A-type and B-type Pfam Description: Proteasome A-type and B-type
  misc_feature (16)..(260): Homolog of NCBI NO: 6755204 NR Description: proteasome (prosome, macropain) subunit, beta
  misc_feature (77)..(250): Homolog of NCBI NO: 14594931 NR Description: putative beta5 proteasome subunit [Nicotiana
  misc_feature (74)..(273): Homolog of NCBI NO: 16588840 NR Description: putative 20S proteasome beta subunit 5 [Prunus
  misc_feature (1)..(74): Homolog of NCBI NO: 3980264 NR Description: 20S proteasome beta subunit [Cicer arietinum]
  misc_feature (106)..(272): Homolog of NCBI NO: 3980264 NR Description: 20S proteasome beta subunit [Cicer arietinum]
  misc_feature (1)..(273): Homolog of NCBI NO: 8671510 NR Description: beta 5 subunit of 20S proteasome
  misc_feature (1)..(270): Homolog of NCBI NO: 3914430 NR Description: Proteasome subunit beta type 5 precursor (20S
  misc_feature (1)..(271): Homolog of NCBI NO: 15231544 NR Description: 26S proteasome beta subunit, putative
  misc_feature (1)..(274): Homolog of NCBI NO: 15292875 NR Description: putative proteasome epsilon chain precursor
  misc_feature (1)..(274): Homolog of NCBI NO: 15222152 NR Description: 20S proteasome beta subunit E1 (PBE1)
MKLDTSGFETSMPMIGFGSSSDMLDELSSVPSFDLPRTKEFDGFQKKAKDMLKHAKGTTTLAFIFKGGVMVAADSRASMGGYISSQSVKKIIEINPYMLGTMAGGAADCQFWHRNLGIKCRLHELANKRRISVSGASKLLANMLYSYRGMGLSVGTMIAGWDETGPGLYYVDNEGGRLKGDRFSVGSGSPYAYGVLDSGYKYDMSVEEASELARRSIYHATFRDGASGGVASVYHVGPEGWTKLSGDDVGELHYHYYPVAPATAEQVMEEATAE

SEQ ID NO: 22485 - protein, 263 aa, Arabidopsis thaliana
  peptide (1)..(263): Ceres Seq. ID no. 12322611
  misc_feature (43)..(225): Pfam Name: Proteasome A-type and B-type Pfam Description: Proteasome A-type and B-type
  misc_feature (5)..(249): Homolog of NCBI NO: 6755204 NR Description: proteasome (prosome, macropain) subunit, beta
  misc_feature (66)..(239): Homolog of NCBI NO: 14594931 NR Description: putative beta5 proteasome subunit [Nicotiana
  misc_feature (63)..(262): Homolog of NCBI NO: 16588840 NR Description: putative 20S proteasome beta subunit 5 [Prunus
  misc_feature (1)..(63): Homolog of NCBI NO: 3980264 NR Description: 20S proteasome beta subunit [Cicer arietinum]
  misc_feature (95)..(261): Homolog of NCBI NO: 3980264 NR Description: 20S proteasome beta subunit [Cicer arietinum]
  misc_feature (1)..(262): Homolog of NCBI NO: 8671510 NR Description: beta 5 subunit of 20S proteasome
  misc_feature (1)..(259): Homolog of NCBI NO: 3914430 NR Description: Proteasome subunit beta type 5 precursor (20S
  misc_feature (1)..(260): Homolog of NCBI NO: 15231544 NR Description: 26S proteasome beta subunit, putative
  misc_feature (1)..(263): Homolog of NCBI NO: 15292875 NR Description: putative proteasome epsilon chain precursor
  misc_feature (1)..(263): Homolog of NCBI NO: 15222152 NR Description: 20S proteasome beta subunit E1 (PBE1)
MPMIGFGSSSDMLDELSSVPSFDLPRTKEFDGFQKKAKDMLKHAKGTTTLAFIFKGGVMVAADSRASMGGYISSQSVKKIIEINPYMLGTMAGGAADCQFWHRNLGIKCRLHELANKRRISVSGASKLLANMLYSYRGMGLSVGTMIAGWDETGPGLYYVDNEGGRLKGDRFSVGSGSPYAYGVLDSGYKYDMSVEEASELARRSIYHATFRDGASGGVASVYHVGPEGWTKLSGDDVGELHYHYYPVAPATAEQVMEEATAE

SEQ ID NO: 22486 - protein, 261 aa, Arabidopsis thaliana
  peptide (1)..(261): Ceres Seq. ID no. 12322612
  misc_feature (41)..(223): Pfam Name: Proteasome A-type and B-type Pfam Description: Proteasome A-type and B-type
  misc_feature (3)..(247): Homolog of NCBI NO: 6755204 NR Description: proteasome (prosome, macropain) subunit, beta
  misc_feature (64)..(237): Homolog of NCBI NO: 14594931 NR Description: putative beta5 proteasome subunit [Nicotiana
  misc_feature (61)..(260): Homolog of NCBI NO: 16588840 NR Description: putative 20S proteasome beta subunit 5 [Prunus
  misc_feature (1)..(61): Homolog of NCBI NO: 3980264 NR Description: 20S proteasome beta subunit [Cicer arietinum]
  misc_feature (93)..(259): Homolog of NCBI NO: 3980264 NR Description: 20S proteasome beta subunit [Cicer arietinum]
  misc_feature (1)..(260): Homolog of NCBI NO: 8671510 NR Description: beta 5 subunit of 20S proteasome
  misc_feature (1)..(257): Homolog of NCBI NO: 3914430 NR Description: Proteasome subunit beta type 5 precursor (20S
  misc_feature (1)..(258): Homolog of NCBI NO: 15231544 NR Description: 26S proteasome beta subunit, putative
  misc_feature (1)..(261): Homolog of NCBI NO: 15292875 NR Description: putative proteasome epsilon chain precursor
  misc_feature (1)..(261): Homolog of NCBI NO: 15222152 NR Description: 20S proteasome beta subunit E1 (PBE1)
MIGFGSSSDMLDELSSVPSFDLPRTKEFDGFQKKAKDMLKHAKGTTTLAFIFKGGVMVAADSRASMGGYISSQSVKKIIEINPYMLGTMAGGAADCQFWHRNLGIKCRLHELANKRRISVSGASKLLANMLYSYRGMGLSVGTMIAGWDETGPGLYYVDNEGGRLKGDRFSVGSGSPYAYGVLDSGYKYDMSVEEASELARRSIYHATFRDGASGGVASVYHVGPEGWTKLSGDDVGELHYHYYPVAPATAEQVMEEATAE

SEQ ID NO: 22487 - DNA, 775 bp, Arabidopsis thaliana; identical to SEQ ID NO: 21631
  misc_feature (1)..(775): Ceres Seq. ID no. 12332713
  misc_feature: MA Experiment ID: 108463 Result: Down-regulated in Transcription
  misc_feature: MA Experiment 108463 PARAMETER Experiment Name: At_Germinating_Seeds_cDNA_P Parameter: Age (day) Value: 3 vs. 0
  misc_feature: MA Experiment 108463 PARAMETER Experiment Name: At_Germinating_Seeds_cDNA_P Parameter: Tissue Value: Germinating Seeds
  misc_feature: MA Experiment ID: 108464 Result: Down-regulated in Transcription
  misc_feature: MA Experiment 108464 PARAMETER Experiment Name: At_Germinating_Seeds_cDNA_P Parameter: Age (day) Value: 4 vs. 0
  misc_feature: MA Experiment 108464 PARAMETER Experiment Name: At_Germinating_Seeds_cDNA_P Parameter: Tissue Value: Germinating Seeds
  misc_feature: MA Experiment ID: 108608 Result: Up-regulated in Transcription
  misc_feature: MA Experiment 108608 PARAMETER Experiment Name: At_100uM_ABA_cDNA_P Parameter: Timepoint (hr) Value: 1
  misc_feature: MA Experiment 108608 PARAMETER Experiment Name: At_100uM_ABA_cDNA_P Parameter: Tissue Value: Aerial
  misc_feature: MA Experiment 108608 PARAMETER Experiment Name: At_100uM_ABA_cDNA_P Parameter: Treatment Value: 100uM ABA vs. No Treatment
  misc_feature: MA Experiment ID: 108668 Result: Up-regulated in Transcription
  misc_feature: MA Experiment 108668 PARAMETER Experiment Name: At_2mM_SA_cDNA_P Parameter: Plant Line Value: WS
  misc_feature: MA Experiment 108668 PARAMETER Experiment Name: At_2mM_SA_cDNA_P Parameter: Timepoint (hr) Value: 6
  misc_feature: MA Experiment 108668 PARAMETER Experiment Name: At_2mM_SA_cDNA_P Parameter: Treatment Value: 2mM SA vs. No Treatment
  misc_feature: MA Experiment ID: 20000070 Result: Up-regulated in Transcription
  misc_feature: MA Experiment 20000070 PARAMETER Experiment Name: At_100uM_ABA_Mutants_cDNA_P Parameter: Plant Line Value: CS24
  misc_feature: MA Experiment 20000070 PARAMETER Experiment Name: At_100uM_ABA_Mutants_cDNA_P Parameter: Timepoint (hr) Value: 6
  misc_feature: MA Experiment 20000070 PARAMETER Experiment Name: At_100uM_ABA_Mutants_cDNA_P Parameter: Tissue Value: Aerial
  misc_feature: MA Experiment 20000070 PARAMETER Experiment Name: At_100uM_ABA_Mutants_cDNA_P Parameter: Treatment Value: 100uM ABA vs. No Treatment
  misc_feature: MA Experiment ID: 20000090 Result: Up-regulated in Transcription
  misc_feature: MA Experiment ID: 20000144 Result: Down-regulated in Transcription
  misc_feature: MA Experiment 20000144 PARAMETER Experiment Name: At_42deg_Heat_cDNA_P Parameter: Temperature (deg C) Value: 42 vs. 22
  misc_feature: MA Experiment 20000144 PARAMETER Experiment Name: At_42deg_Heat_cDNA_P Parameter: Timepoint (hr) Value: 1
  misc_feature: MA Experiment 20000144 PARAMETER Experiment Name: At_42deg_Heat_cDNA_P Parameter: Tissue Value: Aerial
  misc_feature: MA Experiment ID: 20000166 Result: Up-regulated in Transcription
  misc_feature: MA Experiment 20000166 PARAMETER Experiment Name: At_100uM_ABA_P Parameter: Age (day) Value: 14
  misc_feature: MA Experiment 20000166 PARAMETER Experiment Name: At_100uM_ABA_P Parameter: Organism Value: A. thaliana
  misc_feature: MA Experiment 20000166 PARAMETER Experiment Name: At_100uM_ABA_P Parameter: Plant Line Value: WS
  misc_feature: MA Experiment 20000166 PARAMETER Experiment Name: At_100uM_ABA_P Parameter: Timepoint (hr) Value: 1
  misc_feature: MA Experiment 20000166 PARAMETER Experiment Name: At_100uM_ABA_P Parameter: Tissue Value: Aerial
  misc_feature: MA Experiment 20000166 PARAMETER Experiment Name: At_100uM_ABA_P Parameter: Treatment Value: 100uM ABA vs. No Treatment
  misc_feature: MA Experiment ID: 20000171 Result: Down-regulated in Transcription
  misc_feature: MA Experiment 20000171 PARAMETER Experiment Name: At_42deg_Heat_P Parameter: Age (day) Value: 14
  misc_feature: MA Experiment 20000171 PARAMETER Experiment Name: At_42deg_Heat_P Parameter: Organism Value: A. thaliana
  misc_feature: MA Experiment 20000171 PARAMETER Experiment Name: At_42deg_Heat_P Parameter: Plant Line Value: WS
  misc_feature: MA Experiment 20000171 PARAMETER Experiment Name: At_42deg_Heat_P Parameter: Temperature (deg C) Value: 42 vs. 22
  misc_feature: MA Experiment 20000171 PARAMETER Experiment Name: At_42deg_Heat_P Parameter: Timepoint (hr) Value: 1
  misc_feature: MA Experiment 20000171 PARAMETER Experiment Name: At_42deg_Heat_P Parameter: Tissue Value: Aerial
  misc_feature: MA Experiment ID: 20000173 Result: Down-regulated in Transcription
  misc_feature: MA Experiment 20000173 PARAMETER Experiment Name: At_42deg_Heat_P Parameter: Age (day) Value: 14
  misc_feature: MA Experiment 20000173 PARAMETER Experiment Name: At_42deg_Heat_P Parameter: Organism Value: A. thaliana
  misc_feature: MA Experiment 20000173 PARAMETER Experiment Name: At_42deg_Heat_P Parameter: Plant Line Value: WS
  misc_feature: MA Experiment 20000173 PARAMETER Experiment Name: At_42deg_Heat_P Parameter: Temperature (deg C) Value: 42 vs. 22
  misc_feature: MA Experiment 20000173 PARAMETER Experiment Name: At_42deg_Heat_P Parameter: Timepoint (hr) Value: 6
  misc_feature: MA Experiment 20000173 PARAMETER Experiment Name: At_42deg_Heat_P Parameter: Tissue Value: Aerial
  misc_feature: MA Experiment ID: 20000182 Result: Up-regulated in Transcription
  misc_feature: MA Experiment 20000182 PARAMETER Experiment Name: At_2mM_SA_P Parameter: Age (day) Value: 14
  misc_feature: MA Experiment 20000182 PARAMETER Experiment Name: At_2mM_SA_P Parameter: Organism Value: A. thaliana
  misc_feature: MA Experiment 20000182 PARAMETER Experiment Name: At_2mM_SA_P Parameter: Plant Line Value: WS
  misc_feature: MA Experiment 20000182 PARAMETER Experiment Name: At_2mM_SA_P Parameter: Timepoint (hr) Value: 6
  misc_feature: MA Experiment 20000182 PARAMETER Experiment Name: At_2mM_SA_P Parameter: Tissue Value: Aerial
  misc_feature: MA Experiment 20000182 PARAMETER Experiment Name: At_2mM_SA_P Parameter: Treatment Value: 2mM SA vs. No Treatment
  misc_feature: MA Experiment ID: 20000185 Result: Up-regulated in Transcription
  misc_feature: MA Experiment 20000185 PARAMETER Experiment Name: At_Roots__P Parameter: Age (day) Value: 7 vs. 21
  misc_feature: MA Experiment 20000185 PARAMETER Experiment Name: At_Roots__P Parameter: Organism Value: A. thaliana
  misc_feature: MA Experiment 20000185 PARAMETER Experiment Name: At_Roots__P Parameter: Tissue Value: Roots vs. Whole Plant
  misc_feature: MA Experiment ID: 20000227 Result: Up-regulated in Transcription
  misc_feature: MA Experiment 20000227 PARAMETER Experiment Name: At_Root-Tips-vs-Tops_P Parameter: Tissue Value: Root Tips vs. Root Tops
  misc_feature: MA Experiment ID: 20000438 Result: Down-regulated in Transcription
  misc_feature: MA Experiment 20000438 PARAMETER Experiment Name: At_Shoots__P Parameter: Age (day) Value: 14
  misc_feature: MA Experiment 20000438 PARAMETER Experiment Name: At_Shoots__P Parameter: Tissue Value: Shoots vs. Whole Plant
  misc_feature: MA Experiment ID: 20000527 Result: Down-regulated in Transcription
  misc_feature: MA Experiment 20000527 PARAMETER Experiment Name: At_10percent_PEG_P Parameter: Age (day) Value: 20
  misc_feature: MA Experiment 20000527 PARAMETER Experiment Name: At_10percent_PEG_P Parameter: Organism Value: A. thaliana
  misc_feature: MA Experiment 20000527 PARAMETER Experiment Name: At_10percent_PEG_P Parameter: Plant Line Value: WS
  misc_feature: MA Experiment 20000527 PARAMETER Experiment Name: At_10percent_PEG_P Parameter: Timepoint (day) Value: 20
  misc_feature: MA Experiment 20000527 PARAMETER Experiment Name: At_10percent_PEG_P Parameter: Tissue Value: Whole Plant
  misc_feature: MA Experiment 20000527 PARAMETER Experiment Name: At_10percent_PEG_P Parameter: Treatment Value: 10percent PEG vs. No Treatment

SEQ ID NO: 22488 - protein, 213 aa, Arabidopsis thaliana; identical to SEQ ID NO: 21632
  peptide (1)..(213): Ceres Seq. ID no. 12332714
  misc_feature (72)..(180): Pfam Name: Thioredoxin Pfam Description: Thioredoxin
  misc_feature (72)..(180): Pfam Name: Thioredoxin Pfam Description: Thioredoxin
  misc_feature (1)..(213): Homolog of NCBI NO: 5902592 NR Description: protein disulfide isomerase precursor
  misc_feature (1)..(213): Homolog of NCBI NO: 7437394 NR Description: protein disulfide-isomerase (EC 5.3.4.1) RB60 -
  misc_feature (1)..(213): Homolog of NCBI NO: 20805287 NR Description: protein disulfide isomerase-like PDI-M
  misc_feature (1)..(193): Homolog of NCBI NO: 20805285 NR Description: protein disulfide isomerase-like PDI-H
  misc_feature (1)..(161): Homolog of NCBI NO: 30697408 NR Description: protein disulfide isomerase family [Arabidopsis
  misc_feature (1)..(213): Homolog of NCBI NO: 5902592 NR Description: protein disulfide isomerase precursor
  misc_feature (1)..(213): Homolog of NCBI NO: 20805287 NR Description: protein disulfide isomerase-like PDI-M
  misc_feature (1)..(161): Homolog of NCBI NO: 30697408 NR Description: protein disulfide isomerase family [Arabidopsis
  misc_feature (1)..(213): Homolog of NCBI NO: 22331799 NR Description: protein disulfide-isomerase-like protein
  misc_feature (1)..(213): Homolog of NCBI NO: 7437396 NR Description: protein disulfide-isomerase homolog F28P10.60 -
  misc_feature (1)..(213): Homolog of NCBI NO: 28140231 NR Description: protein disulphide isomerase [Elaeis guineensis]
  misc_feature (1)..(211): Homolog of NCBI NO: 21593313 NR Description: protein disulfide isomerase precursor-like
  misc_feature (1)..(211): Homolog of NCBI NO: 30697404 NR Description: protein disulfide isomerase family [Arabidopsis
  misc_feature (1)..(193): Homolog of NCBI NO: 20805285 NR Description: protein disulfide isomerase-like PDI-H
  misc_feature (1)..(213): Homolog of NCBI NO: 7437394 NR Description: protein disulfide-isomerase (EC 5.3.4.1) RB60 -
  misc_feature (1)..(211): Homolog of NCBI NO: 30697404 NR Description: protein disulfide isomerase family [Arabidopsis
  misc_feature (1)..(211): Homolog of NCBI NO: 21593313 NR Description: protein disulfide isomerase precursor-like
  misc_feature (1)..(213): Homolog of NCBI NO: 28140231 NR Description: protein disulphide isomerase [Elaeis guineensis]
  misc_feature (1)..(213): Homolog of NCBI NO: 7437396 NR Description: protein disulfide-isomerase homolog F28P10.60 -
  misc_feature (1)..(213): Homolog of NCBI NO: 22331799 NR Description: protein disulfide-isomerase-like protein

SEQ ID NO: 22489 - protein, 184 aa, Arabidopsis thaliana; identical to SEQ ID NO: 21633
  peptide (1)..(184): Ceres Seq. ID no. 12332715
  misc_feature (43)..(151): Pfam Name: Thioredoxin Pfam Description: Thioredoxin
  misc_feature (43)..(151): Pfam Name: Thioredoxin Pfam Description: Thioredoxin
  misc_feature (1)..(184): Homolog of NCBI NO: 5902592 NR Description: protein disulfide isomerase precursor
  misc_feature (1)..(184): Homolog of NCBI NO: 7437394 NR Description: protein disulfide-isomerase (EC 5.3.4.1) RB60 -
  misc_feature (1)..(184): Homolog of NCBI NO: 20805287 NR Description: protein disulfide isomerase-like PDI-M
  misc_feature (1)..(164): Homolog of NCBI NO: 20805285 NR Description: protein disulfide isomerase-like PDI-H
  misc_feature (1)..(132): Homolog of NCBI NO: 30697408 NR Description: protein disulfide isomerase family [Arabidopsis
  misc_feature (1)..(184): Homolog of NCBI NO: 28140231 NR Description: protein disulphide isomerase [Elaeis guineensis]
  misc_feature (1)..(184): Homolog of NCBI NO: 5902592 NR Description: protein disulfide isomerase precursor
  misc_feature (1)..(182): Homolog of NCBI NO: 21593313 NR Description: protein disulfide isomerase precursor-like
  misc_feature (1)..(182): Homolog of NCBI NO: 30697404 NR Description: protein disulfide isomerase family [Arabidopsis
  misc_feature (1)..(132): Homolog of NCBI NO: 30697408 NR Description: protein disulfide isomerase family [Arabidopsis
  misc_feature (1)..(164): Homolog of NCBI NO: 20805285 NR Description: protein disulfide isomerase-like PDI-H
  misc_feature (1)..(184): Homolog of NCBI NO: 20805287 NR Description: protein disulfide isomerase-like PDI-M
  misc_feature (1)..(184): Homolog of NCBI NO: 7437394 NR Description: protein disulfide-isomerase (EC 5.3.4.1) RB60 -
  misc_feature (1)..(184): Homolog of NCBI NO: 22331799 NR Description: protein disulfide-isomerase-like protein
  misc_feature (1)..(184): Homolog of NCBI NO: 7437396 NR Description: protein disulfide-isomerase homolog F28P10.60 -
  misc_feature (1)..(182): Homolog of NCBI NO: 30697404 NR Description: protein disulfide isomerase family [Arabidopsis
  misc_feature (1)..(182): Homolog of NCBI NO: 21593313 NR Description: protein disulfide isomerase precursor-like
  misc_feature (1)..(184): Homolog of NCBI NO: 28140231 NR Description: protein disulphide isomerase [Elaeis guineensis]
  misc_feature (1)..(184): Homolog of NCBI NO: 7437396 NR Description: protein disulfide-isomerase homolog F28P10.60 -
  misc_feature (1)..(184): Homolog of NCBI NO: 22331799 NR Description: protein disulfide-isomerase-like protein

SEQ ID NO: 22490 - DNA, 1047 bp, Arabidopsis thaliana
  misc_feature (1)..(1047): Ceres Seq. ID no. 12332404
  misc_feature: MA Experiment ID: 108461 Result: Up-regulated in Transcription
  misc_feature: MA Experiment 108461 PARAMETER Experiment Name: At_Germinating_Seeds_cDNA_P Parameter: Age (day) Value: 1 vs. 0
  misc_feature: MA Experiment 108461 PARAMETER Experiment Name: At_Germinating_Seeds_cDNA_P Parameter: Tissue Value: Germinating Seeds
  misc_feature: MA Experiment ID: 108462 Result: Up-regulated in Transcription
  misc_feature: MA Experiment 108462 PARAMETER Experiment Name: At_Germinating_Seeds_cDNA_P Parameter: Age (day) Value: 2 vs. 0
  misc_feature: MA Experiment 108462 PARAMETER Experiment Name: At_Germinating_Seeds_cDNA_P Parameter: Tissue Value: Germinating Seeds
  misc_feature: MA Experiment ID: 108463 Result: Up-regulated in Transcription
  misc_feature: MA Experiment 108463 PARAMETER Experiment Name: At_Germinating_Seeds_cDNA_P Parameter: Age (day) Value: 3 vs. 0
  misc_feature: MA Experiment 108463 PARAMETER Experiment Name: At_Germinating_Seeds_cDNA_P Parameter: Tissue Value: Germinating Seeds
  misc_feature: MA Experiment ID: 108464 Result: Up-regulated in Transcription
  misc_feature: MA Experiment 108464 PARAMETER Experiment Name: At_Germinating_Seeds_cDNA_P Parameter: Age (day) Value: 4 vs. 0
  misc_feature: MA Experiment 108464 PARAMETER Experiment Name: At_Germinating_Seeds_cDNA_P Parameter: Tissue Value: Germinating Seeds
  misc_feature: MA Experiment ID: 108488 Result: Up-regulated in Transcription
  misc_feature: MA Experiment ID: 108489 Result: Down-regulated in Transcription
  misc_feature: MA Experiment ID: 108501 Result: Up-regulated in Transcription
  misc_feature: MA Experiment 108501 PARAMETER Experiment Name: At_ap2_floral_buds_cDNA_P Parameter: Plant Line Value: ap2 (Ler.)
  misc_feature: MA Experiment 108501 PARAMETER Experiment Name: At_ap2_floral_buds_cDNA_P Parameter: Tissue Value: Closed Flower
  misc_feature: MA Experiment ID: 108573 Result: Down-regulated in Transcription
  misc_feature: MA Experiment 108573 PARAMETER Experiment Name: At_Drought_cDNA_P Parameter: Timepoint (hr) Value: 6
  misc_feature: MA Experiment 108573 PARAMETER Experiment Name: At_Drought_cDNA_P Parameter: Tissue Value: Aerial
  misc_feature: MA Experiment 108573 PARAMETER Experiment Name: At_Drought_cDNA_P Parameter: Treatment Value: Drought vs. No Drought
  misc_feature: MA Experiment ID: 108577 Result: Up-regulated in Transcription
  misc_feature: MA Experiment 108577 PARAMETER Experiment Name: At_42deg_Heat_cDNA_P Parameter: Temperature (deg C) Value: 42 vs. 22
  misc_feature: MA Experiment 108577 PARAMETER Experiment Name: At_42deg_Heat_cDNA_P Parameter: Timepoint (hr) Value: 6
  misc_feature: MA Experiment 108577 PARAMETER Experiment Name: At_42deg_Heat_cDNA_P Parameter: Tissue Value: Aerial
  misc_feature: MA Experiment ID: 108585 Result: Down-regulated in Transcription
  misc_feature: MA Experiment 108585 PARAMETER Experiment Name: At_5mM_NaNP_cDNA_P Parameter: Timepoint (hr) Value: 6
  misc_feature: MA Experiment 108585 PARAMETER Experiment Name: At_5mM_NaNP_cDNA_P Parameter: Tissue Value: Aerial
  misc_feature: MA Experiment 108585 PARAMETER Experiment Name: At_5mM_NaNP_cDNA_P Parameter: Treatment Value: null
  misc_feature: MA Experiment ID: 108594 Result: Down-regulated in Transcription
  misc_feature: MA Experiment 108594 PARAMETER Experiment Name: At_Ler-rhl_Root_cDNA_P Parameter: Plant Line Value: null
  misc_feature: MA Experiment ID: 108595 Result: Down-regulated in Transcription
  misc_feature: MA Experiment 108595 PARAMETER Experiment Name: At_Ler-pi_Ovule_cDNA_P Parameter: Plant Line Value: null
  misc_feature: MA Experiment ID: 20000069 Result: Down-regulated in Transcription
  misc_feature: MA Experiment 20000069 PARAMETER Experiment Name: At_100uM_ABA_Mutants_cDNA_P Parameter: Plant Line Value: CS23
  misc_feature: MA Experiment 20000069 PARAMETER Experiment Name: At_100uM_ABA_Mutants_cDNA_P Parameter: Timepoint (hr) Value: 6
  misc_feature: MA Experiment 20000069 PARAMETER Experiment Name: At_100uM_ABA_Mutants_cDNA_P Parameter: Tissue Value: Aerial
  misc_feature: MA Experiment 20000069 PARAMETER Experiment Name: At_100uM_ABA_Mutants_cDNA_P Parameter: Treatment Value: 100uM ABA vs. No Treatment
  misc_feature: MA Experiment ID: 20000070 Result: Down-regulated in Transcription
  misc_feature: MA Experiment 20000070 PARAMETER Experiment Name: At_100uM_ABA_Mutants_cDNA_P Parameter: Plant Line Value: CS24
  misc_feature: MA Experiment 20000070 PARAMETER Experiment Name: At_100uM_ABA_Mutants_cDNA_P Parameter: Timepoint (hr) Value: 6
  misc_feature: MA Experiment 20000070 PARAMETER Experiment Name: At_100uM_ABA_Mutants_cDNA_P Parameter: Tissue Value: Aerial
  misc_feature: MA Experiment 20000070 PARAMETER Experiment Name: At_100uM_ABA_Mutants_cDNA_P Parameter: Treatment Value: 100uM ABA vs. No Treatment
  misc_feature: MA Experiment ID: 20000071 Result: Down-regulated in Transcription
  misc_feature: MA Experiment 20000071 PARAMETER Experiment Name: At_100uM_ABA_Mutants_cDNA_P Parameter: Plant Line Value: CS8104
  misc_feature: MA Experiment 20000071 PARAMETER Experiment Name: At_100uM_ABA_Mutants_cDNA_P Parameter: Timepoint (hr) Value: 6
  misc_feature: MA Experiment 20000071 PARAMETER Experiment Name: At_100uM_ABA_Mutants_cDNA_P Parameter: Tissue Value: Aerial
  misc_feature: MA Experiment 20000071 PARAMETER Experiment Name: At_100uM_ABA_Mutants_cDNA_P Parameter: Treatment Value: 100uM ABA vs. No Treatment
  misc_feature: MA Experiment ID: 20000072 Result: Down-regulated in Transcription
  misc_feature: MA Experiment 20000072 PARAMETER Experiment Name: At_100uM_ABA_Mutants_cDNA_P Parameter: Plant Line Value: CS8105
  misc_feature: MA Experiment 20000072 PARAMETER Experiment Name: At_100uM_ABA_Mutants_cDNA_P Parameter: Timepoint (hr) Value: 6
  misc_feature: MA Experiment 20000072 PARAMETER Experiment Name: At_100uM_ABA_Mutants_cDNA_P Parameter: Tissue Value: Aerial
  misc_feature: MA Experiment 20000072 PARAMETER Experiment Name: At_100uM_ABA_Mutants_cDNA_P Parameter: Treatment Value: 100uM ABA vs. No Treatment
  misc_feature: MA Experiment ID: 20000086 Result: Down-regulated in Transcription
  misc_feature: MA Experiment 20000086 PARAMETER Experiment Name: At_100uM_ABA_Mutants_cDNA_P Parameter: Plant Line Value: CS22
  misc_feature: MA Experiment 20000086 PARAMETER Experiment Name: At_100uM_ABA_Mutants_cDNA_P Parameter: Timepoint (hr) Value: 6
  misc_feature: MA Experiment 20000086 PARAMETER Experiment Name: At_100uM_ABA_Mutants_cDNA_P Parameter: Tissue Value: Aerial
  misc_feature: MA Experiment 20000086 PARAMETER Experiment Name: At_100uM_ABA_Mutants_cDNA_P Parameter: Treatment Value: 100uM ABA vs. No Treatment
  misc_feature: MA Experiment ID: 20000087 Result: Down-regulated in Transcription
  misc_feature: MA Experiment 20000087 PARAMETER Experiment Name: At_100uM_ABA_Mutants_cDNA_P Parameter: Plant Line Value: WS
  misc_feature: MA Experiment 20000087 PARAMETER Experiment Name: At_100uM_ABA_Mutants_cDNA_P Parameter: Timepoint (hr) Value: 6
  misc_feature: MA Experiment 20000087 PARAMETER Experiment Name: At_100uM_ABA_Mutants_cDNA_P Parameter: Tissue Value: Aerial
  misc_feature: MA Experiment 20000087 PARAMETER Experiment Name: At_100uM_ABA_Mutants_cDNA_P Parameter: Treatment Value: 100uM ABA vs. No Treatment
  misc_feature: MA Experiment ID: 20000088 Result: Down-regulated in Transcription
  misc_feature: MA Experiment 20000088 PARAMETER Experiment Name: At_100uM_ABA_Mutants_cDNA_P Parameter: Plant Line Value: Landsberg
  misc_feature: MA Experiment 20000088 PARAMETER Experiment Name: At_100uM_ABA_Mutants_cDNA_P Parameter: Timepoint (hr) Value: 6
  misc_feature: MA Experiment 20000088 PARAMETER Experiment Name: At_100uM_ABA_Mutants_cDNA_P Parameter: Tissue Value: Aerial
  misc_feature: MA Experiment 20000088 PARAMETER Experiment Name: At_100uM_ABA_Mutants_cDNA_P Parameter: Treatment Value: 100uM ABA vs. No Treatment
  misc_feature: MA Experiment ID: 20000089 Result: Down-regulated in Transcription
  misc_feature: MA Experiment ID: 20000090 Result: Down-regulated in Transcription
  misc_feature: MA Experiment ID: 20000111 Result: Up-regulated in Transcription
  misc_feature: MA Experiment 20000111 PARAMETER Experiment Name: At_42deg_Heat_cDNA_P Parameter: Temperature (deg C) Value: 42 vs. 22
  misc_feature: MA Experiment 20000111 PARAMETER Experiment Name: At_42deg_Heat_cDNA_P Parameter: Timepoint (hr) Value: 6
  misc_feature: MA Experiment 20000111 PARAMETER Experiment Name: At_42deg_Heat_cDNA_P Parameter: Tissue Value: Aerial
  misc_feature: MA Experiment ID: 20000113 Result: Up-regulated in Transcription
  misc_feature: MA Experiment 20000113 PARAMETER Experiment Name: At_42deg_Heat_cDNA_P Parameter: Temperature (deg C) Value: 42 vs. 22
  misc_feature: MA Experiment 20000113 PARAMETER Experiment Name: At_42deg_Heat_cDNA_P Parameter: Timepoint (hr) Value: 8
  misc_feature: MA Experiment 20000113 PARAMETER Experiment Name: At_42deg_Heat_cDNA_P Parameter: Tissue Value: Aerial
  misc_feature: MA Experiment ID: 20000117 Result: Down-regulated in Transcription
  misc_feature: MA Experiment 20000117 PARAMETER Experiment Name: At_100uM_ABA_Mutants_cDNA_P Parameter: Plant Line Value: Columbia
  misc_feature: MA Experiment 20000117 PARAMETER Experiment Name: At_100uM_ABA_Mutants_cDNA_P Parameter: Timepoint (hr) Value: 6
  misc_feature: MA Experiment 20000117 PARAMETER Experiment Name: At_100uM_ABA_Mutants_cDNA_P Parameter: Tissue Value: Aerial
  misc_feature: MA Experiment 20000117 PARAMETER Experiment Name: At_100uM_ABA_Mutants_cDNA_P Parameter: Treatment Value: 100uM ABA vs. No Treatment
  misc_feature: MA Experiment ID: 20000173 Result: Up-regulated in Transcription
  misc_feature: MA Experiment 20000173 PARAMETER Experiment Name: At_42deg_Heat_P Parameter: Age (day) Value: 14
  misc_feature: MA Experiment 20000173 PARAMETER Experiment Name: At_42deg_Heat_P Parameter: Organism Value: A. thaliana
  misc_feature: MA Experiment 20000173 PARAMETER Experiment Name: At_42deg_Heat_P Parameter: Plant Line Value: WS
  misc_feature: MA Experiment 20000173 PARAMETER Experiment Name: At_42deg_Heat_P Parameter: Temperature (deg C) Value: 42 vs. 22
  misc_feature: MA Experiment 20000173 PARAMETER Experiment Name: At_42deg_Heat_P Parameter: Timepoint (hr) Value: 6
  misc_feature: MA Experiment 20000173 PARAMETER Experiment Name: At_42deg_Heat_P Parameter: Tissue Value: Aerial
  misc_feature: MA Experiment ID: 20000179 Result: Up-regulated in Transcription
  misc_feature: MA Experiment 20000179 PARAMETER Experiment Name: At_Germinating_Seeds_P Parameter: Age (hr) Value: 6 vs. 0
  misc_feature: MA Experiment 20000179 PARAMETER Experiment Name: At_Germinating_Seeds_P Parameter: Tissue Value: Germinating Seeds
  misc_feature: MA Experiment ID: 20000180 Result: Up-regulated in Transcription
  misc_feature: MA Experiment 20000180 PARAMETER Experiment Name: At_Germinating_Seeds_P Parameter: Age (hr) Value: 24 vs. 0
  misc_feature: MA Experiment 20000180 PARAMETER Experiment Name: At_Germinating_Seeds_P Parameter: Tissue Value: Germinating Seeds
  misc_feature: MA Experiment ID: 20000184 Result: Up-regulated in Transcription
  misc_feature: MA Experiment 20000184 PARAMETER Experiment Name: At_Shoots__P Parameter: Age (day) Value: 7
  misc_feature: MA Experiment 20000184 PARAMETER Experiment Name: At_Shoots__P Parameter: Tissue Value: Shoots vs. Whole Plant
  misc_feature: MA Experiment ID: 20000185 Result: Up-regulated in Transcription
  misc_feature: MA Experiment 20000185 PARAMETER Experiment Name: At_Roots__P Parameter: Age (day) Value: 7 vs. 21
  misc_feature: MA Experiment 20000185 PARAMETER Experiment Name: At_Roots__P Parameter: Organism Value: A. thaliana
  misc_feature: MA Experiment 20000185 PARAMETER Experiment Name: At_Roots__P Parameter: Tissue Value: Roots vs. Whole Plant
  misc_feature: MA Experiment ID: 20000224 Result: Down-regulated in Transcription
  misc_feature: MA Experiment ID: 20000234 Result: Up-regulated in Transcription
  misc_feature: MA Experiment 20000234 PARAMETER Experiment Name: At_Siliques_P Parameter: Age (day) Value: 21
  misc_feature: MA Experiment 20000234 PARAMETER Experiment Name: At_Siliques_P Parameter: Organism Value: A. thaliana
  misc_feature: MA Experiment 20000234 PARAMETER Experiment Name: At_Siliques_P Parameter: Plant Line Value: WS
  misc_feature: MA Experiment 20000234 PARAMETER Experiment Name: At_Siliques_P Parameter: Tissue Value: Less Than 5mm Siliques vs. Whole Plant
  misc_feature: MA Experiment ID: 20000235 Result: Up-regulated in Transcription
  misc_feature: MA Experiment 20000235 PARAMETER Experiment Name: At_Siliques_P Parameter: Age (day) Value: 21
  misc_feature: MA Experiment 20000235 PARAMETER Experiment Name: At_Siliques_P Parameter: Organism Value: A. thaliana
  misc_feature: MA Experiment 20000235 PARAMETER Experiment Name: At_Siliques_P Parameter: Plant Line Value: WS
  misc_feature: MA Experiment 20000235 PARAMETER Experiment Name: At_Siliques_P Parameter: Tissue Value: 5-10mm Siliques vs. Whole Plant
  misc_feature: MA Experiment ID: 20000264 Result: Up-regulated in Transcription
  misc_feature: MA Experiment 20000264 PARAMETER Experiment Name: At_Open_Flower_P Parameter: Age (day) Value: 21
  misc_feature: MA Experiment 20000264 PARAMETER Experiment Name: At_Open_Flower_P Parameter: Plant Line Value: WS
  misc_feature: MA Experiment 20000264 PARAMETER Experiment Name: At_Open_Flower_P Parameter: Tissue Value: Open Flower vs. Whole Plant
  misc_feature: MA Experiment ID: 20000286 Result: Up-regulated in Transcription
  misc_feature: MA Experiment 20000286 PARAMETER Experiment Name: At_Open_Flower_P Parameter: Age (day) Value: 21
  misc_feature: MA Experiment 20000286 PARAMETER Experiment Name: At_Open_Flower_P Parameter: Plant Line Value: WS
  misc_feature: MA Experiment 20000286 PARAMETER Experiment Name: At_Open_Flower_P Parameter: Tissue Value: Half Open vs. Whole Plant
  misc_feature: MA Experiment ID: 20000438 Result: Up-regulated in Transcription
  misc_feature: MA Experiment 20000438 PARAMETER Experiment Name: At_Shoots__P Parameter: Age (day) Value: 14
  misc_feature: MA Experiment 20000438 PARAMETER Experiment Name: At_Shoots__P Parameter: Tissue Value: Shoots vs. Whole Plant
  misc_feature: MA Experiment ID: 20000439 Result: Up-regulated in Transcription
  misc_feature: MA Experiment 20000439 PARAMETER Experiment Name: At_Roots__P Parameter: Age (day) Value: 14 vs. 21
  misc_feature: MA Experiment 20000439 PARAMETER Experiment Name: At_Roots__P Parameter: Organism Value: A. thaliana
  misc_feature: MA Experiment 20000439 PARAMETER Experiment Name: At_Roots__P Parameter: Tissue Value: Roots vs. Whole Plant
  misc_feature: MA Experiment ID: 20000445 Result: Up-regulated in Transcription
  misc_feature: MA Experiment 20000445 PARAMETER Experiment Name: At_100uM_NAA__P Parameter: Age (day) Value: 14
  misc_feature: MA Experiment 20000445 PARAMETER Experiment Name: At_100uM_NAA__P Parameter: Organism Value: A. thaliana
  misc_feature: MA Experiment 20000445 PARAMETER Experiment Name: At_100uM_NAA__P Parameter: Plant Line Value: WS
  misc_feature: MA Experiment 20000445 PARAMETER Experiment Name: At_100uM_NAA__P Parameter: Timepoint (hr) Value: 6
  misc_feature: MA Experiment 20000445 PARAMETER Experiment Name: At_100uM_NAA__P Parameter: Tissue Value: Aerial
  misc_feature: MA Experiment 20000445 PARAMETER Experiment Name: At_100uM_NAA__P Parameter: Treatment Value: 100uM NAA vs. No Treatment
  misc_feature: MA Experiment ID: 20000495 Result: Down-regulated in Transcription
  misc_feature: MA Experiment 20000495 PARAMETER Experiment Name: At_Guard_Cells_P Parameter: Harvest Date Value: 8/2/2002
  misc_feature: MA Experiment 20000495 PARAMETER Experiment Name: At_Guard_Cells_P Parameter: Organism Value: A. thaliana
  misc_feature: MA Experiment 20000495 PARAMETER Experiment Name: At_Guard_Cells_P Parameter: Tissue Value: Guard Cells vs. Leaves
  misc_feature: MA Experiment ID: 20000496 Result: Down-regulated in Transcription
  misc_feature: MA Experiment 20000496 PARAMETER Experiment Name: At_Guard_Cells_P Parameter: Harvest Date Value: 7/19/2002
  misc_feature: MA Experiment 20000496 PARAMETER Experiment Name: At_Guard_Cells_P Parameter: Organism Value: Canola
  misc_feature: MA Experiment 20000496 PARAMETER Experiment Name: At_Guard_Cells_P Parameter: Tissue Value: Guard Cells vs. Leaves
  misc_feature: MA Experiment ID: 20000794 Result: Up-regulated in Transcription
  misc_feature: MA Experiment 20000794 PARAMETER Experiment Name: At_Petals_P Parameter: Age (day) Value: 23-25 days
  misc_feature: MA Experiment 20000794 PARAMETER Experiment Name: At_Petals_P Parameter: Plant Line Value: WS
  misc_feature: MA Experiment 20000794 PARAMETER Experiment Name: At_Petals_P Parameter: Tissue Value: Petals vs. Whole plant
  misc_feature: MA Experiment ID: 20001247 Result: Up-regulated in Transcription
  misc_feature: MA Experiment 20001247 PARAMETER Experiment Name: At_Far-red-induction_P Parameter: Age (day) Value: 7
  misc_feature: MA Experiment 20001247 PARAMETER Experiment Name: At_Far-red-induction_P Parameter: Light Value: Far-red vs. White
  misc_feature: MA Experiment 20001247 PARAMETER Experiment Name: At_Far-red-induction_P Parameter: Organism Value: A. thaliana
  misc_feature: MA Experiment 20001247 PARAMETER Experiment Name: At_Far-red-induction_P Parameter: Plant Line Value: Columbia
  misc_feature: MA Experiment 20001247 PARAMETER Experiment Name: At_Far-red-induction_P Parameter: Timepoint (hr) Value: 1
  misc_feature: MA Experiment 20001247 PARAMETER Experiment Name: At_Far-red-induction_P Parameter: Tissue Value: Whole Plant
  misc_feature: MA Experiment ID: 20001248 Result: Down-regulated in Transcription
  misc_feature: MA Experiment 20001248 PARAMETER Experiment Name: At_Far-red-induction_P Parameter: Age (day) Value: 7
  misc_feature: MA Experiment 20001248 PARAMETER Experiment Name: At_Far-red-induction_P Parameter: Light Value: Far-red vs. White
  misc_feature: MA Experiment 20001248 PARAMETER Experiment Name: At_Far-red-induction_P Parameter: Organism Value: A. thaliana
  misc_feature: MA Experiment 20001248 PARAMETER Experiment Name: At_Far-red-induction_P Parameter: Plant Line Value: Columbia
  misc_feature: MA Experiment 20001248 PARAMETER Experiment Name: At_Far-red-induction_P Parameter: Timepoint (hr) Value: 4
  misc_feature: MA Experiment 20001248 PARAMETER Experiment Name: At_Far-red-induction_P Parameter: Tissue Value: Whole Plant
  misc_feature: MA Experiment ID: 20001459 Result: Up-regulated in Transcription
  misc_feature: MA Experiment 20001459 PARAMETER Experiment Name: At_50mM_NH4NO3_L-to-H_P Parameter: Age (day) Value: Undefined
  misc_feature: MA Experiment 20001459 PARAMETER Experiment Name: At_50mM_NH4NO3_L-to-H_P Parameter: Organism Value: Undefined
  misc_feature: MA Experiment 20001459 PARAMETER Experiment Name: At_50mM_NH4NO3_L-to-H_P Parameter: Plant Line Value: Undefined
  misc_feature: MA Experiment 20001459 PARAMETER Experiment Name: At_50mM_NH4NO3_L-to-H_P Parameter: Timepoint (hr) Value: 4
  misc_feature: MA Experiment 20001459 PARAMETER Experiment Name: At_50mM_NH4NO3_L-to-H_P Parameter: Tissue Value: Siliques
  misc_feature: MA Experiment 20001459 PARAMETER Experiment Name: At_50mM_NH4NO3_L-to-H_P Parameter: Treatment Value: 50mM NH4NO3 vs. 100mM Manitol
  misc_feature: MA Experiment ID: 20001555 Result: Down-regulated in Transcription
  misc_feature: MA Experiment 20001555 PARAMETER Experiment Name: At_Drought_Soil_Dry_P Parameter: Age (day) Value: 24
  misc_feature: MA Experiment 20001555 PARAMETER Experiment Name: At_Drought_Soil_Dry_P Parameter: Organism Value: A. thaliana
  misc_feature: MA Experiment 20001555 PARAMETER Experiment Name: At_Drought_Soil_Dry_P Parameter: Plant Line Value: WS
  misc_feature: MA Experiment 20001555 PARAMETER Experiment Name: At_Drought_Soil_Dry_P Parameter: Post Timepoint (hr) Value: None
  misc_feature: MA Experiment 20001555 PARAMETER Experiment Name: At_Drought_Soil_Dry_P Parameter: Post-Treatment Value: None
  misc_feature: MA Experiment 20001555 PARAMETER Experiment Name: At_Drought_Soil_Dry_P Parameter: Timepoint (day) Value: 10
  misc_feature: MA Experiment 20001555 PARAMETER Experiment Name: At_Drought_Soil_Dry_P Parameter: Treatment Value: Drought vs. No Drought
  misc_feature: MA Experiment ID: 20001556 Result: Down-regulated in Transcription
  misc_feature: MA Experiment 20001556 PARAMETER Experiment Name: At_Drought_Soil_Dry_P Parameter: Age (day) Value: 26
  misc_feature: MA Experiment 20001556 PARAMETER Experiment Name: At_Drought_Soil_Dry_P Parameter: Organism Value: A. thaliana
  misc_feature: MA Experiment 20001556 PARAMETER Experiment Name: At_Drought_Soil_Dry_P Parameter: Plant Line Value: WS
  misc_feature: MA Experiment 20001556 PARAMETER Experiment Name: At_Drought_Soil_Dry_P Parameter: Post Timepoint (hr) Value: None
  misc_feature: MA Experiment 20001556 PARAMETER Experiment Name: At_Drought_Soil_Dry_P Parameter: Post-Treatment Value: None
  misc_feature: MA Experiment 20001556 PARAMETER Experiment Name: At_Drought_Soil_Dry_P Parameter: Timepoint (day) Value: 12
  misc_feature: MA Experiment 20001556 PARAMETER Experiment Name: At_Drought_Soil_Dry_P Parameter: Treatment Value: Drought vs. No Drought
  misc_feature: MA Experiment ID: 20001557 Result: Down-regulated in Transcription
  misc_feature: MA Experiment 20001557 PARAMETER Experiment Name: At_Drought_Soil_Dry_P Parameter: Age (day) Value: 27
  misc_feature: MA Experiment 20001557 PARAMETER Experiment Name: At_Drought_Soil_Dry_P Parameter: Organism Value: A. thaliana
  misc_feature: MA Experiment 20001557 PARAMETER Experiment Name: At_Drought_Soil_Dry_P Parameter: Plant Line Value: WS
  misc_feature: MA Experiment 20001557 PARAMETER Experiment Name: At_Drought_Soil_Dry_P Parameter: Post Timepoint (hr) Value: 3
  misc_feature: MA Experiment 20001557 PARAMETER Experiment Name: At_Drought_Soil_Dry_P Parameter: Post-Treatment Value: Re-Water vs. No Drought
  misc_feature: MA Experiment 20001557 PARAMETER Experiment Name: At_Drought_Soil_Dry_P Parameter: Timepoint (day) Value: 13
  misc_feature: MA Experiment 20001557 PARAMETER Experiment Name: At_Drought_Soil_Dry_P Parameter: Treatment Value: Drought vs. No Drought
  misc_feature: MA Experiment ID: 20001560 Result: Down-regulated in Transcription
  misc_feature: MA Experiment 20001560 PARAMETER Experiment Name: At_Drought_Soil_Dry_P Parameter: Age (day) Value: 28
  misc_feature: MA Experiment 20001560 PARAMETER Experiment Name: At_Drought_Soil_Dry_P Parameter: Organism Value: A. thaliana
  misc_feature: MA Experiment 20001560 PARAMETER Experiment Name: At_Drought_Soil_Dry_P Parameter: Plant Line Value: WS
  misc_feature: MA Experiment 20001560 PARAMETER Experiment Name: At_Drought_Soil_Dry_P Parameter: Post Timepoint (hr) Value: None
  misc_feature: MA Experiment 20001560 PARAMETER Experiment Name: At_Drought_Soil_Dry_P Parameter: Post-Treatment Value: None
  misc_feature: MA Experiment 20001560 PARAMETER Experiment Name: At_Drought_Soil_Dry_P Parameter: Timepoint (day) Value: 14
  misc_feature: MA Experiment 20001560 PARAMETER Experiment Name: At_Drought_Soil_Dry_P Parameter: Treatment Value: Drought vs. No Drought
  misc_feature: MA Experiment ID: 20001904 Result: Down-regulated in Transcription
  misc_feature: MA Experiment 20001904 PARAMETER Experiment Name: At_Drought_Reproduction_P Parameter: Age (day) Value: 37
  misc_feature: MA Experiment 20001904 PARAMETER Experiment Name: At_Drought_Reproduction_P Parameter: Organism Value: A. thaliana
  misc_feature: MA Experiment 20001904 PARAMETER Experiment Name: At_Drought_Reproduction_P Parameter: Plant Line Value: WS
  misc_feature: MA Experiment 20001904 PARAMETER Experiment Name: At_Drought_Reproduction_P Parameter: Timepoint (day) Value: 7
  misc_feature: MA Experiment 20001904 PARAMETER Experiment Name: At_Drought_Reproduction_P Parameter: Tissue Value: Rosettes
  misc_feature: MA Experiment 20001904 PARAMETER Experiment Name: At_Drought_Reproduction_P Parameter: Treatment Value: Drought vs. No Drought
  misc_feature: MA Experiment ID: 20001905 Result: Down-regulated in Transcription
  misc_feature: MA Experiment 20001905 PARAMETER Experiment Name: At_Drought_Reproduction_P Parameter: Age (day) Value: 40
  misc_feature: MA Experiment 20001905 PARAMETER Experiment Name: At_Drought_Reproduction_P Parameter: Organism Value: A. thaliana
  misc_feature: MA Experiment 20001905 PARAMETER Experiment Name: At_Drought_Reproduction_P Parameter: Plant Line Value: WS
  misc_feature: MA Experiment 20001905 PARAMETER Experiment Name: At_Drought_Reproduction_P Parameter: Timepoint (day) Value: 10
  misc_feature: MA Experiment 20001905 PARAMETER Experiment Name: At_Drought_Reproduction_P Parameter: Tissue Value: Rosettes
  misc_feature: MA Experiment 20001905 PARAMETER Experiment Name: At_Drought_Reproduction_P Parameter: Treatment Value: Drought vs. No Drought
  misc_feature: MA Experiment ID: 20001906 Result: Down-regulated in Transcription
  misc_feature: MA Experiment 20001906 PARAMETER Experiment Name: At_Drought_Reproduction_P Parameter: Age (day) Value: 35
  misc_feature: MA Experiment 20001906 PARAMETER Experiment Name: At_Drought_Reproduction_P Parameter: Organism Value: A. thaliana
  misc_feature: MA Experiment 20001906 PARAMETER Experiment Name: At_Drought_Reproduction_P Parameter: Plant Line Value: WS
  misc_feature: MA Experiment 20001906 PARAMETER Experiment Name: At_Drought_Reproduction_P Parameter: Timepoint (day) Value: 5
  misc_feature: MA Experiment 20001906 PARAMETER Experiment Name: At_Drought_Reproduction_P Parameter: Tissue Value: Siliques
  misc_feature: MA Experiment 20001906 PARAMETER Experiment Name: At_Drought_Reproduction_P Parameter: Treatment Value: Drought vs. No Drought
  misc_feature: MA Experiment ID: 20001911 Result: Down-regulated in Transcription
  misc_feature: MA Experiment 20001911 PARAMETER Experiment Name: At_Drought_Reproduction_P Parameter: Age (day) Value: 40
  misc_feature: MA Experiment 20001911 PARAMETER Experiment Name: At_Drought_Reproduction_P Parameter: Organism Value: A. thaliana
  misc_feature: MA Experiment 20001911 PARAMETER Experiment Name: At_Drought_Reproduction_P Parameter: Plant Line Value: WS
  misc_feature: MA Experiment 20001911 PARAMETER Experiment Name: At_Drought_Reproduction_P Parameter: Timepoint (day) Value: 10
  misc_feature: MA Experiment 20001911 PARAMETER Experiment Name: At_Drought_Reproduction_P Parameter: Tissue Value: Flowers
  misc_feature: MA Experiment 20001911 PARAMETER Experiment Name: At_Drought_Reproduction_P Parameter: Treatment Value: Drought vs. No Drought
agacagagatataatacagactcatctcactttgtattatttgagtgtttttataaaaccatttttccatcttcctcatcaccttcccaagaagaagaacaccaaagaagaagaaaggttaataatgatgggcagtgtcgagctgaatctgagggagactgagctgtgtcttggtcttcccggtggagatacagtggctccggtaaccggaaacaagagagggttctcagagacggttgatctgaagctaaatctgaataatgagcctgcaaacaaggaaggatctacgactcatgacgtcgtgacttttgattccaaggagaagagtgcttgtcctaaagatccagccaaacctccggccaaggcacaagttgtgggatggccaccggtgagatcataccggaagaacgtgatggtttcctgccaaaaatcaagcggtggcccggaggcggcggcgttcgtgaaggtatcaatggacggagcaccgtacttgaggaaaatcgatttgaggatgtataaaagctacgatgagctttctaatgctttgtccaacatgttcagctcttttaccatgggcaaacatggaggagaagaaggaatgatagacttcatgaatgagaggaaattgatggatttggtgaatagctgggactatgttccctcttatgaagacaaagacggtgattggatgctcgtcggcgacgttccttggccaatgttcgtcgatacatgcaagcgtttacgtctcatgaaaggatcggatgccattggtctcgctccgagggcgatggagaagtgcaagagcagagcttgaagtcaaattaaaaggataagtggtatcgattatatatttgattaacacattgattggtgttaattgctcttttttttcttacgatgaaatacattgttcagtttcttttgattgtctgtgttttgatctggatttggtatgtagatatagtttgtatgctattatgtgtaatgaacttaagttaaatatttgagacatttgtaatggaaaatgtgtaataatttgaacatcct

SEQ ID NO: 22491 - protein, 270 aa, Arabidopsis thaliana
  peptide (1)..(270): Ceres Seq. ID no. 12332405
  misc_feature (48)..(262): Pfam Name: AUX/IAA family Pfam Description: AUX/IAA family
  misc_feature (52)..(270): Homolog of NCBI NO: 4887020 NR Description: Nt-iaa28 deduced protein [Nicotiana tabacum]
  misc_feature (48)..(258): Homolog of NCBI NO: 25296229 NR Description: IAA7 like protein [imported] - Arabidopsis
  misc_feature (48)..(258): Homolog of NCBI NO: 7442224 NR Description: auxin-induced protein - Arabidopsis thaliana
  misc_feature (48)..(270): Homolog of NCBI NO: 20385508 NR Description: auxin-regulated protein [Populus tremula x
  misc_feature (48)..(270): Homolog of NCBI NO: 21593352 NR Description: indoleacetic acid (IAA)-inducible gene (IAA7)
  misc_feature (42)..(270): Homolog of NCBI NO: 15228943 NR Description: indoleacetic acid (IAA)-inducible gene (IAA7)
  misc_feature (48)..(270): Homolog of NCBI NO: 22328628 NR Description: IAA7 like protein
  misc_feature (42)..(270): Homolog of NCBI NO: 2921758 NR Description: IAA17/AXR3-1 protein [Arabidopsis thaliana]
  misc_feature (43)..(270): Homolog of NCBI NO: 21592887 NR Description: putative auxin-induced protein, IAA17/AXR3-1
  misc_feature (42)..(270): Homolog of NCBI NO: 15219694 NR Description: putative auxin-induced protein, IAA17/AXR3-1
DRDIIQTHLTLYYLSVFIKPFFHLPHHLPKKKNTKEEERLIMMGSVELNLRETELCLGLPGGDTVAPVTGNKRGFSETVDLKLNLNNEPANKEGSTTHDVVTFDSKEKSACPKDPAKPPAKAQVVGWPPVRSYRKNVMVSCQKSSGGPEAAAFVKVSMDGAPYLRKIDLRMYKSYDELSNALSNMFSSFTMGKHGGEEGMIDFMNERKLMDLVNSWDYVPSYEDKDGDWMLVGDVPWPMFVDTCKRLRLMKGSDAIGLAPRAMEKCKSRA

SEQ ID NO: 22492 - protein, 229 aa, Arabidopsis thaliana
  peptide (1)..(229): Ceres Seq. ID no. 12332406
  misc_feature (7)..(221): Pfam Name: AUX/IAA family Pfam Description: AUX/IAA family
  misc_feature (11)..(229): Homolog of NCBI NO: 4887020 NR Description: Nt-iaa28 deduced protein [Nicotiana tabacum]
  misc_feature (7)..(217): Homolog of NCBI NO: 25296229 NR Description: IAA7 like protein [imported] - Arabidopsis
  misc_feature (7)..(217): Homolog of NCBI NO: 7442224 NR Description: auxin-induced protein - Arabidopsis thaliana
  misc_feature (7)..(229): Homolog of NCBI NO: 20385508 NR Description: auxin-regulated protein [Populus tremula x
  misc_feature (7)..(229): Homolog of NCBI NO: 21593352 NR Description: indoleacetic acid (IAA)-inducible gene (IAA7)
  misc_feature (1)..(229): Homolog of NCBI NO: 15228943 NR Description: indoleacetic acid (IAA)-inducible gene (IAA7)
  misc_feature (7)..(229): Homolog of NCBI NO: 22328628 NR Description: IAA7 like protein
  misc_feature (1)..(229): Homolog of NCBI NO: 2921758 NR Description: IAA17/AXR3-1 protein [Arabidopsis thaliana]
  misc_feature (2)..(229): Homolog of NCBI NO: 21592887 NR Description: putative auxin-induced protein, IAA17/AXR3-1
  misc_feature (1)..(229): Homolog of NCBI NO: 15219694 NR Description: putative auxin-induced protein, IAA17/AXR3-1
MMGSVELNLRETELCLGLPGGDTVAPVTGNKRGFSETVDLKLNLNNEPANKEGSTTHDVVTFDSKEKSACPKDPAKPPAKAQVVGWPPVRSYRKNVMVSCQKSSGGPEAAAFVKVSMDGAPYLRKIDLRMYKSYDELSNALSNMFSSFTMGKHGGEEGMIDFMNERKLMDLVNSWDYVPSYEDKDGDWMLVGDVPWPMFVDTCKRLRLMKGSDAIGLAPRAMEKCKSRA

SEQ ID NO: 22493 - protein, 228 aa, Arabidopsis thaliana
  peptide (1)..(228): Ceres Seq. ID no. 12332407
  misc_feature (6)..(220): Pfam Name: AUX/IAA family Pfam Description: AUX/IAA family
  misc_feature (10)..(228): Homolog of NCBI NO: 4887020 NR Description: Nt-iaa28 deduced protein [Nicotiana tabacum]
  misc_feature (6)..(216): Homolog of NCBI NO: 25296229 NR Description: IAA7 like protein [imported] - Arabidopsis
  misc_feature (6)..(216): Homolog of NCBI NO: 7442224 NR Description: auxin-induced protein - Arabidopsis thaliana
  misc_feature (6)..(228): Homolog of NCBI NO: 20385508 NR Description: auxin-regulated protein [Populus tremula x
  misc_feature (6)..(228): Homolog of NCBI NO: 21593352 NR Description: indoleacetic acid (IAA)-inducible gene (IAA7)
  misc_feature (1)..(228): Homolog of NCBI NO: 15228943 NR Description: indoleacetic acid (IAA)-inducible gene (IAA7)
  misc_feature (6)..(228): Homolog of NCBI NO: 22328628 NR Description: IAA7 like protein
  misc_feature (1)..(228): Homolog of NCBI NO: 2921758 NR Description: IAA17/AXR3-1 protein [Arabidopsis thaliana]
  misc_feature (1)..(228): Homolog of NCBI NO: 21592887 NR Description: putative auxin-induced protein, IAA17/AXR3-1
  misc_feature (1)..(228): Homolog of NCBI NO: 15219694 NR Description: putative auxin-induced protein, IAA17/AXR3-1
MGSVELNLRETELCLGLPGGDTVAPVTGNKRGFSETVDLKLNLNNEPANKEGSTTHDVVTFDSKEKSACPKDPAKPPAKAQVVGWPPVRSYRKNVMVSCQKSSGGPEAAAFVKVSMDGAPYLRKIDLRMYKSYDELSNALSNMFSSFTMGKHGGEEGMIDFMNERKLMDLVNSWDYVPSYEDKDGDWMLVGDVPWPMFVDTCKRLRLMKGSDAIGLAPRAMEKCKSRA

SEQ ID NO: 22494 - DNA, 1192 bp, Arabidopsis thaliana
  misc_feature (1)..(1192): Ceres Seq. ID no. 12422597
  misc_feature: MA Experiment ID: 108434 Result: Down-regulated in Transcription
  misc_feature: MA Experiment 108434 PARAMETER Experiment Name: At_Root_Tips_cDNA_P Parameter: Tissue Value: Root Tips
  misc_feature: MA Experiment ID: 108435 Result: Up-regulated in Transcription
  misc_feature: MA Experiment 108435 PARAMETER Experiment Name: At_stm_Mutants_cDNA_P Parameter: Plant Line Value: wt Landsburg vs stm
  misc_feature: MA Experiment 108435 PARAMETER Experiment Name: At_stm_Mutants_cDNA_P Parameter: Tissue Value: Shoot Apical Meristem Region
  misc_feature: MA Experiment ID: 108461 Result: Up-regulated in Transcription
  misc_feature: MA Experiment 108461 PARAMETER Experiment Name: At_Germinating_Seeds_cDNA_P Parameter: Age (day) Value: 1 vs. 0
  misc_feature: MA Experiment 108461 PARAMETER Experiment Name: At_Germinating_Seeds_cDNA_P Parameter: Tissue Value: Germinating Seeds
  misc_feature: MA Experiment ID: 108462 Result: Up-regulated in Transcription
  misc_feature: MA Experiment 108462 PARAMETER Experiment Name: At_Germinating_Seeds_cDNA_P Parameter: Age (day) Value: 2 vs. 0
  misc_feature: MA Experiment 108462 PARAMETER Experiment Name: At_Germinating_Seeds_cDNA_P Parameter: Tissue Value: Germinating Seeds
  misc_feature: MA Experiment ID: 108463 Result: Up-regulated in Transcription
  misc_feature: MA Experiment 108463 PARAMETER Experiment Name: At_Germinating_Seeds_cDNA_P Parameter: Age (day) Value: 3 vs. 0
  misc_feature: MA Experiment 108463 PARAMETER Experiment Name: At_Germinating_Seeds_cDNA_P Parameter: Tissue Value: Germinating Seeds
  misc_feature: MA Experiment ID: 108464 Result: Up-regulated in Transcription
  misc_feature: MA Experiment 108464 PARAMETER Experiment Name: At_Germinating_Seeds_cDNA_P Parameter: Age (day) Value: 4 vs. 0
  misc_feature: MA Experiment 108464 PARAMETER Experiment Name: At_Germinating_Seeds_cDNA_P Parameter: Tissue Value: Germinating Seeds
  misc_feature: MA Experiment ID: 108501 Result: Up-regulated in Transcription
  misc_feature: MA Experiment 108501 PARAMETER Experiment Name: At_ap2_floral_buds_cDNA_P Parameter: Plant Line Value: ap2 (Ler.)
  misc_feature: MA Experiment 108501 PARAMETER Experiment Name: At_ap2_floral_buds_cDNA_P Parameter: Tissue Value: Closed Flower
  misc_feature: MA Experiment ID: 108569 Result: Up-regulated in Transcription
  misc_feature: MA Experiment 108569 PARAMETER Experiment Name: At_0.001%_MeJA__cDNA_P Parameter: Timepoint (hr) Value: 6
  misc_feature: MA Experiment 108569 PARAMETER Experiment Name: At_0.001%_MeJA__cDNA_P Parameter: Tissue Value: Aerial
  misc_feature: MA Experiment 108569 PARAMETER Experiment Name: At_0.001%_MeJA__cDNA_P Parameter: Treatment Value: 0.001% MeJA vs. No Treatment
  misc_feature: MA Experiment ID: 108572 Result: Up-regulated in Transcription
  misc_feature: MA Experiment 108572 PARAMETER Experiment Name: At_Drought_cDNA_P Parameter: Timepoint (hr) Value: 1
  misc_feature: MA Experiment 108572 PARAMETER Experiment Name: At_Drought_cDNA_P Parameter: Tissue Value: Aerial
  misc_feature: MA Experiment 108572 PARAMETER Experiment Name: At_Drought_cDNA_P Parameter: Treatment Value: Drought vs. No Drought
  misc_feature: MA Experiment ID: 108573 Result: Up-regulated in Transcription
  misc_feature: MA Experiment 108573 PARAMETER Experiment Name: At_Drought_cDNA_P Parameter: Timepoint (hr) Value: 6
  misc_feature: MA Experiment 108573 PARAMETER Experiment Name: At_Drought_cDNA_P Parameter: Tissue Value: Aerial
  misc_feature: MA Experiment 108573 PARAMETER Experiment Name: At_Drought_cDNA_P Parameter: Treatment Value: Drought vs. No Drought
  misc_feature: MA Experiment ID: 108585 Result: Up-regulated in Transcription
  misc_feature: MA Experiment 108585 PARAMETER Experiment Name: At_5mM_NaNP_cDNA_P Parameter: Timepoint (hr) Value: 6
  misc_feature: MA Experiment 108585 PARAMETER Experiment Name: At_5mM_NaNP_cDNA_P Parameter: Tissue Value: Aerial
  misc_feature: MA Experiment 108585 PARAMETER Experiment Name: At_5mM_NaNP_cDNA_P Parameter: Treatment Value: null
  misc_feature: MA Experiment ID: 108605 Result: Up-regulated in Transcription
  misc_feature: MA Experiment 108605 PARAMETER Experiment Name: At_100uM_ABA_cDNA_P Parameter: Timepoint (hr) Value: 6
  misc_feature: MA Experiment 108605 PARAMETER Experiment Name: At_100uM_ABA_cDNA_P Parameter: Tissue Value: Aerial
  misc_feature: MA Experiment 108605 PARAMETER Experiment Name: At_100uM_ABA_cDNA_P Parameter: Treatment Value: 100uM ABA vs. No Treatment
  misc_feature: MA Experiment ID: 108609 Result: Up-regulated in Transcription
  misc_feature: MA Experiment 108609 PARAMETER Experiment Name: At_100uM_ABA_cDNA_P Parameter: Timepoint (hr) Value: 24
  misc_feature: MA Experiment 108609 PARAMETER Experiment Name: At_100uM_ABA_cDNA_P Parameter: Tissue Value: Aerial
  misc_feature: MA Experiment 108609 PARAMETER Experiment Name: At_100uM_ABA_cDNA_P Parameter: Treatment Value: 100uM ABA vs. No Treatment
  misc_feature: MA Experiment ID: 108668 Result: Up-regulated in Transcription
  misc_feature: MA Experiment 108668 PARAMETER Experiment Name: At_2mM_SA_cDNA_P Parameter: Plant Line Value: WS
  misc_feature: MA Experiment 108668 PARAMETER Experiment Name: At_2mM_SA_cDNA_P Parameter: Timepoint (hr) Value: 6
  misc_feature: MA Experiment 108668 PARAMETER Experiment Name: At_2mM_SA_cDNA_P Parameter: Treatment Value: 2mM SA vs. No Treatment
  misc_feature: MA Experiment ID: 20000071 Result: Up-regulated in Transcription
  misc_feature: MA Experiment 20000071 PARAMETER Experiment Name: At_100uM_ABA_Mutants_cDNA_P Parameter: Plant Line Value: CS8104
  misc_feature: MA Experiment 20000071 PARAMETER Experiment Name: At_100uM_ABA_Mutants_cDNA_P Parameter: Timepoint (hr) Value: 6
  misc_feature: MA Experiment 20000071 PARAMETER Experiment Name: At_100uM_ABA_Mutants_cDNA_P Parameter: Tissue Value: Aerial
  misc_feature: MA Experiment 20000071 PARAMETER Experiment Name: At_100uM_ABA_Mutants_cDNA_P Parameter: Treatment Value: 100uM ABA vs. No Treatment
  misc_feature: MA Experiment ID: 20000072 Result: Up-regulated in Transcription
  misc_feature: MA Experiment 20000072 PARAMETER Experiment Name: At_100uM_ABA_Mutants_cDNA_P Parameter: Plant Line Value: CS8105
  misc_feature: MA Experiment 20000072 PARAMETER Experiment Name: At_100uM_ABA_Mutants_cDNA_P Parameter: Timepoint (hr) Value: 6
  misc_feature: MA Experiment 20000072 PARAMETER Experiment Name: At_100uM_ABA_Mutants_cDNA_P Parameter: Tissue Value: Aerial
  misc_feature: MA Experiment 20000072 PARAMETER Experiment Name: At_100uM_ABA_Mutants_cDNA_P Parameter: Treatment Value: 100uM ABA vs. No Treatment
  misc_feature: MA Experiment ID: 20000086 Result: Up-regulated in Transcription
  misc_feature: MA Experiment 20000086 PARAMETER Experiment Name: At_100uM_ABA_Mutants_cDNA_P Parameter: Plant Line Value: CS22
  misc_feature: MA Experiment 20000086 PARAMETER Experiment Name: At_100uM_ABA_Mutants_cDNA_P Parameter: Timepoint (hr) Value: 6
  misc_feature: MA Experiment 20000086 PARAMETER Experiment Name: At_100uM_ABA_Mutants_cDNA_P Parameter: Tissue Value: Aerial
  misc_feature: MA Experiment 20000086 PARAMETER Experiment Name: At_100uM_ABA_Mutants_cDNA_P Parameter: Treatment Value: 100uM ABA vs. No Treatment
  misc_feature: MA Experiment ID: 20000087 Result: Up-regulated in Transcription
  misc_feature: MA Experiment 20000087 PARAMETER Experiment Name: At_100uM_ABA_Mutants_cDNA_P Parameter: Plant Line Value: WS
  misc_feature: MA Experiment 20000087 PARAMETER Experiment Name: At_100uM_ABA_Mutants_cDNA_P Parameter: Timepoint (hr) Value: 6
  misc_feature: MA Experiment 20000087 PARAMETER Experiment Name: At_100uM_ABA_Mutants_cDNA_P Parameter: Tissue Value: Aerial
  misc_feature: MA Experiment 20000087 PARAMETER Experiment Name: At_100uM_ABA_Mutants_cDNA_P Parameter: Treatment Value: 100uM ABA vs. No Treatment
  misc_feature: MA Experiment ID: 20000088 Result: Up-regulated in Transcription
  misc_feature: MA Experiment 20000088 PARAMETER Experiment Name: At_100uM_ABA_Mutants_cDNA_P Parameter: Plant Line Value: Landsberg
  misc_feature: MA Experiment 20000088 PARAMETER Experiment Name: At_100uM_ABA_Mutants_cDNA_P Parameter: Timepoint (hr) Value: 6
  misc_feature: MA Experiment 20000088 PARAMETER Experiment Name: At_100uM_ABA_Mutants_cDNA_P Parameter: Tissue Value: Aerial
  misc_feature: MA Experiment 20000088 PARAMETER Experiment Name: At_100uM_ABA_Mutants_cDNA_P Parameter: Treatment Value: 100uM ABA vs. No Treatment
  misc_feature: MA Experiment ID: 20000090 Result: Up-regulated in Transcription
  misc_feature: MA Experiment ID: 20000307 Result: Up-regulated in Transcription
  misc_feature: MA Experiment 20000307 PARAMETER Experiment Name: At_Germinating_Seeds_Sub_P Parameter: Age (hr) Value: 24 vs. 0
  misc_feature: MA Experiment 20000307 PARAMETER Experiment Name: At_Germinating_Seeds_Sub_P Parameter: Organism Value: A. thaliana
  misc_feature: MA Experiment 20000307 PARAMETER Experiment Name: At_Germinating_Seeds_Sub_P Parameter: Plant Line Value: WS
  misc_feature: MA Experiment 20000307 PARAMETER Experiment Name: At_Germinating_Seeds_Sub_P Parameter: Tissue Value: Germinating Seeds
  misc_feature: MA Experiment ID: 20000314 Result: Up-regulated in Transcription
  misc_feature: MA Experiment 20000314 PARAMETER Experiment Name: At_14day_Shoots-Roots_Sub_P Parameter: Age (day) Value: 14
  misc_feature: MA Experiment 20000314 PARAMETER Experiment Name: At_14day_Shoots-Roots_Sub_P Parameter: Organism Value: A. thaliana
  misc_feature: MA Experiment 20000314 PARAMETER Experiment Name: At_14day_Shoots-Roots_Sub_P Parameter: Plant Line Value: WS
  misc_feature: MA Experiment 20000314 PARAMETER Experiment Name: At_14day_Shoots-Roots_Sub_P Parameter: Tissue Value: Roots vs. Whole Plant
  misc_feature: MA Experiment ID: 20000315 Result: Up-regulated in Transcription
  misc_feature: MA Experiment 20000315 PARAMETER Experiment Name: At_14day_Shoots-Roots_Sub_P Parameter: Age (day) Value: 14
  misc_feature: MA Experiment 20000315 PARAMETER Experiment Name: At_14day_Shoots-Roots_Sub_P Parameter: Organism Value: A. thaliana
  misc_feature: MA Experiment 20000315 PARAMETER Experiment Name: At_14day_Shoots-Roots_Sub_P Parameter: Plant Line Value: WS
  misc_feature: MA Experiment 20000315 PARAMETER Experiment Name: At_14day_Shoots-Roots_Sub_P Parameter: Tissue Value: Shoots vs. Whole Plant
  misc_feature: MA Experiment ID: 20000328 Result: Down-regulated in Transcription
  misc_feature: MA Experiment 20000328 PARAMETER Experiment Name: At_42deg_Heat_Sub_P Parameter: Age (day) Value: 14
  misc_feature: MA Experiment 20000328 PARAMETER Experiment Name: At_42deg_Heat_Sub_P Parameter: Organism Value: A. thaliana
  misc_feature: MA Experiment 20000328 PARAMETER Experiment Name: At_42deg_Heat_Sub_P Parameter: Plant Line Value: WS
  misc_feature: MA Experiment 20000328 PARAMETER Experiment Name: At_42deg_Heat_Sub_P Parameter: Temperature (deg C) Value: 42 vs. 22
  misc_feature: MA Experiment 20000328 PARAMETER Experiment Name: At_42deg_Heat_Sub_P Parameter: Timepoint (hr) Value: 6
  misc_feature: MA Experiment 20000328 PARAMETER Experiment Name: At_42deg_Heat_Sub_P Parameter: Tissue Value: Aerial
  misc_feature: MA Experiment ID: 20000355 Result: Down-regulated in Transcription
  misc_feature: MA Experiment 20000355 PARAMETER Experiment Name: At_Siliques_Sub_P Parameter: Age (day) Value: 21
  misc_feature: MA Experiment 20000355 PARAMETER Experiment Name: At_Siliques_Sub_P Parameter: Organism Value: A. thaliana
  misc_feature: MA Experiment 20000355 PARAMETER Experiment Name: At_Siliques_Sub_P Parameter: Plant Line Value: WS
  misc_feature: MA Experiment 20000355 PARAMETER Experiment Name: At_Siliques_Sub_P Parameter: Tissue Value: Less Than 5mm Siliques vs. Whole Plant
  misc_feature: MA Experiment ID: 20000440 Result: Down-regulated in Transcription
  misc_feature: MA Experiment 20000440 PARAMETER Experiment Name: At_Closed-Flower__Sub_P Parameter: Tissue Value: Closed Flower vs. Whole Plant
atcttctcaaactaaatcaactaaagaggtttcttcttatagaaatgaatttctcttattcttccttgtcaacttggacaaccctaatgacattgggttgtcttctgcttcatttatccatttccagtgctcagctaaccccaactttctatgacaatacatgtccaagcgtctttaccatcgtacgggataccatagtaaacgagctaagatcggatcctcgtatcgctgcaagcatccttcgtcttcacttccacgactgtttcgtcaatggctgtgatgcatcgatcctgttagacaacacaacatcctttcgaacagagaaagatgcggctccaaacgcaaactcggctcgaggatttccagtgattgatagaatgaaagcagcagtagagacagcatgtccaaggactgtttcatgcgcagatatacttaccatcgcagctcaacaagctgtaaatttggcaggaggtccttcttggagggttcctttggggagaagagacagcttacaagcattctttgctctcgctaatacaaatcttcccgctccattcttcactctcccacaacttaaggccagttttcaaaatgttggacttgaccgtccctctgatctcgttgcactctctggtggtcacacatttggtaaaaaccagtgccaatttattatggatagactatacaactttagcaacactggtttacccgaccctactcttaatactacatacctccagacacttcgtggacaatgtccccgcaatggtaaccagaccgtcttagttgatttcgatctacgcacaccgacggtttttgacaataaatactatgtgaatctgaaagagctaaagggacttatccagacggatcaagagttgttttccagccctaatgccactgacacaatccccttggtgagagaatacgctgatggcactcaaaaattcttcaatgcttttgtggaagcaatgaatagaatgggaaacattacacctctcactggaactcaaggacaaatcagacagaattgtagggtggttaactccaactcgctgctacatgatgtggtcgaaatcgttgactttgtcagctctatgtaacataacgttgtctcgatatatgtggcaaccaaaaatatgttttatgaaataaagtgttctcaaaatgtttatgaagaacatttcgtctt

SEQ ID NO: 22495 - protein, 366 aa, Arabidopsis thaliana
  peptide (1)..(366): Ceres Seq. ID no. 12422598
  misc_feature (35)..(366): Homolog of NCBI NO: 129816 NR Description: Peroxidase C1C precursor
  misc_feature (15)..(366): Homolog of NCBI NO: 168241 NR Description: HRPC1
  misc_feature (18)..(366): Homolog of NCBI NO: 129814 NR Description: Peroxidase C1B precursor
  misc_feature (15)..(366): Homolog of NCBI NO: 129813 NR Description: PEROXIDASE C1A PRECURSOR
  misc_feature (15)..(366): Homolog of NCBI NO: 15229084 NR Description: peroxidase
  misc_feature (15)..(366): Homolog of NCBI NO: 480907 NR Description: peroxidase (EC 1.11.1.7) Cb - Arabidopsis
  misc_feature (15)..(366): Homolog of NCBI NO: 15229095 NR Description: peroxidase, putative
  misc_feature (15)..(366): Homolog of NCBI NO: 30690396 NR Description: peroxidase, putative [Arabidopsis thaliana]
  misc_feature (15)..(366): Homolog of NCBI NO: 21592888 NR Description: peroxidase [Arabidopsis thaliana]
  misc_feature (15)..(366): Homolog of NCBI NO: 25453209 NR Description: Peroxidase 32 precursor (Atperox P32) (PRXR3)
LLKLNQLKRFLLIEMNFSYSSLSTWTTLMTLGCLLLHLSISSAQLTPTFYDNTCPSVFTIVRDTIVNELRSDPRIAASILRLHFHDCFVNGCDASILLDNTTSFRTEKDAAPNANSARGFPVIDRMKAAVETACPRTVSCADILTIAAQQAVNLAGGPSWRVPLGRRDSLQAFFALANTNLPAPFFTLPQLKASFQNVGLDRPSDLVALSGGHTFGKNQCQFIMDRLYNFSNTGLPDPTLNTTYLQTLRGQCPRNGNQTVLVDFDLRTPTVFDNKYYVNLKELKGLIQTDQELFSSPNATDTIPLVREYADGTQKFFNAFVEAMNRMGNITPLTGTQGQIRQNCRVVNSNSLLHDVVEIVDFVSSM

SEQ ID NO: 22496 - protein, 352 aa, Arabidopsis thaliana
  peptide (1)..(352): Ceres Seq. ID no. 12422599
  misc_feature (21)..(352): Homolog of NCBI NO: 129816 NR Description: Peroxidase C1C precursor
  misc_feature (1)..(352): Homolog of NCBI NO: 168241 NR Description: HRPC1
  misc_feature (4)..(352): Homolog of NCBI NO: 129814 NR Description: Peroxidase C1B precursor
  misc_feature (1)..(352): Homolog of NCBI NO: 129813 NR Description: PEROXIDASE C1A PRECURSOR
  misc_feature (1)..(352): Homolog of NCBI NO: 15229084 NR Description: peroxidase
  misc_feature (1)..(352): Homolog of NCBI NO: 480907 NR Description: peroxidase (EC 1.11.1.7) Cb - Arabidopsis
  misc_feature (1)..(352): Homolog of NCBI NO: 15229095 NR Description: peroxidase, putative
  misc_feature (1)..(352): Homolog of NCBI NO: 30690396 NR Description: peroxidase, putative [Arabidopsis thaliana]
  misc_feature (1)..(352): Homolog of NCBI NO: 21592888 NR Description: peroxidase [Arabidopsis thaliana]
  misc_feature (1)..(352): Homolog of NCBI NO: 25453209 NR Description: Peroxidase 32 precursor (Atperox P32) (PRXR3)
MNFSYSSLSTWTTLMTLGCLLLHLSISSAQLTPTFYDNTCPSVFTIVRDTIVNELRSDPRIAASILRLHFHDCFVNGCDASILLDNTTSFRTEKDAAPNANSARGFPVIDRMKAAVETACPRTVSCADILTIAAQQAVNLAGGPSWRVPLGRRDSLQAFFALANTNLPAPFFTLPQLKASFQNVGLDRPSDLVALSGGHTFGKNQCQFIMDRLYNFSNTGLPDPTLNTTYLQTLRGQCPRNGNQTVLVDFDLRTPTVFDNKYYVNLKELKGLIQTDQELFSSPNATDTIPLVREYADGTQKFFNAFVEAMNRMGNITPLTGTQGQIRQNCRVVNSNSLLHDVVEIVDFVSSM

SEQ ID NO: 22497 - protein, 338 aa, Arabidopsis thaliana
  peptide (1)..(338): Ceres Seq. ID no. 12422600
  misc_feature (7)..(338): Homolog of NCBI NO: 129816 NR Description: Peroxidase C1C precursor
  misc_feature (1)..(338): Homolog of NCBI NO: 168241 NR Description: HRPC1
  misc_feature (1)..(338): Homolog of NCBI NO: 129814 NR Description: Peroxidase C1B precursor
  misc_feature (1)..(338): Homolog of NCBI NO: 129813 NR Description: PEROXIDASE C1A PRECURSOR
  misc_feature (1)..(338): Homolog of NCBI NO: 15229084 NR Description: peroxidase
  misc_feature (1)..(338): Homolog of NCBI NO: 480907 NR Description: peroxidase (EC 1.11.1.7) Cb - Arabidopsis
  misc_feature (1)..(338): Homolog of NCBI NO: 15229095 NR Description: peroxidase, putative
  misc_feature (1)..(338): Homolog of NCBI NO: 30690396 NR Description: peroxidase, putative [Arabidopsis thaliana]
  misc_feature (1)..(338): Homolog of NCBI NO: 21592888 NR Description: peroxidase [Arabidopsis thaliana]
  misc_feature (1)..(338): Homolog of NCBI NO: 25453209 NR Description: Peroxidase 32 precursor (Atperox P32) (PRXR3)
MTLGCLLLHLSISSAQLTPTFYDNTCPSVFTIVRDTIVNELRSDPRIAASILRLHFHDCFVNGCDASILLDNTTSFRTEKDAAPNANSARGFPVIDRMKAAVETACPRTVSCADILTIAAQQAVNLAGGPSWRVPLGRRDSLQAFFALANTNLPAPFFTLPQLKASFQNVGLDRPSDLVALSGGHTFGKNQCQFIMDRLYNFSNTGLPDPTLNTTYLQTLRGQCPRNGNQTVLVDFDLRTPTVFDNKYYVNLKELKGLIQTDQELFSSPNATDTIPLVREYADGTQKFFNAFVEAMNRMGNITPLTGTQGQIRQNCRVVNSNSLLHDVVEIVDFVSSM

SEQ ID NO: 22498 - DNA, 1659 bp, Arabidopsis thaliana
  misc_feature (1)..(1659): Ceres Seq. ID no. 13490538
  misc_feature: MA Experiment ID: 108464 Result: Up-regulated in Transcription
  misc_feature: MA Experiment 108464 PARAMETER Experiment Name: At_Germinating_Seeds_cDNA_P Parameter: Age (day) Value: 4 vs. 0
  misc_feature: MA Experiment 108464 PARAMETER Experiment Name: At_Germinating_Seeds_cDNA_P Parameter: Tissue Value: Germinating Seeds
  misc_feature: MA Experiment ID: 108501 Result: Down-regulated in Transcription
  misc_feature: MA Experiment 108501 PARAMETER Experiment Name: At_ap2_floral_buds_cDNA_P Parameter: Plant Line Value: ap2 (Ler.)
  misc_feature: MA Experiment 108501 PARAMETER Experiment Name: At_ap2_floral_buds_cDNA_P Parameter: Tissue Value: Closed Flower
  misc_feature: MA Experiment ID: 108561 Result: Up-regulated in Transcription
  misc_feature: MA Experiment 108561 PARAMETER Experiment Name: At_100uM_ABA_cDNA_P Parameter: Timepoint (hr) Value: 6
  misc_feature: MA Experiment 108561 PARAMETER Experiment Name: At_100uM_ABA_cDNA_P Parameter: Tissue Value: Aerial
  misc_feature: MA Experiment 108561 PARAMETER Experiment Name: At_100uM_ABA_cDNA_P Parameter: Treatment Value: 100uM ABA vs. No Treatment
  misc_feature: MA Experiment ID: 108573 Result: Up-regulated in Transcription
  misc_feature: MA Experiment 108573 PARAMETER Experiment Name: At_Drought_cDNA_P Parameter: Timepoint (hr) Value: 6
  misc_feature: MA Experiment 108573 PARAMETER Experiment Name: At_Drought_cDNA_P Parameter: Tissue Value: Aerial
  misc_feature: MA Experiment 108573 PARAMETER Experiment Name: At_Drought_cDNA_P Parameter: Treatment Value: Drought vs. No Drought
  misc_feature: MA Experiment ID: 108574 Result: Down-regulated in Transcription
  misc_feature: MA Experiment 108574 PARAMETER Experiment Name: At_Wounding__cDNA_P Parameter: Timepoint (hr) Value: 1
  misc_feature: MA Experiment 108574 PARAMETER Experiment Name: At_Wounding__cDNA_P Parameter: Tissue Value: Aerial
  misc_feature: MA Experiment 108574 PARAMETER Experiment Name: At_Wounding__cDNA_P Parameter: Treatment Value: Wounding vs. No Wounding
  misc_feature: MA Experiment ID: 108579 Result: Down-regulated in Transcription
  misc_feature: MA Experiment 108579 PARAMETER Experiment Name: At_4deg_Cold_cDNA_P Parameter: Temperature (deg C) Value: 4 vs. 22
  misc_feature: MA Experiment 108579 PARAMETER Experiment Name: At_4deg_Cold_cDNA_P Parameter: Timepoint (hr) Value: 6
  misc_feature: MA Experiment 108579 PARAMETER Experiment Name: At_4deg_Cold_cDNA_P Parameter: Tissue Value: Aerial
  misc_feature: MA Experiment ID: 108594 Result: Up-regulated in Transcription
  misc_feature: MA Experiment 108594 PARAMETER Experiment Name: At_Ler-rhl_Root_cDNA_P Parameter: Plant Line Value: null
  misc_feature: MA Experiment ID: 108605 Result: Up-regulated in Transcription
  misc_feature: MA Experiment 108605 PARAMETER Experiment Name: At_100uM_ABA_cDNA_P Parameter: Timepoint (hr) Value: 6
  misc_feature: MA Experiment 108605 PARAMETER Experiment Name: At_100uM_ABA_cDNA_P Parameter: Tissue Value: Aerial
  misc_feature: MA Experiment 108605 PARAMETER Experiment Name: At_100uM_ABA_cDNA_P Parameter: Treatment Value: 100uM ABA vs. No Treatment
  misc_feature: MA Experiment ID: 108607 Result: Up-regulated in Transcription
  misc_feature: MA Experiment 108607 PARAMETER Experiment Name: At_100uM_ABA_cDNA_P Parameter: Timepoint (hr) Value: 4
  misc_feature: MA Experiment 108607 PARAMETER Experiment Name: At_100uM_ABA_cDNA_P Parameter: Tissue Value: Aerial
  misc_feature: MA Experiment 108607 PARAMETER Experiment Name: At_100uM_ABA_cDNA_P Parameter: Treatment Value: 100uM ABA vs. No Treatment
  misc_feature: MA Experiment ID: 20000069 Result: Up-regulated in Transcription
  misc_feature: MA Experiment 20000069 PARAMETER Experiment Name: At_100uM_ABA_Mutants_cDNA_P Parameter: Plant Line Value: CS23
  misc_feature: MA Experiment 20000069 PARAMETER Experiment Name: At_100uM_ABA_Mutants_cDNA_P Parameter: Timepoint (hr) Value: 6
  misc_feature: MA Experiment 20000069 PARAMETER Experiment Name: At_100uM_ABA_Mutants_cDNA_P Parameter: Tissue Value: Aerial
  misc_feature: MA Experiment 20000069 PARAMETER Experiment Name: At_100uM_ABA_Mutants_cDNA_P Parameter: Treatment Value: 100uM ABA vs. No Treatment
  misc_feature: MA Experiment ID: 20000070 Result: Up-regulated in Transcription
  misc_feature: MA Experiment 20000070 PARAMETER Experiment Name: At_100uM_ABA_Mutants_cDNA_P Parameter: Plant Line Value: CS24
  misc_feature: MA Experiment 20000070 PARAMETER Experiment Name: At_100uM_ABA_Mutants_cDNA_P Parameter: Timepoint (hr) Value: 6
  misc_feature: MA Experiment 20000070 PARAMETER Experiment Name: At_100uM_ABA_Mutants_cDNA_P Parameter: Tissue Value: Aerial
  misc_feature: MA Experiment 20000070 PARAMETER Experiment Name: At_100uM_ABA_Mutants_cDNA_P Parameter: Treatment Value: 100uM ABA vs. No Treatment
  misc_feature: MA Experiment ID: 20000071 Result: Up-regulated in Transcription
  misc_feature: MA Experiment 20000071 PARAMETER Experiment Name: At_100uM_ABA_Mutants_cDNA_P Parameter: Plant Line Value: CS8104
  misc_feature: MA Experiment 20000071 PARAMETER Experiment Name: At_100uM_ABA_Mutants_cDNA_P Parameter: Timepoint (hr) Value: 6
  misc_feature: MA Experiment 20000071 PARAMETER Experiment Name: At_100uM_ABA_Mutants_cDNA_P Parameter: Tissue Value: Aerial
  misc_feature: MA Experiment 20000071 PARAMETER Experiment Name: At_100uM_ABA_Mutants_cDNA_P Parameter: Treatment Value: 100uM ABA vs. No Treatment
  misc_feature: MA Experiment ID: 20000072 Result: Up-regulated in Transcription
  misc_feature: MA Experiment 20000072 PARAMETER Experiment Name: At_100uM_ABA_Mutants_cDNA_P Parameter: Plant Line Value: CS8105
  misc_feature: MA Experiment 20000072 PARAMETER Experiment Name: At_100uM_ABA_Mutants_cDNA_P Parameter: Timepoint (hr) Value: 6
  misc_feature: MA Experiment 20000072 PARAMETER Experiment Name: At_100uM_ABA_Mutants_cDNA_P Parameter: Tissue Value: Aerial
  misc_feature: MA Experiment 20000072 PARAMETER Experiment Name: At_100uM_ABA_Mutants_cDNA_P Parameter: Treatment Value: 100uM ABA vs. No Treatment
  misc_feature: MA Experiment ID: 20000086 Result: Up-regulated in Transcription
  misc_feature: MA Experiment 20000086 PARAMETER Experiment Name: At_100uM_ABA_Mutants_cDNA_P Parameter: Plant Line Value: CS22
  misc_feature: MA Experiment 20000086 PARAMETER Experiment Name: At_100uM_ABA_Mutants_cDNA_P Parameter: Timepoint (hr) Value: 6
  misc_feature: MA Experiment 20000086 PARAMETER Experiment Name: At_100uM_ABA_Mutants_cDNA_P Parameter: Tissue Value: Aerial
  misc_feature: MA Experiment 20000086 PARAMETER Experiment Name: At_100uM_ABA_Mutants_cDNA_P Parameter: Treatment Value: 100uM ABA vs. No Treatment
  misc_feature: MA Experiment ID: 20000087 Result: Up-regulated in Transcription
  misc_feature: MA Experiment 20000087 PARAMETER Experiment Name: At_100uM_ABA_Mutants_cDNA_P Parameter: Plant Line Value: WS
  misc_feature: MA Experiment 20000087 PARAMETER Experiment Name: At_100uM_ABA_Mutants_cDNA_P Parameter: Timepoint (hr) Value: 6
  misc_feature: MA Experiment 20000087 PARAMETER Experiment Name: At_100uM_ABA_Mutants_cDNA_P Parameter: Tissue Value: Aerial
  misc_feature: MA Experiment 20000087 PARAMETER Experiment Name: At_100uM_ABA_Mutants_cDNA_P Parameter: Treatment Value: 100uM ABA vs. No Treatment
  misc_feature: MA Experiment ID: 20000088 Result: Up-regulated in Transcription
  misc_feature: MA Experiment 20000088 PARAMETER Experiment Name: At_100uM_ABA_Mutants_cDNA_P Parameter: Plant Line Value: Landsberg
  misc_feature: MA Experiment 20000088 PARAMETER Experiment Name: At_100uM_ABA_Mutants_cDNA_P Parameter: Timepoint (hr) Value: 6
  misc_feature: MA Experiment 20000088 PARAMETER Experiment Name: At_100uM_ABA_Mutants_cDNA_P Parameter: Tissue Value: Aerial
  misc_feature: MA Experiment 20000088 PARAMETER Experiment Name: At_100uM_ABA_Mutants_cDNA_P Parameter: Treatment Value: 100uM ABA vs. No Treatment
  misc_feature: MA Experiment ID: 20000117 Result: Up-regulated in Transcription
  misc_feature: MA Experiment 20000117 PARAMETER Experiment Name: At_100uM_ABA_Mutants_cDNA_P Parameter: Plant Line Value: Columbia
  misc_feature: MA Experiment 20000117 PARAMETER Experiment Name: At_100uM_ABA_Mutants_cDNA_P Parameter: Timepoint (hr) Value: 6
  misc_feature: MA Experiment 20000117 PARAMETER Experiment Name: At_100uM_ABA_Mutants_cDNA_P Parameter: Tissue Value: Aerial
  misc_feature: MA Experiment 20000117 PARAMETER Experiment Name: At_100uM_ABA_Mutants_cDNA_P Parameter: Treatment Value: 100uM ABA vs. No Treatment
  misc_feature: MA Experiment ID: 20000169 Result: Up-regulated in Transcription
  misc_feature: MA Experiment 20000169 PARAMETER Experiment Name: At_100uM_ABA_P Parameter: Age (day) Value: 14
  misc_feature: MA Experiment 20000169 PARAMETER Experiment Name: At_100uM_ABA_P Parameter: Organism Value: A. thaliana
  misc_feature: MA Experiment 20000169 PARAMETER Experiment Name: At_100uM_ABA_P Parameter: Plant Line Value: WS
  misc_feature: MA Experiment 20000169 PARAMETER Experiment Name: At_100uM_ABA_P Parameter: Timepoint (hr) Value: 6
  misc_feature: MA Experiment 20000169 PARAMETER Experiment Name: At_100uM_ABA_P Parameter: Tissue Value: Aerial
  misc_feature: MA Experiment 20000169 PARAMETER Experiment Name: At_100uM_ABA_P Parameter: Treatment Value: 100uM ABA vs. No Treatment
  misc_feature: MA Experiment ID: 20000184 Result: Down-regulated in Transcription
  misc_feature: MA Experiment 20000184 PARAMETER Experiment Name: At_Shoots__P Parameter: Age (day) Value: 7
  misc_feature: MA Experiment 20000184 PARAMETER Experiment Name: At_Shoots__P Parameter: Tissue Value: Shoots vs. Whole Plant
  misc_feature: MA Experiment ID: 20000213 Result: Down-regulated in Transcription
  misc_feature: MA Experiment 20000213 PARAMETER Experiment Name: At_4deg_Cold_P Parameter: Timepoint (hr) Value: 2
  misc_feature: MA Experiment ID: 20000214 Result: Down-regulated in Transcription
  misc_feature: MA Experiment 20000214 PARAMETER Experiment Name: At_4deg_Cold_P Parameter: Timepoint (hr) Value: 6
  misc_feature: MA Experiment ID: 20000224 Result: Down-regulated in Transcription
  misc_feature: MA Experiment ID: 20000234 Result: Down-regulated in Transcription
  misc_feature: MA Experiment 20000234 PARAMETER Experiment Name: At_Siliques_P Parameter: Age (day) Value: 21
  misc_feature: MA Experiment 20000234 PARAMETER Experiment Name: At_Siliques_P Parameter: Organism Value: A. thaliana
  misc_feature: MA Experiment 20000234 PARAMETER Experiment Name: At_Siliques_P Parameter: Plant Line Value: WS
  misc_feature: MA Experiment 20000234 PARAMETER Experiment Name: At_Siliques_P Parameter: Tissue Value: Less Than 5mm Siliques vs. Whole Plant
  misc_feature: MA Experiment ID: 20000235 Result: Down-regulated in Transcription
  misc_feature: MA Experiment 20000235 PARAMETER Experiment Name: At_Siliques_P Parameter: Age (day) Value: 21
  misc_feature: MA Experiment 20000235 PARAMETER Experiment Name: At_Siliques_P Parameter: Organism Value: A. thaliana
  misc_feature: MA Experiment 20000235 PARAMETER Experiment Name: At_Siliques_P Parameter: Plant Line Value: WS
  misc_feature: MA Experiment 20000235 PARAMETER Experiment Name: At_Siliques_P Parameter: Tissue Value: 5-10mm Siliques vs. Whole Plant
  misc_feature: MA Experiment ID: 20000265 Result: Down-regulated in Transcription
  misc_feature: MA Experiment 20000265 PARAMETER Experiment Name: At_Open_Flower_P Parameter: Age (day) Value: 21
  misc_feature: MA Experiment 20000265 PARAMETER Experiment Name: At_Open_Flower_P Parameter: Plant Line Value: WS
  misc_feature: MA Experiment 20000265 PARAMETER Experiment Name: At_Open_Flower_P Parameter: Tissue Value: Closed Flower vs. Whole Plant
  misc_feature: MA Experiment ID: 20000286 Result: Down-regulated in Transcription
  misc_feature: MA Experiment 20000286 PARAMETER Experiment Name: At_Open_Flower_P Parameter: Age (day) Value: 21
  misc_feature: MA Experiment 20000286 PARAMETER Experiment Name: At_Open_Flower_P Parameter: Plant Line Value: WS
  misc_feature: MA Experiment 20000286 PARAMETER Experiment Name: At_Open_Flower_P Parameter: Tissue Value: Half Open vs. Whole Plant
  misc_feature: MA Experiment ID: 20000437 Result: Up-regulated in Transcription
  misc_feature: MA Experiment 20000437 PARAMETER Experiment Name: At_Drought_P Parameter: Age (day) Value: 8
  misc_feature: MA Experiment 20000437 PARAMETER Experiment Name: At_Drought_P Parameter: Organism Value: A. thaliana
  misc_feature: MA Experiment 20000437 PARAMETER Experiment Name: At_Drought_P Parameter: Plant Line Value: WS
  misc_feature: MA Experiment 20000437 PARAMETER Experiment Name: At_Drought_P Parameter: Timepoint (hr) Value: 24
  misc_feature: MA Experiment 20000437 PARAMETER Experiment Name: At_Drought_P Parameter: Tissue Value: Whole Plant
  misc_feature: MA Experiment 20000437 PARAMETER Experiment Name: At_Drought_P Parameter: Treatment Value: Drought vs. No Drought
  misc_feature: MA Experiment ID: 20000438 Result: Down-regulated in Transcription
  misc_feature: MA Experiment 20000438 PARAMETER Experiment Name: At_Shoots__P Parameter: Age (day) Value: 14
  misc_feature: MA Experiment 20000438 PARAMETER Experiment Name: At_Shoots__P Parameter: Tissue Value: Shoots vs. Whole Plant
  misc_feature: MA Experiment ID: 20000573 Result: Up-regulated in Transcription
  misc_feature: MA Experiment 20000573 PARAMETER Experiment Name: At_100uM_ABA_Mutants__P Parameter: Organism Value: A. thaliana
  misc_feature: MA Experiment 20000573 PARAMETER Experiment Name: At_100uM_ABA_Mutants__P Parameter: Plant Line Value: CS22 vs. Ler wt
  misc_feature: MA Experiment 20000573 PARAMETER Experiment Name: At_100uM_ABA_Mutants__P Parameter: Timepoint (hr) Value: N/A
  misc_feature: MA Experiment 20000573 PARAMETER Experiment Name: At_100uM_ABA_Mutants__P Parameter: Tissue Value: Whole Plant
  misc_feature: MA Experiment 20000573 PARAMETER Experiment Name: At_100uM_ABA_Mutants__P Parameter: Treatment Value: None
  misc_feature: MA Experiment ID: 20000574 Result: Up-regulated in Transcription
  misc_feature: MA Experiment 20000574 PARAMETER Experiment Name: At_100uM_ABA_Mutants__P Parameter: Organism Value: A. thaliana
  misc_feature: MA Experiment 20000574 PARAMETER Experiment Name: At_100uM_ABA_Mutants__P Parameter: Plant Line Value: CS23 vs. Ler wt
  misc_feature: MA Experiment 20000574 PARAMETER Experiment Name: At_100uM_ABA_Mutants__P Parameter: Timepoint (hr) Value: N/A
  misc_feature: MA Experiment 20000574 PARAMETER Experiment Name: At_100uM_ABA_Mutants__P Parameter: Tissue Value: Whole Plant
  misc_feature: MA Experiment 20000574 PARAMETER Experiment Name: At_100uM_ABA_Mutants__P Parameter: Treatment Value: None
  misc_feature: MA Experiment ID: 20000794 Result: Up-regulated in Transcription
  misc_feature: MA Experiment 20000794 PARAMETER Experiment Name: At_Petals_P Parameter: Age (day) Value: 23-25 days
  misc_feature: MA Experiment 20000794 PARAMETER Experiment Name: At_Petals_P Parameter: Plant Line Value: WS
  misc_feature: MA Experiment 20000794 PARAMETER Experiment Name: At_Petals_P Parameter: Tissue Value: Petals vs. Whole plant
  misc_feature: MA Experiment ID: 20001247 Result: Up-regulated in Transcription
  misc_feature: MA Experiment 20001247 PARAMETER Experiment Name: At_Far-red-induction_P Parameter: Age (day) Value: 7
  misc_feature: MA Experiment 20001247 PARAMETER Experiment Name: At_Far-red-induction_P Parameter: Light Value: Far-red vs. White
  misc_feature: MA Experiment 20001247 PARAMETER Experiment Name: At_Far-red-induction_P Parameter: Organism Value: A. thaliana
  misc_feature: MA Experiment 20001247 PARAMETER Experiment Name: At_Far-red-induction_P Parameter: Plant Line Value: Columbia
  misc_feature: MA Experiment 20001247 PARAMETER Experiment Name: At_Far-red-induction_P Parameter: Timepoint (hr) Value: 1
  misc_feature: MA Experiment 20001247 PARAMETER Experiment Name: At_Far-red-induction_P Parameter: Tissue Value: Whole Plant
  misc_feature: MA Experiment ID: 20001248 Result: Up-regulated in Transcription
  misc_feature: MA Experiment 20001248 PARAMETER Experiment Name: At_Far-red-induction_P Parameter: Age (day) Value: 7
  misc_feature: MA Experiment 20001248 PARAMETER Experiment Name: At_Far-red-induction_P Parameter: Light Value: Far-red vs. White
  misc_feature: MA Experiment 20001248 PARAMETER Experiment Name: At_Far-red-induction_P Parameter: Organism Value: A. thaliana
  misc_feature: MA Experiment 20001248 PARAMETER Experiment Name: At_Far-red-induction_P Parameter: Plant Line Value: Columbia
  misc_feature: MA Experiment 20001248 PARAMETER Experiment Name: At_Far-red-induction_P Parameter: Timepoint (hr) Value: 4
  misc_feature: MA Experiment 20001248 PARAMETER Experiment Name: At_Far-red-induction_P Parameter: Tissue Value: Whole Plant
  misc_feature: MA Experiment ID: 20001450 Result: Up-regulated in Transcription
  misc_feature: MA Experiment 20001450 PARAMETER Experiment Name: At_Far-red-induction_P Parameter: Age (day) Value: 7
  misc_feature: MA Experiment 20001450 PARAMETER Experiment Name: At_Far-red-induction_P Parameter: Light Value: Far-red vs. White
  misc_feature: MA Experiment 20001450 PARAMETER Experiment Name: At_Far-red-induction_P Parameter: Organism Value: A. thaliana
  misc_feature: MA Experiment 20001450 PARAMETER Experiment Name: At_Far-red-induction_P Parameter: Plant Line Value: Columbia
  misc_feature: MA Experiment 20001450 PARAMETER Experiment Name: At_Far-red-induction_P Parameter: Timepoint (hr) Value: 8
  misc_feature: MA Experiment 20001450 PARAMETER Experiment Name: At_Far-red-induction_P Parameter: Tissue Value: Whole Plant
  misc_feature: MA Experiment ID: 20001451 Result: Up-regulated in Transcription
  misc_feature: MA Experiment 20001451 PARAMETER Experiment Name: At_Far-red-induction_P Parameter: Age (day) Value: 7
  misc_feature: MA Experiment 20001451 PARAMETER Experiment Name: At_Far-red-induction_P Parameter: Light Value: Far-red vs. White
  misc_feature: MA Experiment 20001451 PARAMETER Experiment Name: At_Far-red-induction_P Parameter: Organism Value: A. thaliana
  misc_feature: MA Experiment 20001451 PARAMETER Experiment Name: At_Far-red-induction_P Parameter: Plant Line Value: Columbia
  misc_feature: MA Experiment 20001451 PARAMETER Experiment Name: At_Far-red-induction_P Parameter: Timepoint (hr) Value: 24
  misc_feature: MA Experiment 20001451 PARAMETER Experiment Name: At_Far-red-induction_P Parameter: Tissue Value: Whole Plant
cacgcgtccgggactcattgctcatatcttcttctcaattccaattttgtaatccttatctcaaattaatttctatttttataactacttaatctcaattagaagaagcctgctctctaataacaaaaaaaaaaaagccgtttgggatttcttttacacgaacacattcttccgatctttcttgtttttaacttaccggtaataacgaagatatgcagaggtttttctccgccagatcgattctcggttacgccgtcaagacgcggaggaggtctttctcttctcgttcttcgtctctcctattcgacgacactcagttacagtttaaagaaagtgtatccaagtttgcgcaagatattatcgctcctcatgcagaacgaattgataaaactaattcatttccaaaggatgtaaacttatggaagctaatgggtgagtttaatctccatggaatcactgcgccagaggaatatggagggctaggtcttggttacttgtatcattgtattgcaatggaggaaatcagtcgggcctcgggttcagttgctttgtcttatggtgctcattccaacctttgcatcaatcaattggtgaggaatggaactgcagcccaaaaggaaaagtatttgccaaagcttatcagtggagagcatgttggtgctcttgcaatgagtgaacctaatgctggttcagatgttgttggcatgaaatgcaaggctgagaaggtagatggtggttatatactaaatggcaacaagatgtggtgcactaatggtccatctgctgaaacactggttgtttacgcgaaaactgatacaaaagcaggttccaaaggaatcacggctttcatcatagagaaaggaatgaccggattcagtactgctcagaaattggacaaactaggaatgcggggaagcgatacgtgtgagcttgtttttgagaattgcttcgttccagaggaaaatattctagacaaggaaggaaaaggagtgtatgttctgatgtcaggtctggatttggagagacttgttttagcagctgggcccttagggatcatgcaggcatgcctcgacaatgtacttccctatattcgccagagagaacaatttggtcgtccagttggggaatttcagtttatacagggtaaagttgctgatatgtacactgcattacaatcttcaaggtcatacgtttactctgttgcgagggactgtgacaatgggaaagttgacccaaaggactgcgccggaactattctttgtgcggccgagagagcaacgcaggtcgctttacaggcgatacaatgtttaggcggaaatggatacataaacgaatatgcaacaggacgccttctaagagatgcaaagctatatgaaatcggtgcagggacaagcgagatcagaaggattgtcatcggtcgcgagcttttcaaagaagaatagagataagtctgttttctgcattgccaatgcgacattttcattctgtacacgtatatataattcacagtgtccttaataacctcacaataagaaaaatagcttcaagcaatcctctagaaaccatatcaattattagtcacattatgtgtgacatgttatcacgataccagcatgccaatctaacactgacacttctggttaaacttactattttgtc

SEQ ID NO: 22499 - protein, 409 aa, Arabidopsis thaliana
  peptide (1)..(409): Ceres Seq. ID no. 13490539
  misc_feature (257)..(406): Pfam Name: Acyl-CoA dehydrogenase, C-terminal domain Pfam Description: Acyl-CoA dehydrogenase, C-terminal domain
  misc_feature (32)..(403): Homolog of NCBI NO: 9789985 NR Description: isovaleryl coenzyme A dehydrogenase
  misc_feature (28)..(408): Homolog of NCBI NO: 23056088 NR Description: hypothetical protein [Geobacter metallireducens]
  misc_feature (24)..(406): Homolog of NCBI NO: 22963587 NR Description: hypothetical protein [Rhodopseudomonas palustris]
  misc_feature (13)..(409): Homolog of NCBI NO: 25453061 NR Description: Isovaleryl-CoA dehydrogenase 2, mitochondrial
  misc_feature (1)..(409): Homolog of NCBI NO: 25453062 NR Description: Isovaleryl-CoA dehydrogenase 1, mitochondrial
  misc_feature (3)..(409): Homolog of NCBI NO: 5869967 NR Description: auxin binding protein (ABP44); isovaleryl-CoA
  misc_feature (3)..(409): Homolog of NCBI NO: 5869965 NR Description: Isovaleryl-CoA Dehydrogenase; auxin binding
  misc_feature (1)..(409): Homolog of NCBI NO: 17064982 NR Description: isovaleryl-CoA-dehydrogenase precursor (IVD)
  misc_feature (1)..(409): Homolog of NCBI NO: 15230664 NR Description: isovaleryl-CoA-dehydrogenase precursor (IVD)
  misc_feature (1)..(409): Homolog of NCBI NO: 25090618 NR Description: Isovaleryl-CoA dehydrogenase, mitochondrial
MQRFFSARSILGYAVKTRRRSFSSRSSSLLFDDTQLQFKESVSKFAQDIIAPHAERIDKTNSFPKDVNLWKLMGEFNLHGITAPEEYGGLGLGYLYHCIAMEEISRASGSVALSYGAHSNLCINQLVRNGTAAQKEKYLPKLISGEHVGALAMSEPNAGSDVVGMKCKAEKVDGGYILNGNKMWCTNGPSAETLVVYAKTDTKAGSKGITAFIIEKGMTGFSTAQKLDKLGMRGSDTCELVFENCFVPEENILDKEGKGVYVLMSGLDLERLVLAAGPLGIMQACLDNVLPYIRQREQFGRPVGEFQFIQGKVADMYTALQSSRSYVYSVARDCDNGKVDPKDCAGTILCAAERATQVALQAIQCLGGNGYINEYATGRLLRDAKLYEIGAGTSEIRRIVIGRELFKEE

SEQ ID NO: 22500 - protein, 337 aa, Arabidopsis thaliana
  peptide (1)..(337): Ceres Seq. ID no. 13490540
  misc_feature (185)..(334): Pfam Name: Acyl-CoA dehydrogenase, C-terminal domain Pfam Description: Acyl-CoA dehydrogenase, C-terminal domain
  misc_feature (1)..(334): Homolog of NCBI NO: 22963587 NR Description: hypothetical protein [Rhodopseudomonas palustris]
  misc_feature (1)..(337): Homolog of NCBI NO: 25453061 NR Description: Isovaleryl-CoA dehydrogenase 2, mitochondrial
  misc_feature (1)..(337): Homolog of NCBI NO: 25453062 NR Description: Isovaleryl-CoA dehydrogenase 1, mitochondrial
  misc_feature (1)..(337): Homolog of NCBI NO: 5869967 NR Description: auxin binding protein (ABP44); isovaleryl-CoA
  misc_feature (1)..(331): Homolog of NCBI NO: 9789985 NR Description: isovaleryl coenzyme A dehydrogenase
  misc_feature (1)..(336): Homolog of NCBI NO: 23056088 NR Description: hypothetical protein [Geobacter metallireducens]
  misc_feature (1)..(337): Homolog of NCBI NO: 5869965 NR Description: Isovaleryl-CoA Dehydrogenase; auxin binding
  misc_feature (1)..(337): Homolog of NCBI NO: 17064982 NR Description: isovaleryl-CoA-dehydrogenase precursor (IVD)
  misc_feature (1)..(337): Homolog of NCBI NO: 15230664 NR Description: isovaleryl-CoA-dehydrogenase precursor (IVD)
  misc_feature (1)..(337): Homolog of NCBI NO: 25090618 NR Description: Isovaleryl-CoA dehydrogenase, mitochondrial
MGEFNLHGITAPEEYGGLGLGYLYHCIAMEEISRASGSVALSYGAHSNLCINQLVRNGTAAQKEKYLPKLISGEHVGALAMSEPNAGSDVVGMKCKAEKVDGGYILNGNKMWCTNGPSAETLVVYAKTDTKAGSKGITAFIIEKGMTGFSTAQKLDKLGMRGSDTCELVFENCFVPEENILDKEGKGVYVLMSGLDLERLVLAAGPLGIMQACLDNVLPYIRQREQFGRPVGEFQFIQGKVADMYTALQSSRSYVYSVARDCDNGKVDPKDCAGTILCAAERATQVALQAIQCLGGNGYINEYATGRLLRDAKLYEIGAGTSEIRRIVIGRELFKEE

SEQ ID NO: 22501 - protein, 309 aa, Arabidopsis thaliana
  peptide (1)..(309): Ceres Seq. ID no. 13490541
  misc_feature (157)..(306): Pfam Name: Acyl-CoA dehydrogenase, C-terminal domain Pfam Description: Acyl-CoA dehydrogenase, C-terminal domain
  misc_feature (1)..(303): Homolog of NCBI NO: 9789985 NR Description: isovaleryl coenzyme A dehydrogenase
  misc_feature (1)..(308): Homolog of NCBI NO: 23056088 NR Description: hypothetical protein [Geobacter metallireducens]
  misc_feature (1)..(306): Homolog of NCBI NO: 22963587 NR Description: hypothetical protein [Rhodopseudomonas palustris]
  misc_feature (1)..(309): Homolog of NCBI NO: 25453061 NR Description: Isovaleryl-CoA dehydrogenase 2, mitochondrial
  misc_feature (1)..(309): Homolog of NCBI NO: 25453062 NR Description: Isovaleryl-CoA dehydrogenase 1, mitochondrial
  misc_feature (1)..(309): Homolog of NCBI NO: 5869967 NR Description: auxin binding protein (ABP44); isovaleryl-CoA
  misc_feature (1)..(309): Homolog of NCBI NO: 5869965 NR Description: Isovaleryl-CoA Dehydrogenase; auxin binding
  misc_feature (1)..(309): Homolog of NCBI NO: 17064982 NR Description: isovaleryl-CoA-dehydrogenase precursor (IVD)
  misc_feature (1)..(309): Homolog of NCBI NO: 15230664 NR Description: isovaleryl-CoA-dehydrogenase precursor (IVD)
  misc_feature (1)..(309): Homolog of NCBI NO: 25090618 NR Description: Isovaleryl-CoA dehydrogenase, mitochondrial
MEEISRASGSVALSYGAHSNLCINQLVRNGTAAQKEKYLPKLISGEHVGALAMSEPNAGSDVVGMKCKAEKVDGGYILNGNKMWCTNGPSAETLVVYAKTDTKAGSKGITAFIIEKGMTGFSTAQKLDKLGMRGSDTCELVFENCFVPEENILDKEGKGVYVLMSGLDLERLVLAAGPLGIMQACLDNVLPYIRQREQFGRPVGEFQFIQGKVADMYTALQSSRSYVYSVARDCDNGKVDPKDCAGTILCAAERATQVALQAIQCLGGNGYINEYATGRLLRDAKLYEIGAGTSEIRRIVIGRELFKEE

SEQ ID NO: 22502 - DNA, 775 bp, Arabidopsis thaliana
  misc_feature (1)..(775): Ceres Seq. ID no. 12483422
  misc_feature: MA Experiment ID: 108461 Result: Up-regulated in Transcription
  misc_feature: MA Experiment 108461 PARAMETER Experiment Name: At_Germinating_Seeds_cDNA_P Parameter: Age (day) Value: 1 vs. 0
  misc_feature: MA Experiment 108461 PARAMETER Experiment Name: At_Germinating_Seeds_cDNA_P Parameter: Tissue Value: Germinating Seeds
  misc_feature: MA Experiment ID: 108462 Result: Up-regulated in Transcription
  misc_feature: MA Experiment 108462 PARAMETER Experiment Name: At_Germinating_Seeds_cDNA_P Parameter: Age (day) Value: 2 vs. 0
  misc_feature: MA Experiment 108462 PARAMETER Experiment Name: At_Germinating_Seeds_cDNA_P Parameter: Tissue Value: Germinating Seeds
  misc_feature: MA Experiment ID: 108488 Result: Up-regulated in Transcription
  misc_feature: MA Experiment ID: 108595 Result: Down-regulated in Transcription
  misc_feature: MA Experiment 108595 PARAMETER Experiment Name: At_Ler-pi_Ovule_cDNA_P Parameter: Plant Line Value: null
  misc_feature: MA Experiment ID: 20000070 Result: Down-regulated in Transcription
  misc_feature: MA Experiment 20000070 PARAMETER Experiment Name: At_100uM_ABA_Mutants_cDNA_P Parameter: Plant Line Value: CS24
  misc_feature: MA Experiment 20000070 PARAMETER Experiment Name: At_100uM_ABA_Mutants_cDNA_P Parameter: Timepoint (hr) Value: 6
  misc_feature: MA Experiment 20000070 PARAMETER Experiment Name: At_100uM_ABA_Mutants_cDNA_P Parameter: Tissue Value: Aerial
  misc_feature: MA Experiment 20000070 PARAMETER Experiment Name: At_100uM_ABA_Mutants_cDNA_P Parameter: Treatment Value: 100uM ABA vs. No Treatment
  misc_feature: MA Experiment ID: 20000071 Result: Down-regulated in Transcription
  misc_feature: MA Experiment 20000071 PARAMETER Experiment Name: At_100uM_ABA_Mutants_cDNA_P Parameter: Plant Line Value: CS8104
  misc_feature: MA Experiment 20000071 PARAMETER Experiment Name: At_100uM_ABA_Mutants_cDNA_P Parameter: Timepoint (hr) Value: 6
  misc_feature: MA Experiment 20000071 PARAMETER Experiment Name: At_100uM_ABA_Mutants_cDNA_P Parameter: Tissue Value: Aerial
  misc_feature: MA Experiment 20000071 PARAMETER Experiment Name: At_100uM_ABA_Mutants_cDNA_P Parameter: Treatment Value: 100uM ABA vs. No Treatment
  misc_feature: MA Experiment ID: 20000072 Result: Down-regulated in Transcription
  misc_feature: MA Experiment 20000072 PARAMETER Experiment Name: At_100uM_ABA_Mutants_cDNA_P Parameter: Plant Line Value: CS8105
  misc_feature: MA Experiment 20000072 PARAMETER Experiment Name: At_100uM_ABA_Mutants_cDNA_P Parameter: Timepoint (hr) Value: 6
  misc_feature: MA Experiment 20000072 PARAMETER Experiment Name: At_100uM_ABA_Mutants_cDNA_P Parameter: Tissue Value: Aerial
  misc_feature: MA Experiment 20000072 PARAMETER Experiment Name: At_100uM_ABA_Mutants_cDNA_P Parameter: Treatment Value: 100uM ABA vs. No Treatment
  misc_feature: MA Experiment ID: 20000086 Result: Down-regulated in Transcription
  misc_feature: MA Experiment 20000086 PARAMETER Experiment Name: At_100uM_ABA_Mutants_cDNA_P Parameter: Plant Line Value: CS22
  misc_feature: MA Experiment 20000086 PARAMETER Experiment Name: At_100uM_ABA_Mutants_cDNA_P Parameter: Timepoint (hr) Value: 6
  misc_feature: MA Experiment 20000086 PARAMETER Experiment Name: At_100uM_ABA_Mutants_cDNA_P Parameter: Tissue Value: Aerial
  misc_feature: MA Experiment 20000086 PARAMETER Experiment Name: At_100uM_ABA_Mutants_cDNA_P Parameter: Treatment Value: 100uM ABA vs. No Treatment
  misc_feature: MA Experiment ID: 20000117 Result: Down-regulated in Transcription
  misc_feature: MA Experiment 20000117 PARAMETER Experiment Name: At_100uM_ABA_Mutants_cDNA_P Parameter: Plant Line Value: Columbia
  misc_feature: MA Experiment 20000117 PARAMETER Experiment Name: At_100uM_ABA_Mutants_cDNA_P Parameter: Timepoint (hr) Value: 6
  misc_feature: MA Experiment 20000117 PARAMETER Experiment Name: At_100uM_ABA_Mutants_cDNA_P Parameter: Tissue Value: Aerial
  misc_feature: MA Experiment 20000117 PARAMETER Experiment Name: At_100uM_ABA_Mutants_cDNA_P Parameter: Treatment Value: 100uM ABA vs. No Treatment
  misc_feature: MA Experiment ID: 20000180 Result: Up-regulated in Transcription
  misc_feature: MA Experiment 20000180 PARAMETER Experiment Name: At_Germinating_Seeds_P Parameter: Age (hr) Value: 24 vs. 0
  misc_feature: MA Experiment 20000180 PARAMETER Experiment Name: At_Germinating_Seeds_P Parameter: Tissue Value: Germinating Seeds
  misc_feature: MA Experiment ID: 20000185 Result: Down-regulated in Transcription
  misc_feature: MA Experiment 20000185 PARAMETER Experiment Name: At_Roots__P Parameter: Age (day) Value: 7 vs. 21
  misc_feature: MA Experiment 20000185 PARAMETER Experiment Name: At_Roots__P Parameter: Organism Value: A. thaliana
  misc_feature: MA Experiment 20000185 PARAMETER Experiment Name: At_Roots__P Parameter: Tissue Value: Roots vs. Whole Plant
  misc_feature: MA Experiment ID: 20000437 Result: Down-regulated in Transcription
  misc_feature: MA Experiment 20000437 PARAMETER Experiment Name: At_Drought_P Parameter: Age (day) Value: 8
  misc_feature: MA Experiment 20000437 PARAMETER Experiment Name: At_Drought_P Parameter: Organism Value: A. thaliana
  misc_feature: MA Experiment 20000437 PARAMETER Experiment Name: At_Drought_P Parameter: Plant Line Value: WS
  misc_feature: MA Experiment 20000437 PARAMETER Experiment Name: At_Drought_P Parameter: Timepoint (hr) Value: 24
  misc_feature: MA Experiment 20000437 PARAMETER Experiment Name: At_Drought_P Parameter: Tissue Value: Whole Plant
  misc_feature: MA Experiment 20000437 PARAMETER Experiment Name: At_Drought_P Parameter: Treatment Value: Drought vs. No Drought
  misc_feature: MA Experiment ID: 20000438 Result: Up-regulated in Transcription
  misc_feature: MA Experiment 20000438 PARAMETER Experiment Name: At_Shoots__P Parameter: Age (day) Value: 14
  misc_feature: MA Experiment 20000438 PARAMETER Experiment Name: At_Shoots__P Parameter: Tissue Value: Shoots vs. Whole Plant
  misc_feature: MA Experiment ID: 20000439 Result: Down-regulated in Transcription
  misc_feature: MA Experiment 20000439 PARAMETER Experiment Name: At_Roots__P Parameter: Age (day) Value: 14 vs. 21
  misc_feature: MA Experiment 20000439 PARAMETER Experiment Name: At_Roots__P Parameter: Organism Value: A. thaliana
  misc_feature: MA Experiment 20000439 PARAMETER Experiment Name: At_Roots__P Parameter: Tissue Value: Roots vs. Whole Plant
  misc_feature: MA Experiment ID: 20001248 Result: Down-regulated in Transcription
  misc_feature: MA Experiment 20001248 PARAMETER Experiment Name: At_Far-red-induction_P Parameter: Age (day) Value: 7
  misc_feature: MA Experiment 20001248 PARAMETER Experiment Name: At_Far-red-induction_P Parameter: Light Value: Far-red vs. White
  misc_feature: MA Experiment 20001248 PARAMETER Experiment Name: At_Far-red-induction_P Parameter: Organism Value: A. thaliana
  misc_feature: MA Experiment 20001248 PARAMETER Experiment Name: At_Far-red-induction_P Parameter: Plant Line Value: Columbia
  misc_feature: MA Experiment 20001248 PARAMETER Experiment Name: At_Far-red-induction_P Parameter: Timepoint (hr) Value: 4
  misc_feature: MA Experiment 20001248 PARAMETER Experiment Name: At_Far-red-induction_P Parameter: Tissue Value: Whole Plant
  misc_feature: MA Experiment ID: 20001450 Result: Down-regulated in Transcription
  misc_feature: MA Experiment 20001450 PARAMETER Experiment Name: At_Far-red-induction_P Parameter: Age (day) Value: 7
  misc_feature: MA Experiment 20001450 PARAMETER Experiment Name: At_Far-red-induction_P Parameter: Light Value: Far-red vs. White
  misc_feature: MA Experiment 20001450 PARAMETER Experiment Name: At_Far-red-induction_P Parameter: Organism Value: A. thaliana
  misc_feature: MA Experiment 20001450 PARAMETER Experiment Name: At_Far-red-induction_P Parameter: Plant Line Value: Columbia
  misc_feature: MA Experiment 20001450 PARAMETER Experiment Name: At_Far-red-induction_P Parameter: Timepoint (hr) Value: 8
  misc_feature: MA Experiment 20001450 PARAMETER Experiment Name: At_Far-red-induction_P Parameter: Tissue Value: Whole Plant
  misc_feature: MA Experiment ID: 20001757 Result: Up-regulated in Transcription
  misc_feature: MA Experiment 20001757 PARAMETER Experiment Name: At_50mM_NH4NO3_L-to-H_P Parameter: Timepoint (hr) Value: 6
  misc_feature: MA Experiment 20001757 PARAMETER Experiment Name: At_50mM_NH4NO3_L-to-H_P Parameter: Tissue Value: Leaf
  misc_feature: MA Experiment 20001757 PARAMETER Experiment Name: At_50mM_NH4NO3_L-to-H_P Parameter: Treatment Value: 50mM NH4NO3 vs 100mM Mannitol
  misc_feature: MA Experiment ID: 20001905 Result: Down-regulated in Transcription
  misc_feature: MA Experiment 20001905 PARAMETER Experiment Name: At_Drought_Reproduction_P Parameter: Age (day) Value: 40
  misc_feature: MA Experiment 20001905 PARAMETER Experiment Name: At_Drought_Reproduction_P Parameter: Organism Value: A. thaliana
  misc_feature: MA Experiment 20001905 PARAMETER Experiment Name: At_Drought_Reproduction_P Parameter: Plant Line Value: WS
  misc_feature: MA Experiment 20001905 PARAMETER Experiment Name: At_Drought_Reproduction_P Parameter: Timepoint (day) Value: 10
  misc_feature: MA Experiment 20001905 PARAMETER Experiment Name: At_Drought_Reproduction_P Parameter: Tissue Value: Rosettes
  misc_feature: MA Experiment 20001905 PARAMETER Experiment Name: At_Drought_Reproduction_P Parameter: Treatment Value: Drought vs. No Drought
acacacaatccaatcaaaacacacagagagaagaaaaactcagaagaaaagccaaagagtgaaacaaaaatggcgtcgacgactctctcaatcgcaacaacaatccgttcctcatcttatcctactctcgcttccatcaatcacttcccttcccgaaccaccaccatcgaattcccctctcgcttcggtggtggttcatcatccacattgacccaccgtgcaacccatctccgtccaatcgccgccgtcgaagctccggagaaaatcgagaagatcggatccgaaatctcatccctaaccctcgaagaagctcgtatcctctcgactatctccaagacaaattcggtgtctccccactctctttagcccccgcagcagcggcggttgctgctccagccgaacggtggcgcggcggctgtagtggaagagcaaacagagttcgatgtggttatcaatgaagttcccagcagttcccgtattgcagtgattaaagctgttagggctttaactagcttggcgttgaaggaagctaaggagctaatcgaaggattaccaaagaagtttaaagaaggtatcactaaagatgaagctgaagaagctaagaagactcttgaagaagctggtgctaaagtctccattgcttaaggtttttattaaaaaaaaaaaagaagttgttatcttttctggaatttgattggtcttttgtgttgtttagtatagtttgcgtctggaattgttgagaaattgttgtaatttgaatcacatttggtttccc

SEQ ID NO: 22503 - protein, 121 aa, Arabidopsis thaliana
  peptide (1)..(121): Ceres Seq. ID no. 12483423
  misc_feature (24)..(121): Homolog of NCBI NO: 133085 NR Description: 50S RIBOSOMAL PROTEIN L12, CHLOROPLAST PRECURSOR
  misc_feature (24)..(121): Homolog of NCBI NO: 133088 NR Description: 50S RIBOSOMAL PROTEIN L12, CHLOROPLAST PRECURSOR
  misc_feature (24)..(121): Homolog of NCBI NO: 20020 NR Description: ribosomal protein L12-1a [Nicotiana tabacum]
  misc_feature (24)..(121): Homolog of NCBI NO: 548746 NR Description: 50S RIBOSOMAL PROTEIN L12, CHLOROPLAST PRECURSOR
  misc_feature (24)..(121): Homolog of NCBI NO: 541896 NR Description: ribosomal protein L12.B precursor, chloroplast -
  misc_feature (24)..(121): Homolog of NCBI NO: 15232275 NR Description: 50S ribosomal protein L12-B; protein id:
  misc_feature (24)..(121): Homolog of NCBI NO: 21592776 NR Description: 50S ribosomal protein L12-C [Arabidopsis thaliana]
  misc_feature (24)..(121): Homolog of NCBI NO: 15232276 NR Description: 50S ribosomal protein L12-C
  misc_feature (24)..(121): Homolog of NCBI NO: 541897 NR Description: ribosomal protein L12.C precursor, chloroplast -
  misc_feature (24)..(121): Homolog of NCBI NO: 15232274 NR Description: 50S ribosomal protein L12-A
THNPIKTHREKKNSEEKPKSETKMASTTLSIATTIRSSSYPTLASINHFPSRTTTIEFPSRFGGGSSSTLTHRATHLRPIAAVEAPEKIEKIGSEISSLTLEEARILSTISKTNSVSPHSL

SEQ ID NO: 22504 - protein, 98 aa, Arabidopsis thaliana
  peptide (1)..(98): Ceres Seq. ID no. 12483424
  misc_feature (1)..(98): Homolog of NCBI NO: 133085 NR Description: 50S RIBOSOMAL PROTEIN L12, CHLOROPLAST PRECURSOR
  misc_feature (1)..(98): Homolog of NCBI NO: 133088 NR Description: 50S RIBOSOMAL PROTEIN L12, CHLOROPLAST PRECURSOR
  misc_feature (1)..(98): Homolog of NCBI NO: 20020 NR Description: ribosomal protein L12-1a [Nicotiana tabacum]
  misc_feature (1)..(98): Homolog of NCBI NO: 548746 NR Description: 50S RIBOSOMAL PROTEIN L12, CHLOROPLAST PRECURSOR
  misc_feature (1)..(98): Homolog of NCBI NO: 541896 NR Description: ribosomal protein L12.B precursor, chloroplast -
  misc_feature (1)..(98): Homolog of NCBI NO: 15232275 NR Description: 50S ribosomal protein L12-B; protein id:
  misc_feature (1)..(98): Homolog of NCBI NO: 21592776 NR Description: 50S ribosomal protein L12-C [Arabidopsis thaliana]
  misc_feature (1)..(98): Homolog of NCBI NO: 15232276 NR Description: 50S ribosomal protein L12-C
  misc_feature (1)..(98): Homolog of NCBI NO: 541897 NR Description: ribosomal protein L12.C precursor, chloroplast -
  misc_feature (1)..(98): Homolog of NCBI NO: 15232274 NR Description: 50S ribosomal protein L12-A
MASTTLSIATTIRSSSYPTLASINHFPSRTTTIEFPSRFGGGSSSTLTHRATHLRPIAAVEAPEKIEKIGSEISSLTLEEARILSTISKTNSVSPHSL

SEQ ID NO: 22505 - protein, 69 aa, Arabidopsis thaliana
  peptide (1)..(69): Ceres Seq. ID no. 12483425
HTIQSKHTERRKTQKKSQRVKQKWRRRLSQSQQQSVPHLILLSLPSITSLPEPPPSNSPLASVVVHHPH

SEQ ID NO: 22506 - DNA, 1407 bp, Arabidopsis thaliana
  misc_feature (1)..(1407): Ceres Seq. ID no. 12371114
  misc_feature: MA Experiment ID: 108561 Result: Up-regulated in Transcription
  misc_feature: MA Experiment 108561 PARAMETER Experiment Name: At_100uM_ABA_cDNA_P Parameter: Timepoint (hr) Value: 6
  misc_feature: MA Experiment 108561 PARAMETER Experiment Name: At_100uM_ABA_cDNA_P Parameter: Tissue Value: Aerial
  misc_feature: MA Experiment 108561 PARAMETER Experiment Name: At_100uM_ABA_cDNA_P Parameter: Treatment Value: 100uM ABA vs. No Treatment
  misc_feature: MA Experiment ID: 108569 Result: Up-regulated in Transcription
  misc_feature: MA Experiment 108569 PARAMETER Experiment Name: At_0.001%_MeJA__cDNA_P Parameter: Timepoint (hr) Value: 6
  misc_feature: MA Experiment 108569 PARAMETER Experiment Name: At_0.001%_MeJA__cDNA_P Parameter: Tissue Value: Aerial
  misc_feature: MA Experiment 108569 PARAMETER Experiment Name: At_0.001%_MeJA__cDNA_P Parameter: Treatment Value: 0.001% MeJA vs. No Treatment
  misc_feature: MA Experiment ID: 108572 Result: Up-regulated in Transcription
  misc_feature: MA Experiment 108572 PARAMETER Experiment Name: At_Drought_cDNA_P Parameter: Timepoint (hr) Value: 1
  misc_feature: MA Experiment 108572 PARAMETER Experiment Name: At_Drought_cDNA_P Parameter: Tissue Value: Aerial
  misc_feature: MA Experiment 108572 PARAMETER Experiment Name: At_Drought_cDNA_P Parameter: Treatment Value: Drought vs. No Drought
  misc_feature: MA Experiment ID: 108573 Result: Up-regulated in Transcription
  misc_feature: MA Experiment 108573 PARAMETER Experiment Name: At_Drought_cDNA_P Parameter: Timepoint (hr) Value: 6
  misc_feature: MA Experiment 108573 PARAMETER Experiment Name: At_Drought_cDNA_P Parameter: Tissue Value: Aerial
  misc_feature: MA Experiment 108573 PARAMETER Experiment Name: At_Drought_cDNA_P Parameter: Treatment Value: Drought vs. No Drought
  misc_feature: MA Experiment ID: 108574 Result: Up-regulated in Transcription
  misc_feature: MA Experiment 108574 PARAMETER Experiment Name: At_Wounding__cDNA_P Parameter: Timepoint (hr) Value: 1
  misc_feature: MA Experiment 108574 PARAMETER Experiment Name: At_Wounding__cDNA_P Parameter: Tissue Value: Aerial
  misc_feature: MA Experiment 108574 PARAMETER Experiment Name: At_Wounding__cDNA_P Parameter: Treatment Value: Wounding vs. No Wounding
  misc_feature: MA Experiment ID: 108579 Result: Up-regulated in Transcription
  misc_feature: MA Experiment 108579 PARAMETER Experiment Name: At_4deg_Cold_cDNA_P Parameter: Temperature (deg C) Value: 4 vs. 22
  misc_feature: MA Experiment 108579 PARAMETER Experiment Name: At_4deg_Cold_cDNA_P Parameter: Timepoint (hr) Value: 6
  misc_feature: MA Experiment 108579 PARAMETER Experiment Name: At_4deg_Cold_cDNA_P Parameter: Tissue Value: Aerial
  misc_feature: MA Experiment ID: 108668 Result: Up-regulated in Transcription
  misc_feature: MA Experiment 108668 PARAMETER Experiment Name: At_2mM_SA_cDNA_P Parameter: Plant Line Value: WS
  misc_feature: MA Experiment 108668 PARAMETER Experiment Name: At_2mM_SA_cDNA_P Parameter: Timepoint (hr) Value: 6
  misc_feature: MA Experiment 108668 PARAMETER Experiment Name: At_2mM_SA_cDNA_P Parameter: Treatment Value: 2mM SA vs. No Treatment
  misc_feature: MA Experiment ID: 20000169 Result: Up-regulated in Transcription
  misc_feature: MA Experiment 20000169 PARAMETER Experiment Name: At_100uM_ABA_P Parameter: Age (day) Value: 14
  misc_feature: MA Experiment 20000169 PARAMETER Experiment Name: At_100uM_ABA_P Parameter: Organism Value: A. thaliana
  misc_feature: MA Experiment 20000169 PARAMETER Experiment Name: At_100uM_ABA_P Parameter: Plant Line Value: WS
  misc_feature: MA Experiment 20000169 PARAMETER Experiment Name: At_100uM_ABA_P Parameter: Timepoint (hr) Value: 6
  misc_feature: MA Experiment 20000169 PARAMETER Experiment Name: At_100uM_ABA_P Parameter: Tissue Value: Aerial
  misc_feature: MA Experiment 20000169 PARAMETER Experiment Name: At_100uM_ABA_P Parameter: Treatment Value: 100uM ABA vs. No Treatment
  misc_feature: MA Experiment ID: 20000182 Result: Up-regulated in Transcription
  misc_feature: MA Experiment 20000182 PARAMETER Experiment Name: At_2mM_SA_P Parameter: Age (day) Value: 14
  misc_feature: MA Experiment 20000182 PARAMETER Experiment Name: At_2mM_SA_P Parameter: Organism Value: A. thaliana
  misc_feature: MA Experiment 20000182 PARAMETER Experiment Name: At_2mM_SA_P Parameter: Plant Line Value: WS
  misc_feature: MA Experiment 20000182 PARAMETER Experiment Name: At_2mM_SA_P Parameter: Timepoint (hr) Value: 6
  misc_feature: MA Experiment 20000182 PARAMETER Experiment Name: At_2mM_SA_P Parameter: Tissue Value: Aerial
  misc_feature: MA Experiment 20000182 PARAMETER Experiment Name: At_2mM_SA_P Parameter: Treatment Value: 2mM SA vs. No Treatment
  misc_feature: MA Experiment ID: 20000265 Result: Up-regulated in Transcription
  misc_feature: MA Experiment 20000265 PARAMETER Experiment Name: At_Open_Flower_P Parameter: Age (day) Value: 21
  misc_feature: MA Experiment 20000265 PARAMETER Experiment Name: At_Open_Flower_P Parameter: Plant Line Value: WS
  misc_feature: MA Experiment 20000265 PARAMETER Experiment Name: At_Open_Flower_P Parameter: Tissue Value: Closed Flower vs. Whole Plant
  misc_feature: MA Experiment ID: 20000453 Result: Up-regulated in Transcription
  misc_feature: MA Experiment 20000453 PARAMETER Experiment Name: At_100uM_ABA_P Parameter: Age (day) Value: 15
  misc_feature: MA Experiment 20000453 PARAMETER Experiment Name: At_100uM_ABA_P Parameter: Organism Value: A. thaliana
  misc_feature: MA Experiment 20000453 PARAMETER Experiment Name: At_100uM_ABA_P Parameter: Plant Line Value: WS
  misc_feature: MA Experiment 20000453 PARAMETER Experiment Name: At_100uM_ABA_P Parameter: Timepoint (hr) Value: 24
  misc_feature: MA Experiment 20000453 PARAMETER Experiment Name: At_100uM_ABA_P Parameter: Tissue Value: Aerial
  misc_feature: MA Experiment 20000453 PARAMETER Experiment Name: At_100uM_ABA_P Parameter: Treatment Value: 100uM ABA vs. No Treatment
  misc_feature: MA Experiment ID: 20000495 Result: Down-regulated in Transcription
  misc_feature: MA Experiment 20000495 PARAMETER Experiment Name: At_Guard_Cells_P Parameter: Harvest Date Value: 8/2/2002
  misc_feature: MA Experiment 20000495 PARAMETER Experiment Name: At_Guard_Cells_P Parameter: Organism Value: A. thaliana
  misc_feature: MA Experiment 20000495 PARAMETER Experiment Name: At_Guard_Cells_P Parameter: Tissue Value: Guard Cells vs. Leaves
  misc_feature: MA Experiment ID: 20001556 Result: Up-regulated in Transcription
  misc_feature: MA Experiment 20001556 PARAMETER Experiment Name: At_Drought_Soil_Dry_P Parameter: Age (day) Value: 26
  misc_feature: MA Experiment 20001556 PARAMETER Experiment Name: At_Drought_Soil_Dry_P Parameter: Organism Value: A. thaliana
  misc_feature: MA Experiment 20001556 PARAMETER Experiment Name: At_Drought_Soil_Dry_P Parameter: Plant Line Value: WS
  misc_feature: MA Experiment 20001556 PARAMETER Experiment Name: At_Drought_Soil_Dry_P Parameter: Post Timepoint (hr) Value: None
  misc_feature: MA Experiment 20001556 PARAMETER Experiment Name: At_Drought_Soil_Dry_P Parameter: Post-Treatment Value: None
  misc_feature: MA Experiment 20001556 PARAMETER Experiment Name: At_Drought_Soil_Dry_P Parameter: Timepoint (day) Value: 12
  misc_feature: MA Experiment 20001556 PARAMETER Experiment Name: At_Drought_Soil_Dry_P Parameter: Treatment Value: Drought vs. No Drought
  misc_feature: MA Experiment ID: 20001560 Result: Up-regulated in Transcription
  misc_feature: MA Experiment 20001560 PARAMETER Experiment Name: At_Drought_Soil_Dry_P Parameter: Age (day) Value: 28
  misc_feature: MA Experiment 20001560 PARAMETER Experiment Name: At_Drought_Soil_Dry_P Parameter: Organism Value: A. thaliana
  misc_feature: MA Experiment 20001560 PARAMETER Experiment Name: At_Drought_Soil_Dry_P Parameter: Plant Line Value: WS
  misc_feature: MA Experiment 20001560 PARAMETER Experiment Name: At_Drought_Soil_Dry_P Parameter: Post Timepoint (hr) Value: None
  misc_feature: MA Experiment 20001560 PARAMETER Experiment Name: At_Drought_Soil_Dry_P Parameter: Post-Treatment Value: None
  misc_feature: MA Experiment 20001560 PARAMETER Experiment Name: At_Drought_Soil_Dry_P Parameter: Timepoint (day) Value: 14
  misc_feature: MA Experiment 20001560 PARAMETER Experiment Name: At_Drought_Soil_Dry_P Parameter: Treatment Value: Drought vs. No Drought
  misc_feature: MA Experiment ID: 20001905 Result: Up-regulated in Transcription
  misc_feature: MA Experiment 20001905 PARAMETER Experiment Name: At_Drought_Reproduction_P Parameter: Age (day) Value: 40
  misc_feature: MA Experiment 20001905 PARAMETER Experiment Name: At_Drought_Reproduction_P Parameter: Organism Value: A. thaliana
  misc_feature: MA Experiment 20001905 PARAMETER Experiment Name: At_Drought_Reproduction_P Parameter: Plant Line Value: WS
  misc_feature: MA Experiment 20001905 PARAMETER Experiment Name: At_Drought_Reproduction_P Parameter: Timepoint (day) Value: 10
  misc_feature: MA Experiment 20001905 PARAMETER Experiment Name: At_Drought_Reproduction_P Parameter: Tissue Value: Rosettes
  misc_feature: MA Experiment 20001905 PARAMETER Experiment Name: At_Drought_Reproduction_P Parameter: Treatment Value: Drought vs. No Drought
ataaattgaagtgtgtgagatgcatcatccatacacaacatcttccatcttccgataattctcctttagtcttataatcactaataagtacgataactgaaatggatccaagattcatcaacaccattccttccttgaggtatgatgatgataagtgtgatgatgaatatgcgtttgtgaaagctctatgtatgagtggtggagatggtgccaacagttactccgccaattctcgccttcagaaaaaagttttatcaatggccaaaccagtcttggtaagaaacacagaagaaatgatgatgaacttagactttcctacgtacatcaaagttgctgaattgggttgttcttcgggacaaaactcttttttggctatctttgagatcatcaacaccattaatgtgttgtgccaacatgtgaacaaaaactcaccagagatcgattgttgtctaaacgatctcccggaaaatgatttcaacacgacctttaagttcgtacctttcttcaacaaggagctcatgatcacaaacaaatcatcatgtttcgtctatggagctccaggttccttctattccaggctcttctctcgcaatagcctccatttaatacattcctcttatgcactccattggctctctaaggttcccgagaaacttgagaataataaggggaatctgtacataacaagttcaagtcctcaaagtgcatacaaggcctacttgaatcaattccaaaaagacttcaccatgtttctaaggttacgttctgaagaaattgtctctaatggacgtatggttctcaccttcatcggaagaaacactcttaacgatccattgtatagagattgttgtcacttttggacattgctatcaaactctctccgtgacctagtctttgagggtcttgtgagtgagtcaaagctggacgcattcaacatgccgttttatgatccgaacgtacaagaactcaaagaagtgatacaaaaagagggctcttttgaaatcaatgaattggagtcacatggatttgatcttggtcactactacgaagaagatgactttgaagcaggacgcaatgaagctaatggcataagagctgttagtgaaccaatgctcattgctcattttggagaagaaattatcgataccttgttcgataagtatgcataccatgtgactcaacatgccaactgcaggaacaaaacgactgtcagtcttgtcgtttccttgactaagaagtaatcaacttctgtcatgttgctctatttgtatttatttactactgttattttgtttccttgaataaatttcaacacctgccactcaatgtgatgatgtggagctagtattggaaaaaagtgtgactgtaatatattatggtaaatttggtaaatgatttatttcctgc

SEQ ID NO: 22507 - protein, 379 aa, Arabidopsis thaliana
  peptide (1)..(379): Ceres Seq. ID no. 12371115
  misc_feature (58)..(379): Pfam Name: SAM dependent carboxyl methyltransferase Pfam Description: SAM dependent carboxyl methyltransferase
  misc_feature (58)..(379): Pfam Name: SAM dependent carboxyl methyltransferase Pfam Description: SAM dependent carboxyl methyltransferase
  misc_feature (59)..(379): Homolog of NCBI NO: 15233213 NR Description: S-adenosyl-L-methionine:carboxyl
  misc_feature (31)..(379): Homolog of NCBI NO: 8885604 NR Description: S-adenosyl-L-methionine:salicylic acid carboxyl
  misc_feature (29)..(379): Homolog of NCBI NO: 15240823 NR Description: S-adenosyl-L-methionine:carboxyl
  misc_feature (31)..(379): Homolog of NCBI NO: 9279749 NR Description: S-adenosyl-L-methionine:salicylic acid carboxyl
  misc_feature (16)..(379): Homolog of NCBI NO: 15237696 NR Description: S-adenosyl-L-methionine:carboxyl
  misc_feature (59)..(379): Homolog of NCBI NO: 15233213 NR Description: S-adenosyl-L-methionine:carboxyl
  misc_feature (29)..(379): Homolog of NCBI NO: 15240823 NR Description: S-adenosyl-L-methionine:carboxyl
  misc_feature (16)..(379): Homolog of NCBI NO: 15237696 NR Description: S-adenosyl-L-methionine:carboxyl
  misc_feature (1)..(379): Homolog of NCBI NO: 22330992 NR Description: S-adenosyl-L-methionine:carboxyl
  misc_feature (1)..(379): Homolog of NCBI NO: 37904506 NR Description: methyl transferase [Arabidopsis lyrata subsp.
  misc_feature (53)..(379): Homolog of NCBI NO: 12322908 NR Description: hypothetical protein; 58431-59672 [Arabidopsis
  misc_feature (1)..(379): Homolog of NCBI NO: 15237695 NR Description: S-adenosyl-L-methionine:carboxyl
  misc_feature (31)..(379): Homolog of NCBI NO: 15239970 NR Description: S-adenosyl-L-methionine:carboxyl
  misc_feature (31)..(379): Homolog of NCBI NO: 9279749 NR Description: S-adenosyl-L-methionine:salicylic acid carboxyl
  misc_feature (31)..(379): Homolog of NCBI NO: 8885604 NR Description: S-adenosyl-L-methionine:salicylic acid carboxyl
  misc_feature (31)..(379): Homolog of NCBI NO: 15239970 NR Description: S-adenosyl-L-methionine:carboxyl
  misc_feature (1)..(379): Homolog of NCBI NO: 15237695 NR Description: S-adenosyl-L-methionine:carboxyl
  misc_feature (53)..(379): Homolog of NCBI NO: 12322908 NR Description: hypothetical protein; 58431-59672 [Arabidopsis
  misc_feature (1)..(379): Homolog of NCBI NO: 37904506 NR Description: methyl transferase [Arabidopsis lyrata subsp.
  misc_feature (1)..(379): Homolog of NCBI NO: 22330992 NR Description: S-adenosyl-L-methionine:carboxyl
MDPRFINTIPSLRYDDDKCDDEYAFVKALCMSGGDGANSYSANSRLQKKVLSMAKPVLVRNTEEMMMNLDFPTYIKVAELGCSSGQNSFLAIFEIINTINVLCQHVNKNSPEIDCCLNDLPENDFNTTFKFVPFFNKELMITNKSSCFVYGAPGSFYSRLFSRNSLHLIHSSYALHWLSKVPEKLENNKGNLYITSSSPQSAYKAYLNQFQKDFTMFLRLRSEEIVSNGRMVLTFIGRNTLNDPLYRDCCHFWTLLSNSLRDLVFEGLVSESKLDAFNMPFYDPNVQELKEVIQKEGSFEINELESHGFDLGHYYEEDDFEAGRNEANGIRAVSEPMLIAHFGEEIIDTLFDKYAYHVTQHANCRNKTTVSLVVSLTKK

SEQ ID NO: 22508 - protein, 349 aa, Arabidopsis thaliana
  peptide (1)..(349): Ceres Seq. ID no. 12371116
  misc_feature (28)..(349): Pfam Name: SAM dependent carboxyl methyltransferase Pfam Description: SAM dependent carboxyl methyltransferase
  misc_feature (28)..(349): Pfam Name: SAM dependent carboxyl methyltransferase Pfam Description: SAM dependent carboxyl methyltransferase
  misc_feature (29)..(349): Homolog of NCBI NO: 15233213 NR Description: S-adenosyl-L-methionine:carboxyl
  misc_feature (1)..(349): Homolog of NCBI NO: 8885604 NR Description: S-adenosyl-L-methionine:salicylic acid carboxyl
  misc_feature (1)..(349): Homolog of NCBI NO: 15240823 NR Description: S-adenosyl-L-methionine:carboxyl
  misc_feature (1)..(349): Homolog of NCBI NO: 9279749 NR Description: S-adenosyl-L-methionine:salicylic acid carboxyl
  misc_feature (1)..(349): Homolog of NCBI NO: 15237696 NR Description: S-adenosyl-L-methionine:carboxyl
  misc_feature (29)..(349): Homolog of NCBI NO: 15233213 NR Description: S-adenosyl-L-methionine:carboxyl
  misc_feature (1)..(349): Homolog of NCBI NO: 15240823 NR Description: S-adenosyl-L-methionine:carboxyl
  misc_feature (1)..(349): Homolog of NCBI NO: 15237696 NR Description: S-adenosyl-L-methionine:carboxyl
  misc_feature (1)..(349): Homolog of NCBI NO: 22330992 NR Description: S-adenosyl-L-methionine:carboxyl
  misc_feature (1)..(349): Homolog of NCBI NO: 37904506 NR Description: methyl transferase [Arabidopsis lyrata subsp.
  misc_feature (23)..(349): Homolog of NCBI NO: 12322908 NR Description: hypothetical protein; 58431-59672 [Arabidopsis
  misc_feature (1)..(349): Homolog of NCBI NO: 15237695 NR Description: S-adenosyl-L-methionine:carboxyl
  misc_feature (1)..(349): Homolog of NCBI NO: 15239970 NR Description: S-adenosyl-L-methionine:carboxyl
  misc_feature (1)..(349): Homolog of NCBI NO: 9279749 NR Description: S-adenosyl-L-methionine:salicylic acid carboxyl
  misc_feature (1)..(349): Homolog of NCBI NO: 8885604 NR Description: S-adenosyl-L-methionine:salicylic acid carboxyl
  misc_feature (1)..(349): Homolog of NCBI NO: 15239970 NR Description: S-adenosyl-L-methionine:carboxyl
  misc_feature (1)..(349): Homolog of NCBI NO: 15237695 NR Description: S-adenosyl-L-methionine:carboxyl
  misc_feature (23)..(349): Homolog of NCBI NO: 12322908 NR Description: hypothetical protein; 58431-59672 [Arabidopsis
  misc_feature (1)..(349): Homolog of NCBI NO: 37904506 NR Description: methyl transferase [Arabidopsis lyrata subsp.
  misc_feature (1)..(349): Homolog of NCBI NO: 22330992 NR Description: S-adenosyl-L-methionine:carboxyl
MSGGDGANSYSANSRLQKKVLSMAKPVLVRNTEEMMMNLDFPTYIKVAELGCSSGQNSFLAIFEIINTINVLCQHVNKNSPEIDCCLNDLPENDFNTTFKFVPFFNKELMITNKSSCFVYGAPGSFYSRLFSRNSLHLIHSSYALHWLSKVPEKLENNKGNLYITSSSPQSAYKAYLNQFQKDFTMFLRLRSEEIVSNGRMVLTFIGRNTLNDPLYRDCCHFWTLLSNSLRDLVFEGLVSESKLDAFNMPFYDPNVQELKEVIQKEGSFEINELESHGFDLGHYYEEDDFEAGRNEANGIRAVSEPMLIAHFGEEIIDTLFDKYAYHVTQHANCRNKTTVSLVVSLTKK

SEQ ID NO: 22509 - protein, 327 aa, Arabidopsis thaliana
  peptide (1)..(327): Ceres Seq. ID no. 12371117
  misc_feature (6)..(327): Pfam Name: SAM dependent carboxyl methyltransferase Pfam Description: SAM dependent carboxyl methyltransferase
  misc_feature (6)..(327): Pfam Name: SAM dependent carboxyl methyltransferase Pfam Description: SAM dependent carboxyl methyltransferase
  misc_feature (7)..(327): Homolog of NCBI NO: 15233213 NR Description: S-adenosyl-L-methionine:carboxyl
  misc_feature (1)..(327): Homolog of NCBI NO: 8885604 NR Description: S-adenosyl-L-methionine:salicylic acid carboxyl
  misc_feature (1)..(327): Homolog of NCBI NO: 15240823 NR Description: S-adenosyl-L-methionine:carboxyl
  misc_feature (1)..(327): Homolog of NCBI NO: 9279749 NR Description: S-adenosyl-L-methionine:salicylic acid carboxyl
  misc_feature (1)..(327): Homolog of NCBI NO: 15237696 NR Description: S-adenosyl-L-methionine:carboxyl
  misc_feature (7)..(327): Homolog of NCBI NO: 15233213 NR Description: S-adenosyl-L-methionine:carboxyl
  misc_feature (1)..(327): Homolog of NCBI NO: 15240823 NR Description: S-adenosyl-L-methionine:carboxyl
  misc_feature (1)..(327): Homolog of NCBI NO: 15237696 NR Description: S-adenosyl-L-methionine:carboxyl
  misc_feature (1)..(327): Homolog of NCBI NO: 22330992 NR Description: S-adenosyl-L-methionine:carboxyl
  misc_feature (1)..(327): Homolog of NCBI NO: 37904506 NR Description: methyl transferase [Arabidopsis lyrata subsp.
  misc_feature (1)..(327): Homolog of NCBI NO: 12322908 NR Description: hypothetical protein; 58431-59672 [Arabidopsis
  misc_feature (1)..(327): Homolog of NCBI NO: 15237695 NR Description: S-adenosyl-L-methionine:carboxyl
  misc_feature (1)..(327): Homolog of NCBI NO: 15239970 NR Description: S-adenosyl-L-methionine:carboxyl
  misc_feature (1)..(327): Homolog of NCBI NO: 9279749 NR Description: S-adenosyl-L-methionine:salicylic acid carboxyl
  misc_feature (1)..(327): Homolog of NCBI NO: 8885604 NR Description: S-adenosyl-L-methionine:salicylic acid carboxyl
  misc_feature (1)..(327): Homolog of NCBI NO: 15239970 NR Description: S-adenosyl-L-methionine:carboxyl
  misc_feature (1)..(327): Homolog of NCBI NO: 15237695 NR Description: S-adenosyl-L-methionine:carboxyl
  misc_feature (1)..(327): Homolog of NCBI NO: 12322908 NR Description: hypothetical protein; 58431-59672 [Arabidopsis
  misc_feature (1)..(327): Homolog of NCBI NO: 37904506 NR Description: methyl transferase [Arabidopsis lyrata subsp.
  misc_feature (1)..(327): Homolog of NCBI NO: 22330992 NR Description: S-adenosyl-L-methionine:carboxyl
MAKPVLVRNTEEMMMNLDFPTYIKVAELGCSSGQNSFLAIFEIINTINVLCQHVNKNSPEIDCCLNDLPENDFNTTFKFVPFFNKELMITNKSSCFVYGAPGSFYSRLFSRNSLHLIHSSYALHWLSKVPEKLENNKGNLYITSSSPQSAYKAYLNQFQKDFTMFLRLRSEEIVSNGRMVLTFIGRNTLNDPLYRDCCHFWTLLSNSLRDLVFEGLVSESKLDAFNMPFYDPNVQELKEVIQKEGSFEINELESHGFDLGHYYEEDDFEAGRNEANGIRAVSEPMLIAHFGEEIIDTLFDKYAYHVTQHANCRNKTTVSLVVSLTKK

SEQ ID NO: 22510 - DNA, 1521 bp, Arabidopsis thaliana
  misc_feature (1)..(1521): Ceres Seq. ID no. 12394809
  misc_feature: MA Experiment ID: 20000071 Result: Up-regulated in Transcription
  misc_feature: MA Experiment 20000071 PARAMETER Experiment Name: At_100uM_ABA_Mutants_cDNA_P Parameter: Plant Line Value: CS8104
  misc_feature: MA Experiment 20000071 PARAMETER Experiment Name: At_100uM_ABA_Mutants_cDNA_P Parameter: Timepoint (hr) Value: 6
  misc_feature: MA Experiment 20000071 PARAMETER Experiment Name: At_100uM_ABA_Mutants_cDNA_P Parameter: Tissue Value: Aerial
  misc_feature: MA Experiment 20000071 PARAMETER Experiment Name: At_100uM_ABA_Mutants_cDNA_P Parameter: Treatment Value: 100uM ABA vs. No Treatment
  misc_feature: MA Experiment ID: 20000169 Result: Up-regulated in Transcription
  misc_feature: MA Experiment 20000169 PARAMETER Experiment Name: At_100uM_ABA_P Parameter: Age (day) Value: 14
  misc_feature: MA Experiment 20000169 PARAMETER Experiment Name: At_100uM_ABA_P Parameter: Organism Value: A. thaliana
  misc_feature: MA Experiment 20000169 PARAMETER Experiment Name: At_100uM_ABA_P Parameter: Plant Line Value: WS
  misc_feature: MA Experiment 20000169 PARAMETER Experiment Name: At_100uM_ABA_P Parameter: Timepoint (hr) Value: 6
  misc_feature: MA Experiment 20000169 PARAMETER Experiment Name: At_100uM_ABA_P Parameter: Tissue Value: Aerial
  misc_feature: MA Experiment 20000169 PARAMETER Experiment Name: At_100uM_ABA_P Parameter: Treatment Value: 100uM ABA vs. No Treatment
  misc_feature: MA Experiment ID: 20000185 Result: Down-regulated in Transcription
  misc_feature: MA Experiment 20000185 PARAMETER Experiment Name: At_Roots__P Parameter: Age (day) Value: 7 vs. 21
  misc_feature: MA Experiment 20000185 PARAMETER Experiment Name: At_Roots__P Parameter: Organism Value: A. thaliana
  misc_feature: MA Experiment 20000185 PARAMETER Experiment Name: At_Roots__P Parameter: Tissue Value: Roots vs. Whole Plant
  misc_feature: MA Experiment ID: 20000267 Result: Up-regulated in Transcription
  misc_feature: MA Experiment 20000267 PARAMETER Experiment Name: At_Drought_P Parameter: Age (day) Value: 7
  misc_feature: MA Experiment 20000267 PARAMETER Experiment Name: At_Drought_P Parameter: Organism Value: A. thaliana
  misc_feature: MA Experiment 20000267 PARAMETER Experiment Name: At_Drought_P Parameter: Plant Line Value: WS
  misc_feature: MA Experiment 20000267 PARAMETER Experiment Name: At_Drought_P Parameter: Timepoint (hr) Value: 6
  misc_feature: MA Experiment 20000267 PARAMETER Experiment Name: At_Drought_P Parameter: Tissue Value: Whole Plant
  misc_feature: MA Experiment 20000267 PARAMETER Experiment Name: At_Drought_P Parameter: Treatment Value: Drought vs. No Drought
  misc_feature: MA Experiment ID: 20000268 Result: Up-regulated in Transcription
  misc_feature: MA Experiment 20000268 PARAMETER Experiment Name: At_100mM_NaCl__P Parameter: Age (day) Value: 14
  misc_feature: MA Experiment 20000268 PARAMETER Experiment Name: At_100mM_NaCl__P Parameter: Organism Value: A. thaliana
  misc_feature: MA Experiment 20000268 PARAMETER Experiment Name: At_100mM_NaCl__P Parameter: Plant Line Value: WS
  misc_feature: MA Experiment 20000268 PARAMETER Experiment Name: At_100mM_NaCl__P Parameter: Timepoint (hr) Value: 6
  misc_feature: MA Experiment 20000268 PARAMETER Experiment Name: At_100mM_NaCl__P Parameter: Tissue Value: Whole Plant
  misc_feature: MA Experiment 20000268 PARAMETER Experiment Name: At_100mM_NaCl__P Parameter: Treatment Value: 100mM NaCl vs. No Treatment
  misc_feature: MA Experiment ID: 20000436 Result: Up-regulated in Transcription
  misc_feature: MA Experiment 20000436 PARAMETER Experiment Name: At_Drought_P Parameter: Age (day) Value: 7
  misc_feature: MA Experiment 20000436 PARAMETER Experiment Name: At_Drought_P Parameter: Organism Value: A. thaliana
  misc_feature: MA Experiment 20000436 PARAMETER Experiment Name: At_Drought_P Parameter: Plant Line Value: WS
  misc_feature: MA Experiment 20000436 PARAMETER Experiment Name: At_Drought_P Parameter: Timepoint (hr) Value: 12
  misc_feature: MA Experiment 20000436 PARAMETER Experiment Name: At_Drought_P Parameter: Tissue Value: Whole Plant
  misc_feature: MA Experiment 20000436 PARAMETER Experiment Name: At_Drought_P Parameter: Treatment Value: Drought vs. No Drought
  misc_feature: MA Experiment ID: 20000437 Result: Up-regulated in Transcription
  misc_feature: MA Experiment 20000437 PARAMETER Experiment Name: At_Drought_P Parameter: Age (day) Value: 8
  misc_feature: MA Experiment 20000437 PARAMETER Experiment Name: At_Drought_P Parameter: Organism Value: A. thaliana
  misc_feature: MA Experiment 20000437 PARAMETER Experiment Name: At_Drought_P Parameter: Plant Line Value: WS
  misc_feature: MA Experiment 20000437 PARAMETER Experiment Name: At_Drought_P Parameter: Timepoint (hr) Value: 24
  misc_feature: MA Experiment 20000437 PARAMETER Experiment Name: At_Drought_P Parameter: Tissue Value: Whole Plant
  misc_feature: MA Experiment 20000437 PARAMETER Experiment Name: At_Drought_P Parameter: Treatment Value: Drought vs. No Drought
  misc_feature: MA Experiment ID: 20000439 Result: Down-regulated in Transcription
  misc_feature: MA Experiment 20000439 PARAMETER Experiment Name: At_Roots__P Parameter: Age (day) Value: 14 vs. 21
  misc_feature: MA Experiment 20000439 PARAMETER Experiment Name: At_Roots__P Parameter: Organism Value: A. thaliana
  misc_feature: MA Experiment 20000439 PARAMETER Experiment Name: At_Roots__P Parameter: Tissue Value: Roots vs. Whole Plant
  misc_feature: MA Experiment ID: 20000453 Result: Up-regulated in Transcription
  misc_feature: MA Experiment 20000453 PARAMETER Experiment Name: At_100uM_ABA_P Parameter: Age (day) Value: 15
  misc_feature: MA Experiment 20000453 PARAMETER Experiment Name: At_100uM_ABA_P Parameter: Organism Value: A. thaliana
  misc_feature: MA Experiment 20000453 PARAMETER Experiment Name: At_100uM_ABA_P Parameter: Plant Line Value: WS
  misc_feature: MA Experiment 20000453 PARAMETER Experiment Name: At_100uM_ABA_P Parameter: Timepoint (hr) Value: 24
  misc_feature: MA Experiment 20000453 PARAMETER Experiment Name: At_100uM_ABA_P Parameter: Tissue Value: Aerial
  misc_feature: MA Experiment 20000453 PARAMETER Experiment Name: At_100uM_ABA_P Parameter: Treatment Value: 100uM ABA vs. No Treatment
  misc_feature: MA Experiment ID: 20000573 Result: Down-regulated in Transcription
  misc_feature: MA Experiment 20000573 PARAMETER Experiment Name: At_100uM_ABA_Mutants__P Parameter: Organism Value: A. thaliana
  misc_feature: MA Experiment 20000573 PARAMETER Experiment Name: At_100uM_ABA_Mutants__P Parameter: Plant Line Value: CS22 vs. Ler wt
  misc_feature: MA Experiment 20000573 PARAMETER Experiment Name: At_100uM_ABA_Mutants__P Parameter: Timepoint (hr) Value: N/A
  misc_feature: MA Experiment 20000573 PARAMETER Experiment Name: At_100uM_ABA_Mutants__P Parameter: Tissue Value: Whole Plant
  misc_feature: MA Experiment 20000573 PARAMETER Experiment Name: At_100uM_ABA_Mutants__P Parameter: Treatment Value: None
  misc_feature: MA Experiment ID: 20000574 Result: Down-regulated in Transcription
  misc_feature: MA Experiment 20000574 PARAMETER Experiment Name: At_100uM_ABA_Mutants__P Parameter: Organism Value: A. thaliana
  misc_feature: MA Experiment 20000574 PARAMETER Experiment Name: At_100uM_ABA_Mutants__P Parameter: Plant Line Value: CS23 vs. Ler wt
  misc_feature: MA Experiment 20000574 PARAMETER Experiment Name: At_100uM_ABA_Mutants__P Parameter: Timepoint (hr) Value: N/A
  misc_feature: MA Experiment 20000574 PARAMETER Experiment Name: At_100uM_ABA_Mutants__P Parameter: Tissue Value: Whole Plant
  misc_feature: MA Experiment 20000574 PARAMETER Experiment Name: At_100uM_ABA_Mutants__P Parameter: Treatment Value: None
  misc_feature: MA Experiment ID: 20001247 Result: Up-regulated in Transcription
  misc_feature: MA Experiment 20001247 PARAMETER Experiment Name: At_Far-red-induction_P Parameter: Age (day) Value: 7
  misc_feature: MA Experiment 20001247 PARAMETER Experiment Name: At_Far-red-induction_P Parameter: Light Value: Far-red vs. White
  misc_feature: MA Experiment 20001247 PARAMETER Experiment Name: At_Far-red-induction_P Parameter: Organism Value: A. thaliana
  misc_feature: MA Experiment 20001247 PARAMETER Experiment Name: At_Far-red-induction_P Parameter: Plant Line Value: Columbia
  misc_feature: MA Experiment 20001247 PARAMETER Experiment Name: At_Far-red-induction_P Parameter: Timepoint (hr) Value: 1
  misc_feature: MA Experiment 20001247 PARAMETER Experiment Name: At_Far-red-induction_P Parameter: Tissue Value: Whole Plant
  misc_feature: MA Experiment ID: 20001248 Result: Down-regulated in Transcription
  misc_feature: MA Experiment 20001248 PARAMETER Experiment Name: At_Far-red-induction_P Parameter: Age (day) Value: 7
  misc_feature: MA Experiment 20001248 PARAMETER Experiment Name: At_Far-red-induction_P Parameter: Light Value: Far-red vs. White
  misc_feature: MA Experiment 20001248 PARAMETER Experiment Name: At_Far-red-induction_P Parameter: Organism Value: A. thaliana
  misc_feature: MA Experiment 20001248 PARAMETER Experiment Name: At_Far-red-induction_P Parameter: Plant Line Value: Columbia
  misc_feature: MA Experiment 20001248 PARAMETER Experiment Name: At_Far-red-induction_P Parameter: Timepoint (hr) Value: 4
  misc_feature: MA Experiment 20001248 PARAMETER Experiment Name: At_Far-red-induction_P Parameter: Tissue Value: Whole Plant
  misc_feature: MA Experiment ID: 20001451 Result: Down-regulated in Transcription
  misc_feature: MA Experiment 20001451 PARAMETER Experiment Name: At_Far-red-induction_P Parameter: Age (day) Value: 7
  misc_feature: MA Experiment 20001451 PARAMETER Experiment Name: At_Far-red-induction_P Parameter: Light Value: Far-red vs. White
  misc_feature: MA Experiment 20001451 PARAMETER Experiment Name: At_Far-red-induction_P Parameter: Organism Value: A. thaliana
  misc_feature: MA Experiment 20001451 PARAMETER Experiment Name: At_Far-red-induction_P Parameter: Plant Line Value: Columbia
  misc_feature: MA Experiment 20001451 PARAMETER Experiment Name: At_Far-red-induction_P Parameter: Timepoint (hr) Value: 24
  misc_feature: MA Experiment 20001451 PARAMETER Experiment Name: At_Far-red-induction_P Parameter: Tissue Value: Whole Plant
  misc_feature: MA Experiment ID: 20001554 Result: Up-regulated in Transcription
  misc_feature: MA Experiment 20001554 PARAMETER Experiment Name: At_Drought_Soil_Dry_P Parameter: Age (day) Value: 21
  misc_feature: MA Experiment 20001554 PARAMETER Experiment Name: At_Drought_Soil_Dry_P Parameter: Organism Value: A. thaliana
  misc_feature: MA Experiment 20001554 PARAMETER Experiment Name: At_Drought_Soil_Dry_P Parameter: Plant Line Value: WS
  misc_feature: MA Experiment 20001554 PARAMETER Experiment Name: At_Drought_Soil_Dry_P Parameter: Post Timepoint (hr) Value: None
  misc_feature: MA Experiment 20001554 PARAMETER Experiment Name: At_Drought_Soil_Dry_P Parameter: Post-Treatment Value: None
  misc_feature: MA Experiment 20001554 PARAMETER Experiment Name: At_Drought_Soil_Dry_P Parameter: Timepoint (day) Value: 7
  misc_feature: MA Experiment 20001554 PARAMETER Experiment Name: At_Drought_Soil_Dry_P Parameter: Treatment Value: Drought vs. No Drought
  misc_feature: MA Experiment ID: 20001555 Result: Up-regulated in Transcription
  misc_feature: MA Experiment 20001555 PARAMETER Experiment Name: At_Drought_Soil_Dry_P Parameter: Age (day) Value: 24
  misc_feature: MA Experiment 20001555 PARAMETER Experiment Name: At_Drought_Soil_Dry_P Parameter: Organism Value: A. thaliana
  misc_feature: MA Experiment 20001555 PARAMETER Experiment Name: At_Drought_Soil_Dry_P Parameter: Plant Line Value: WS
  misc_feature: MA Experiment 20001555 PARAMETER Experiment Name: At_Drought_Soil_Dry_P Parameter: Post Timepoint (hr) Value: None
  misc_feature: MA Experiment 20001555 PARAMETER Experiment Name: At_Drought_Soil_Dry_P Parameter: Post-Treatment Value: None
  misc_feature: MA Experiment 20001555 PARAMETER Experiment Name: At_Drought_Soil_Dry_P Parameter: Timepoint (day) Value: 10
  misc_feature: MA Experiment 20001555 PARAMETER Experiment Name: At_Drought_Soil_Dry_P Parameter: Treatment Value: Drought vs. No Drought
  misc_feature: MA Experiment ID: 20001556 Result: Up-regulated in Transcription
  misc_feature: MA Experiment 20001556 PARAMETER Experiment Name: At_Drought_Soil_Dry_P Parameter: Age (day) Value: 26
  misc_feature: MA Experiment 20001556 PARAMETER Experiment Name: At_Drought_Soil_Dry_P Parameter: Organism Value: A. thaliana
  misc_feature: MA Experiment 20001556 PARAMETER Experiment Name: At_Drought_Soil_Dry_P Parameter: Plant Line Value: WS
  misc_feature: MA Experiment 20001556 PARAMETER Experiment Name: At_Drought_Soil_Dry_P Parameter: Post Timepoint (hr) Value: None
  misc_feature: MA Experiment 20001556 PARAMETER Experiment Name: At_Drought_Soil_Dry_P Parameter: Post-Treatment Value: None
  misc_feature: MA Experiment 20001556 PARAMETER Experiment Name: At_Drought_Soil_Dry_P Parameter: Timepoint (day) Value: 12
  misc_feature: MA Experiment 20001556 PARAMETER Experiment Name: At_Drought_Soil_Dry_P Parameter: Treatment Value: Drought vs. No Drought
  misc_feature: MA Experiment ID: 20001559 Result: Up-regulated in Transcription
  misc_feature: MA Experiment 20001559 PARAMETER Experiment Name: At_Drought_Soil_Dry_P Parameter: Age (day) Value: 28
  misc_feature: MA Experiment 20001559 PARAMETER Experiment Name: At_Drought_Soil_Dry_P Parameter: Organism Value: A. thaliana
  misc_feature: MA Experiment 20001559 PARAMETER Experiment Name: At_Drought_Soil_Dry_P Parameter: Plant Line Value: WS
  misc_feature: MA Experiment 20001559 PARAMETER Experiment Name: At_Drought_Soil_Dry_P Parameter: Post Timepoint (hr) Value: 29
  misc_feature: MA Experiment 20001559 PARAMETER Experiment Name: At_Drought_Soil_Dry_P Parameter: Post-Treatment Value: Re-Water vs. No Drought
  misc_feature: MA Experiment 20001559 PARAMETER Experiment Name: At_Drought_Soil_Dry_P Parameter: Timepoint (day) Value: 14
  misc_feature: MA Experiment 20001559 PARAMETER Experiment Name: At_Drought_Soil_Dry_P Parameter: Treatment Value: Drought vs. No Drought
  misc_feature: MA Experiment ID: 20001904 Result: Up-regulated in Transcription
  misc_feature: MA Experiment 20001904 PARAMETER Experiment Name: At_Drought_Reproduction_P Parameter: Age (day) Value: 37
  misc_feature: MA Experiment 20001904 PARAMETER Experiment Name: At_Drought_Reproduction_P Parameter: Organism Value: A. thaliana
  misc_feature: MA Experiment 20001904 PARAMETER Experiment Name: At_Drought_Reproduction_P Parameter: Plant Line Value: WS
  misc_feature: MA Experiment 20001904 PARAMETER Experiment Name: At_Drought_Reproduction_P Parameter: Timepoint (day) Value: 7
  misc_feature: MA Experiment 20001904 PARAMETER Experiment Name: At_Drought_Reproduction_P Parameter: Tissue Value: Rosettes
  misc_feature: MA Experiment 20001904 PARAMETER Experiment Name: At_Drought_Reproduction_P Parameter: Treatment Value: Drought vs. No Drought
  misc_feature: MA Experiment ID: 20001911 Result: Up-regulated in Transcription
  misc_feature: MA Experiment 20001911 PARAMETER Experiment Name: At_Drought_Reproduction_P Parameter: Age (day) Value: 40
  misc_feature: MA Experiment 20001911 PARAMETER Experiment Name: At_Drought_Reproduction_P Parameter: Organism Value: A. thaliana
  misc_feature: MA Experiment 20001911 PARAMETER Experiment Name: At_Drought_Reproduction_P Parameter: Plant Line Value: WS
  misc_feature: MA Experiment 20001911 PARAMETER Experiment Name: At_Drought_Reproduction_P Parameter: Timepoint (day) Value: 10
  misc_feature: MA Experiment 20001911 PARAMETER Experiment Name: At_Drought_Reproduction_P Parameter: Tissue Value: Flowers
  misc_feature: MA Experiment 20001911 PARAMETER Experiment Name: At_Drought_Reproduction_P Parameter: Treatment Value: Drought vs. No Drought
agctcctttctactaaaacccttttactataaattctacgtacacgtaccacttcttctcctcaaattcatcaaacccatttctattccaactcccaaaaatggcgattcgtcttcctctgatctgtcttcttggttcattcatggtagtggcgattgcggctgatttaacaccggagcgttattggagcactgctttaccaaacactcccattcccaactctctccataatcttttgactttcgattttaccgacgagaaaagtaccaacgtccaagtaggtaaaggcggagtaaacgttaacacccataaaggtaaaaccggtagcggaaccgccgtgaacgttggaaagggaggtgtacgcgtggacacaggcaagggcaagcccggaggagggacacacgtgagcgttggcagcggaaaaggtcacggaggtggcgtcgcagtccacacgggtaaacccggtaaaagaaccgacgtaggagtcggtaaaggcggtgtgacggtgcacacgcgccacaagggaagaccgatttacgttggtgtgaaaccaggagcaaaccctttcgtgtataactatgcagcgaaggagactcagctccacgacgatcctaacgcggctctcttcttcttggagaaggacttggttcgcgggaaagaaatgaatgtccggtttaacgctgaggatggttacggaggcaaaactgcgttcttgccacgtggagaggctgaaacggtgccttttggatcggagaagttttcggagacgttgaaacgtttctcggtggaagctggttcggaagaagcggagatgatgaagaagaccattgaggagtgtgaagccagaaaagttagtggagaggagaagtattgtgcgacgtctttggagtcgatggtcgactttagtgtttcgaaacttggtaaatatcacgtcagggctgtttccactgaggtggctaagaagaacgcaccgatgcagaagtacaaaatcgcggcggctggggtaaagaagttgtctgacgataaatctgtggtgtgtcacaaacagaagtacccattcgcggtgttctactgccacaaggcgatgatgacgaccgtctacgcggttccgctcgagggagagaacgggatgcgagctaaagcagttgcggtatgccacaagaacacctcagcttggaacccaaaccacttggccttcaaagtcttaaaggtgaagccagggaccgttccggtctgccacttcctcccggagactcatgttgtgtggttcagctactagatagatctgttttctatcttattgtgggttatgtataattacgtttcagataatctatcttttgggatgttttggttatgaatatacatacatatacatatagtaatgcgtggtttccatataagagtgaaggcatctatatgtttttttttttattaacctacgtagctgtcttttgtggtctgtatcttgtggttttgcaaaaacctataataaaattagagctgaaatgttaccatttc

SEQ ID NO: 22511 - protein, 392 aa, Arabidopsis thaliana
  peptide (1)..(392): Ceres Seq. ID no. 12394810
  misc_feature (141)..(389): Homolog of NCBI NO: 14422442 NR Description: BURP domain-containing protein [Bruguiera
  misc_feature (100)..(389): Homolog of NCBI NO: 33578034 NR Description: BURP domain-containing protein [Gossypium
  misc_feature (77)..(99): Homolog of NCBI NO: 14422448 NR Description: BURP domain-containing protein [Bruguiera
  misc_feature (100)..(389): Homolog of NCBI NO: 18447761 NR Description: dehydration-induced protein RD22-like protein
  misc_feature (56)..(389): Homolog of NCBI NO: 34910186 NR Description: putative dehydration-responsive protein RD22
  misc_feature (16)..(83): Homolog of NCBI NO: 14422448 NR Description: BURP domain-containing protein [Bruguiera
  misc_feature (123)..(389): Homolog of NCBI NO: 14422448 NR Description: BURP domain-containing protein [Bruguiera
  misc_feature (77)..(389): Homolog of NCBI NO: 14422444 NR Description: BURP domain-containing protein [Bruguiera
  misc_feature (77)..(389): Homolog of NCBI NO: 16588826 NR Description: dehydration-responsive protein RD22 [Prunus
  misc_feature (1)..(392): Homolog of NCBI NO: 15239478 NR Description: dehydration-induced protein RD22
  misc_feature (141)..(389): Homolog of NCBI NO: 14422442 NR Description: BURP domain-containing protein [Bruguiera
  misc_feature (100)..(389): Homolog of NCBI NO: 33578034 NR Description: BURP domain-containing protein [Gossypium
  misc_feature (77)..(99): Homolog of NCBI NO: 14422448 NR Description: BURP domain-containing protein [Bruguiera
  misc_feature (100)..(389): Homolog of NCBI NO: 18447761 NR Description: dehydration-induced protein RD22-like protein
  misc_feature (56)..(389): Homolog of NCBI NO: 34910186 NR Description: putative dehydration-responsive protein RD22
  misc_feature (16)..(83): Homolog of NCBI NO: 14422448 NR Description: BURP domain-containing protein [Bruguiera
  misc_feature (123)..(389): Homolog of NCBI NO: 14422448 NR Description: BURP domain-containing protein [Bruguiera
  misc_feature (77)..(389): Homolog of NCBI NO: 14422444 NR Description: BURP domain-containing protein [Bruguiera
  misc_feature (77)..(389): Homolog of NCBI NO: 16588826 NR Description: dehydration-responsive protein RD22 [Prunus
  misc_feature (1)..(392): Homolog of NCBI NO: 15239478 NR Description: dehydration-induced protein RD22
  misc_feature (141)..(389): Homolog of NCBI NO: 14422442 NR Description: BURP domain-containing protein [Bruguiera
  misc_feature (100)..(389): Homolog of NCBI NO: 33578034 NR Description: BURP domain-containing protein [Gossypium
  misc_feature (77)..(99): Homolog of NCBI NO: 14422448 NR Description: BURP domain-containing protein [Bruguiera
  misc_feature (100)..(389): Homolog of NCBI NO: 18447761 NR Description: dehydration-induced protein RD22-like protein
  misc_feature (56)..(389): Homolog of NCBI NO: 34910186 NR Description: putative dehydration-responsive protein RD22
  misc_feature (16)..(83): Homolog of NCBI NO: 14422448 NR Description: BURP domain-containing protein [Bruguiera
  misc_feature (123)..(389): Homolog of NCBI NO: 14422448 NR Description: BURP domain-containing protein [Bruguiera
  misc_feature (77)..(389): Homolog of NCBI NO: 14422444 NR Description: BURP domain-containing protein [Bruguiera
  misc_feature (77)..(389): Homolog of NCBI NO: 16588826 NR Description: dehydration-responsive protein RD22 [Prunus
  misc_feature (1)..(392): Homolog of NCBI NO: 15239478 NR Description: dehydration-induced protein RD22
MAIRLPLICLLGSFMVVAIAADLTPERYWSTALPNTPIPNSLHNLLTFDFTDEKSTNVQVGKGGVNVNTHKGKTGSGTAVNVGKGGVRVDTGKGKPGGGTHVSVGSGKGHGGGVAVHTGKPGKRTDVGVGKGGVTVHTRHKGRPIYVGVKPGANPFVYNYAAKETQLHDDPNAALFFLEKDLVRGKEMNVRFNAEDGYGGKTAFLPRGEAETVPFGSEKFSETLKRFSVEAGSEEAEMMKKTIEECEARKVSGEEKYCATSLESMVDFSVSKLGKYHVRAVSTEVAKKNAPMQKYKIAAAGVKKLSDDKSVVCHKQKYPFAVFYCHKAMMTTVYAVPLEGENGMRAKAVAVCHKNTSAWNPNHLAFKVLKVKPGTVPVCHFLPETHVVWFSY

SEQ ID NO: 22512 - protein, 378 aa, Arabidopsis thaliana
  peptide (1)..(378): Ceres Seq. ID no. 12394811
  misc_feature (127)..(375): Homolog of NCBI NO: 14422442 NR Description: BURP domain-containing protein [Bruguiera
  misc_feature (86)..(375): Homolog of NCBI NO: 33578034 NR Description: BURP domain-containing protein [Gossypium
  misc_feature (63)..(85): Homolog of NCBI NO: 14422448 NR Description: BURP domain-containing protein [Bruguiera
  misc_feature (86)..(375): Homolog of NCBI NO: 18447761 NR Description: dehydration-induced protein RD22-like protein
  misc_feature (42)..(375): Homolog of NCBI NO: 34910186 NR Description: putative dehydration-responsive protein RD22
  misc_feature (2)..(69): Homolog of NCBI NO: 14422448 NR Description: BURP domain-containing protein [Bruguiera
  misc_feature (109)..(375): Homolog of NCBI NO: 14422448 NR Description: BURP domain-containing protein [Bruguiera
  misc_feature (63)..(375): Homolog of NCBI NO: 14422444 NR Description: BURP domain-containing protein [Bruguiera
  misc_feature (63)..(375): Homolog of NCBI NO: 16588826 NR Description: dehydration-responsive protein RD22 [Prunus
  misc_feature (1)..(378): Homolog of NCBI NO: 15239478 NR Description: dehydration-induced protein RD22
  misc_feature (127)..(375): Homolog of NCBI NO: 14422442 NR Description: BURP domain-containing protein [Bruguiera
  misc_feature (86)..(375): Homolog of NCBI NO: 33578034 NR Description: BURP domain-containing protein [Gossypium
  misc_feature (63)..(85): Homolog of NCBI NO: 14422448 NR Description: BURP domain-containing protein [Bruguiera
  misc_feature (86)..(375): Homolog of NCBI NO: 18447761 NR Description: dehydration-induced protein RD22-like protein
  misc_feature (42)..(375): Homolog of NCBI NO: 34910186 NR Description: putative dehydration-responsive protein RD22
  misc_feature (2)..(69): Homolog of NCBI NO: 14422448 NR Description: BURP domain-containing protein [Bruguiera
  misc_feature (109)..(375): Homolog of NCBI NO: 14422448 NR Description: BURP domain-containing protein [Bruguiera
  misc_feature (63)..(375): Homolog of NCBI NO: 14422444 NR Description: BURP domain-containing protein [Bruguiera
  misc_feature (63)..(375): Homolog of NCBI NO: 16588826 NR Description: dehydration-responsive protein RD22 [Prunus
  misc_feature (1)..(378): Homolog of NCBI NO: 15239478 NR Description: dehydration-induced protein RD22
  misc_feature (127)..(375): Homolog of NCBI NO: 14422442 NR Description: BURP domain-containing protein [Bruguiera
  misc_feature (86)..(375): Homolog of NCBI NO: 33578034 NR Description: BURP domain-containing protein [Gossypium
  misc_feature (63)..(85): Homolog of NCBI NO: 14422448 NR Description: BURP domain-containing protein [Bruguiera
  misc_feature (86)..(375): Homolog of NCBI NO: 18447761 NR Description: dehydration-induced protein RD22-like protein
  misc_feature (42)..(375): Homolog of NCBI NO: 34910186 NR Description: putative dehydration-responsive protein RD22
  misc_feature (2)..(69): Homolog of NCBI NO: 14422448 NR Description: BURP domain-containing protein [Bruguiera
  misc_feature (109)..(375): Homolog of NCBI NO: 14422448 NR Description: BURP domain-containing protein [Bruguiera
  misc_feature (63)..(375): Homolog of NCBI NO: 14422444 NR Description: BURP domain-containing protein [Bruguiera
  misc_feature (63)..(375): Homolog of NCBI NO: 16588826 NR Description: dehydration-responsive protein RD22 [Prunus
  misc_feature (1)..(378): Homolog of NCBI NO: 15239478 NR Description: dehydration-induced protein RD22
MVVAIAADLTPERYWSTALPNTPIPNSLHNLLTFDFTDEKSTNVQVGKGGVNVNTHKGKTGSGTAVNVGKGGVRVDTGKGKPGGGTHVSVGSGKGHGGGVAVHTGKPGKRTDVGVGKGGVTVHTRHKGRPIYVGVKPGANPFVYNYAAKETQLHDDPNAALFFLEKDLVRGKEMNVRFNAEDGYGGKTAFLPRGEAETVPFGSEKFSETLKRFSVEAGSEEAEMMKKTIEECEARKVSGEEKYCATSLESMVDFSVSKLGKYHVRAVSTEVAKKNAPMQKYKIAAAGVKKLSDDKSVVCHKQKYPFAVFYCHKAMMTTVYAVPLEGENGMRAKAVAVCHKNTSAWNPNHLAFKVLKVKPGTVPVCHFLPETHVVWFSY

SEQ ID NO: 22513 - protein, 205 aa, Arabidopsis thaliana
  peptide (1)..(205): Ceres Seq. ID no. 12394812
  misc_feature (1)..(204): Homolog of NCBI NO: 24416614 NR Description: resistant specific protein-1(4) [Vigna radiata]
  misc_feature (1)..(202): Homolog of NCBI NO: 14422446 NR Description: BURP domain-containing protein [Bruguiera
  misc_feature (1)..(202): Homolog of NCBI NO: 14422442 NR Description: BURP domain-containing protein [Bruguiera
  misc_feature (1)..(202): Homolog of NCBI NO: 33578034 NR Description: BURP domain-containing protein [Gossypium
  misc_feature (1)..(202): Homolog of NCBI NO: 18447761 NR Description: dehydration-induced protein RD22-like protein
  misc_feature (1)..(202): Homolog of NCBI NO: 34910186 NR Description: putative dehydration-responsive protein RD22
  misc_feature (1)..(202): Homolog of NCBI NO: 14422448 NR Description: BURP domain-containing protein [Bruguiera
  misc_feature (1)..(202): Homolog of NCBI NO: 14422444 NR Description: BURP domain-containing protein [Bruguiera
  misc_feature (1)..(202): Homolog of NCBI NO: 16588826 NR Description: dehydration-responsive protein RD22 [Prunus
  misc_feature (1)..(205): Homolog of NCBI NO: 15239478 NR Description: dehydration-induced protein RD22
  misc_feature (1)..(204): Homolog of NCBI NO: 24416614 NR Description: resistant specific protein-1(4) [Vigna radiata]
  misc_feature (1)..(202): Homolog of NCBI NO: 14422446 NR Description: BURP domain-containing protein [Bruguiera
  misc_feature (1)..(202): Homolog of NCBI NO: 14422442 NR Description: BURP domain-containing protein [Bruguiera
  misc_feature (1)..(202): Homolog of NCBI NO: 33578034 NR Description: BURP domain-containing protein [Gossypium
  misc_feature (1)..(202): Homolog of NCBI NO: 18447761 NR Description: dehydration-induced protein RD22-like protein
  misc_feature (1)..(202): Homolog of NCBI NO: 34910186 NR Description: putative dehydration-responsive protein RD22
  misc_feature (1)..(202): Homolog of NCBI NO: 14422448 NR Description: BURP domain-containing protein [Bruguiera
  misc_feature (1)..(202): Homolog of NCBI NO: 14422444 NR Description: BURP domain-containing protein [Bruguiera
  misc_feature (1)..(202): Homolog of NCBI NO: 16588826 NR Description: dehydration-responsive protein RD22 [Prunus
  misc_feature (1)..(205): Homolog of NCBI NO: 15239478 NR Description: dehydration-induced protein RD22
  misc_feature (1)..(202): Homolog of NCBI NO: 33578034 NR Description: BURP domain-containing protein [Gossypium
  misc_feature (1)..(202): Homolog of NCBI NO: 18447761 NR Description: dehydration-induced protein RD22-like protein
  misc_feature (1)..(202): Homolog of NCBI NO: 34910186 NR Description: putative dehydration-responsive protein RD22
  misc_feature (1)..(202): Homolog of NCBI NO: 14422448 NR Description: BURP domain-containing protein [Bruguiera
  misc_feature (1)..(202): Homolog of NCBI NO: 14422444 NR Description: BURP domain-containing protein [Bruguiera
  misc_feature (1)..(202): Homolog of NCBI NO: 16588826 NR Description: dehydration-responsive protein RD22 [Prunus
  misc_feature (1)..(205): Homolog of NCBI NO: 15239478 NR Description: dehydration-induced protein RD22
  misc_feature (1)..(204): Homolog of NCBI NO: 24416614 NR Description: resistant specific protein-1(4) [Vigna radiata]
  misc_feature (1)..(202): Homolog of NCBI NO: 14422446 NR Description: BURP domain-containing protein [Bruguiera
  misc_feature (1)..(202): Homolog of NCBI NO: 14422442 NR Description: BURP domain-containing protein [Bruguiera
MNVRFNAEDGYGGKTAFLPRGEAETVPFGSEKFSETLKRFSVEAGSEEAEMMKKTIEECEARKVSGEEKYCATSLESMVDFSVSKLGKYHVRAVSTEVAKKNAPMQKYKIAAAGVKKLSDDKSVVCHKQKYPFAVFYCHKAMMTTVYAVPLEGENGMRAKAVAVCHKNTSAWNPNHLAFKVLKVKPGTVPVCHFLPETHVVWFSY

SEQ ID NO: 22514 - DNA, 1113 bp, Arabidopsis thaliana
  misc_feature (1)..(1113): Ceres Seq. ID no. 12328198
  misc_feature: MA Experiment ID: 108435 Result: Down-regulated in Transcription
  misc_feature: MA Experiment 108435 PARAMETER Experiment Name: At_stm_Mutants_cDNA_P Parameter: Plant Line Value: wt Landsburg vs stm
  misc_feature: MA Experiment 108435 PARAMETER Experiment Name: At_stm_Mutants_cDNA_P Parameter: Tissue Value: Shoot Apical Meristem Region
  misc_feature: MA Experiment ID: 108464 Result: Up-regulated in Transcription
  misc_feature: MA Experiment 108464 PARAMETER Experiment Name: At_Germinating_Seeds_cDNA_P Parameter: Age (day) Value: 4 vs. 0
  misc_feature: MA Experiment 108464 PARAMETER Experiment Name: At_Germinating_Seeds_cDNA_P Parameter: Tissue Value: Germinating Seeds
  misc_feature: MA Experiment ID: 108595 Result: Down-regulated in Transcription
  misc_feature: MA Experiment 108595 PARAMETER Experiment Name: At_Ler-pi_Ovule_cDNA_P Parameter: Plant Line Value: null
  misc_feature: MA Experiment ID: 20000235 Result: Down-regulated in Transcription
  misc_feature: MA Experiment 20000235 PARAMETER Experiment Name: At_Siliques_P Parameter: Age (day) Value: 21
  misc_feature: MA Experiment 20000235 PARAMETER Experiment Name: At_Siliques_P Parameter: Organism Value: A. thaliana
  misc_feature: MA Experiment 20000235 PARAMETER Experiment Name: At_Siliques_P Parameter: Plant Line Value: WS
  misc_feature: MA Experiment 20000235 PARAMETER Experiment Name: At_Siliques_P Parameter: Tissue Value: 5-10mm Siliques vs. Whole Plant
  misc_feature: MA Experiment ID: 20000794 Result: Up-regulated in Transcription
  misc_feature: MA Experiment 20000794 PARAMETER Experiment Name: At_Petals_P Parameter: Age (day) Value: 23-25 days
  misc_feature: MA Experiment 20000794 PARAMETER Experiment Name: At_Petals_P Parameter: Plant Line Value: WS
  misc_feature: MA Experiment 20000794 PARAMETER Experiment Name: At_Petals_P Parameter: Tissue Value: Petals vs. Whole plant
  misc_feature: MA Experiment ID: 20001557 Result: Down-regulated in Transcription
  misc_feature: MA Experiment 20001557 PARAMETER Experiment Name: At_Drought_Soil_Dry_P Parameter: Age (day) Value: 27
  misc_feature: MA Experiment 20001557 PARAMETER Experiment Name: At_Drought_Soil_Dry_P Parameter: Organism Value: A. thaliana
  misc_feature: MA Experiment 20001557 PARAMETER Experiment Name: At_Drought_Soil_Dry_P Parameter: Plant Line Value: WS
  misc_feature: MA Experiment 20001557 PARAMETER Experiment Name: At_Drought_Soil_Dry_P Parameter: Post Timepoint (hr) Value: 3
  misc_feature: MA Experiment 20001557 PARAMETER Experiment Name: At_Drought_Soil_Dry_P Parameter: Post-Treatment Value: Re-Water vs. No Drought
  misc_feature: MA Experiment 20001557 PARAMETER Experiment Name: At_Drought_Soil_Dry_P Parameter: Timepoint (day) Value: 13
  misc_feature: MA Experiment 20001557 PARAMETER Experiment Name: At_Drought_Soil_Dry_P Parameter: Treatment Value: Drought vs. No Drought
aattagaatagtgtatccctcttctctattccttcaagccaactaaaactacattgcgtgacttcttctgtaaccatttttctattccgatcaaaccatggcgtatttagctccgatttcttcatccttatccatattcaagaatccccaactctcaagattccaattttcttcttcctcaccgaacccacttttccttcgacctaggattcagattctgagtatgaccatgaacaagtcgccgtctttagtggtggttgcggctactactgcggcagagaagcagaagaagaggtatcctggagaatcaaagggttttgtggaggagatgaggtttgtggctatgagacttcatactaaagatcaagctaaggaaggtgagaaagagactaaatctattgaggaacgtcctgttgctaaatgggaacctactgttgaaggttacttgaggtttcttgtggatagtaaattggtttatgatactcttgaactgattattcaagactccaatttcccaacttatgccgagttcaagaacacggggctggaaagagcggagaaattatccacggatttggagtggttcaaggaacaaggttacgagattccagaaccaacagctcctggtaaaacatattctcaatatttaaaggaattagcagagaaggatcctcaagcattcatttgtcacttctacaacatctactttgctcatagtgctggtggacgaatgattggcagaaaggtggcagagcggatactcgataataaagaactcgagttctacaaatgggacggcgaactttctcaattgttgcagaacgttagggagaaactgaacaaggttgcagaggagtggactagagaagaaaagaatcattgtttggaagagactgagaaatcgttcaagtattctggtgagatacttcgtctcatattgtcctgatttggtgcgcagtgtctctagatatctcaatacgtcttgtggcaactaaaatgatgcacattgtttatattcctgtattatattaatcatcttctacatgtattaaactcttctttgcttcaaagctgttactaagttcaaggttcaaattaataacttttctgccg

SEQ ID NO: 22515 - protein, 282 aa, Arabidopsis thaliana
  peptide (1)..(282): Ceres Seq. ID no. 12328199
  misc_feature (88)..(279): Pfam Name: Heme oxygenase Pfam Description: Heme oxygenase
  misc_feature (10)..(282): Homolog of NCBI NO: 15076863 NR Description: putative heme oxygenase 1 precursor [Pisum
  misc_feature (1)..(282): Homolog of NCBI NO: 14485575 NR Description: heme oxygenase 1 [Lycopersicon esculentum]
  misc_feature (41)..(282): Homolog of NCBI NO: 15222425 NR Description: putative heme oxygenase
  misc_feature (43)..(282): Homolog of NCBI NO: 14030647 NR Description: At2g26670/F18A8.4 [Arabidopsis thaliana]
  misc_feature (15)..(282): Homolog of NCBI NO: 21450864 NR Description: putative heme oxygenase HO1 [Arabidopsis thaliana]
  misc_feature (1)..(282): Homolog of NCBI NO: 15225771 NR Description: heme oxygenase 1 (HO1)
MAYLAPISSSLSIFKNPQLSRFQFSSSSPNPLFLRPRIQILSMTMNKSPSLVVVAATTAAEKQKKRYPGESKGFVEEMRFVAMRLHTKDQAKEGEKETKSIEERPVAKWEPTVEGYLRFLVDSKLVYDTLELIIQDSNFPTYAEFKNTGLERAEKLSTDLEWFKEQGYEIPEPTAPGKTYSQYLKELAEKDPQAFICHFYNIYFAHSAGGRMIGRKVAERILDNKELEFYKWDGELSQLLQNVREKLNKVAEEWTREEKNHCLEETEKSFKYSGEILRLILS

SEQ ID NO: 22516 - protein, 240 aa, Arabidopsis thaliana
  peptide (1)..(240): Ceres Seq. ID no. 12328200
  misc_feature (46)..(237): Pfam Name: Heme oxygenase Pfam Description: Heme oxygenase
  misc_feature (1)..(240): Homolog of NCBI NO: 15076863 NR Description: putative heme oxygenase 1 precursor [Pisum
  misc_feature (1)..(240): Homolog of NCBI NO: 14485575 NR Description: heme oxygenase 1 [Lycopersicon esculentum]
  misc_feature (1)..(240): Homolog of NCBI NO: 15222425 NR Description: putative heme oxygenase
  misc_feature (1)..(240): Homolog of NCBI NO: 14030647 NR Description: At2g26670/F18A8.4 [Arabidopsis thaliana]
  misc_feature (1)..(240): Homolog of NCBI NO: 21450864 NR Description: putative heme oxygenase HO1 [Arabidopsis thaliana]
  misc_feature (1)..(240): Homolog of NCBI NO: 15225771 NR Description: heme oxygenase 1 (HO1)
MTMNKSPSLVVVAATTAAEKQKKRYPGESKGFVEEMRFVAMRLHTKDQAKEGEKETKSIEERPVAKWEPTVEGYLRFLVDSKLVYDTLELIIQDSNFPTYAEFKNTGLERAEKLSTDLEWFKEQGYEIPEPTAPGKTYSQYLKELAEKDPQAFICHFYNIYFAHSAGGRMIGRKVAERILDNKELEFYKWDGELSQLLQNVREKLNKVAEEWTREEKNHCLEETEKSFKYSGEILRLILS

SEQ ID NO: 22517 - protein, 238 aa, Arabidopsis thaliana
  peptide (1)..(238): Ceres Seq. ID no. 12328201
  misc_feature (44)..(235): Pfam Name: Heme oxygenase Pfam Description: Heme oxygenase
  misc_feature (1)..(238): Homolog of NCBI NO: 15076863 NR Description: putative heme oxygenase 1 precursor [Pisum
  misc_feature (1)..(238): Homolog of NCBI NO: 14485575 NR Description: heme oxygenase 1 [Lycopersicon esculentum]
  misc_feature (1)..(238): Homolog of NCBI NO: 15222425 NR Description: putative heme oxygenase
  misc_feature (1)..(238): Homolog of NCBI NO: 14030647 NR Description: At2g26670/F18A8.4 [Arabidopsis thaliana]
  misc_feature (1)..(238): Homolog of NCBI NO: 21450864 NR Description: putative heme oxygenase HO1 [Arabidopsis thaliana]
  misc_feature (1)..(238): Homolog of NCBI NO: 15225771 NR Description: heme oxygenase 1 (HO1)
MNKSPSLVVVAATTAAEKQKKRYPGESKGFVEEMRFVAMRLHTKDQAKEGEKETKSIEERPVAKWEPTVEGYLRFLVDSKLVYDTLELIIQDSNFPTYAEFKNTGLERAEKLSTDLEWFKEQGYEIPEPTAPGKTYSQYLKELAEKDPQAFICHFYNIYFAHSAGGRMIGRKVAERILDNKELEFYKWDGELSQLLQNVREKLNKVAEEWTREEKNHCLEETEKSFKYSGEILRLILS

SEQ ID NO: 22518 - DNA, 911 bp, Arabidopsis thaliana
  misc_feature (1)..(911): Ceres Seq. ID no. 12334851
  misc_feature: MA Experiment ID: 108433 Result: Up-regulated in Transcription
  misc_feature: MA Experiment 108433 PARAMETER Experiment Name: At_rhl_Mutant2_cDNA_P Parameter: Age (day) Value: 7
  misc_feature: MA Experiment 108433 PARAMETER Experiment Name: At_rhl_Mutant2_cDNA_P Parameter: Organism Value: A. thaliana
  misc_feature: MA Experiment 108433 PARAMETER Experiment Name: At_rhl_Mutant2_cDNA_P Parameter: Plant Line Value: rhl Mutant vs. wt landsburg
  misc_feature: MA Experiment 108433 PARAMETER Experiment Name: At_rhl_Mutant2_cDNA_P Parameter: Tissue Value: Roots
  misc_feature: MA Experiment ID: 108434 Result: Down-regulated in Transcription
  misc_feature: MA Experiment 108434 PARAMETER Experiment Name: At_Root_Tips_cDNA_P Parameter: Tissue Value: Root Tips
  misc_feature: MA Experiment ID: 108488 Result: Down-regulated in Transcription
  misc_feature: MA Experiment ID: 108501 Result: Down-regulated in Transcription
  misc_feature: MA Experiment 108501 PARAMETER Experiment Name: At_ap2_floral_buds_cDNA_P Parameter: Plant Line Value: ap2 (Ler.)
  misc_feature: MA Experiment 108501 PARAMETER Experiment Name: At_ap2_floral_buds_cDNA_P Parameter: Tissue Value: Closed Flower
  misc_feature: MA Experiment ID: 108572 Result: Up-regulated in Transcription
  misc_feature: MA Experiment 108572 PARAMETER Experiment Name: At_Drought_cDNA_P Parameter: Timepoint (hr) Value: 1
  misc_feature: MA Experiment 108572 PARAMETER Experiment Name: At_Drought_cDNA_P Parameter: Tissue Value: Aerial
  misc_feature: MA Experiment 108572 PARAMETER Experiment Name: At_Drought_cDNA_P Parameter: Treatment Value: Drought vs. No Drought
  misc_feature: MA Experiment ID: 108573 Result: Up-regulated in Transcription
  misc_feature: MA Experiment 108573 PARAMETER Experiment Name: At_Drought_cDNA_P Parameter: Timepoint (hr) Value: 6
  misc_feature: MA Experiment 108573 PARAMETER Experiment Name: At_Drought_cDNA_P Parameter: Tissue Value: Aerial
  misc_feature: MA Experiment 108573 PARAMETER Experiment Name: At_Drought_cDNA_P Parameter: Treatment Value: Drought vs. No Drought
  misc_feature: MA Experiment ID: 108595 Result: Up-regulated in Transcription
  misc_feature: MA Experiment 108595 PARAMETER Experiment Name: At_Ler-pi_Ovule_cDNA_P Parameter: Plant Line Value: null
  misc_feature: MA Experiment ID: 108667 Result: Up-regulated in Transcription
  misc_feature: MA Experiment 108667 PARAMETER Experiment Name: At_2mM_SA_cDNA_P Parameter: Plant Line Value: WS
  misc_feature: MA Experiment 108667 PARAMETER Experiment Name: At_2mM_SA_cDNA_P Parameter: Timepoint (hr) Value: 1
  misc_feature: MA Experiment 108667 PARAMETER Experiment Name: At_2mM_SA_cDNA_P Parameter: Treatment Value: 2mM SA vs. No Treatment
  misc_feature: MA Experiment ID: 20000069 Result: Up-regulated in Transcription
  misc_feature: MA Experiment 20000069 PARAMETER Experiment Name: At_100uM_ABA_Mutants_cDNA_P Parameter: Plant Line Value: CS23
  misc_feature: MA Experiment 20000069 PARAMETER Experiment Name: At_100uM_ABA_Mutants_cDNA_P Parameter: Timepoint (hr) Value: 6
  misc_feature: MA Experiment 20000069 PARAMETER Experiment Name: At_100uM_ABA_Mutants_cDNA_P Parameter: Tissue Value: Aerial
  misc_feature: MA Experiment 20000069 PARAMETER Experiment Name: At_100uM_ABA_Mutants_cDNA_P Parameter: Treatment Value: 100uM ABA vs. No Treatment
  misc_feature: MA Experiment ID: 20000071 Result: Up-regulated in Transcription
  misc_feature: MA Experiment 20000071 PARAMETER Experiment Name: At_100uM_ABA_Mutants_cDNA_P Parameter: Plant Line Value: CS8104
  misc_feature: MA Experiment 20000071 PARAMETER Experiment Name: At_100uM_ABA_Mutants_cDNA_P Parameter: Timepoint (hr) Value: 6
  misc_feature: MA Experiment 20000071 PARAMETER Experiment Name: At_100uM_ABA_Mutants_cDNA_P Parameter: Tissue Value: Aerial
  misc_feature: MA Experiment 20000071 PARAMETER Experiment Name: At_100uM_ABA_Mutants_cDNA_P Parameter: Treatment Value: 100uM ABA vs. No Treatment
  misc_feature: MA Experiment ID: 20000111 Result: Down-regulated in Transcription
  misc_feature: MA Experiment 20000111 PARAMETER Experiment Name: At_42deg_Heat_cDNA_P Parameter: Temperature (deg C) Value: 42 vs. 22
  misc_feature: MA Experiment 20000111 PARAMETER Experiment Name: At_42deg_Heat_cDNA_P Parameter: Timepoint (hr) Value: 6
  misc_feature: MA Experiment 20000111 PARAMETER Experiment Name: At_42deg_Heat_cDNA_P Parameter: Tissue Value: Aerial
  misc_feature: MA Experiment ID: 20000117 Result: Up-regulated in Transcription
  misc_feature: MA Experiment 20000117 PARAMETER Experiment Name: At_100uM_ABA_Mutants_cDNA_P Parameter: Plant Line Value: Columbia
  misc_feature: MA Experiment 20000117 PARAMETER Experiment Name: At_100uM_ABA_Mutants_cDNA_P Parameter: Timepoint (hr) Value: 6
  misc_feature: MA Experiment 20000117 PARAMETER Experiment Name: At_100uM_ABA_Mutants_cDNA_P Parameter: Tissue Value: Aerial
  misc_feature: MA Experiment 20000117 PARAMETER Experiment Name: At_100uM_ABA_Mutants_cDNA_P Parameter: Treatment Value: 100uM ABA vs. No Treatment
  misc_feature: MA Experiment ID: 20000185 Result: Down-regulated in Transcription
  misc_feature: MA Experiment 20000185 PARAMETER Experiment Name: At_Roots__P Parameter: Age (day) Value: 7 vs. 21
  misc_feature: MA Experiment 20000185 PARAMETER Experiment Name: At_Roots__P Parameter: Organism Value: A. thaliana
  misc_feature: MA Experiment 20000185 PARAMETER Experiment Name: At_Roots__P Parameter: Tissue Value: Roots vs. Whole Plant
  misc_feature: MA Experiment ID: 20000227 Result: Down-regulated in Transcription
  misc_feature: MA Experiment 20000227 PARAMETER Experiment Name: At_Root-Tips-vs-Tops_P Parameter: Tissue Value: Root Tips vs. Root Tops
  misc_feature: MA Experiment ID: 20000234 Result: Down-regulated in Transcription
  misc_feature: MA Experiment 20000234 PARAMETER Experiment Name: At_Siliques_P Parameter: Age (day) Value: 21
  misc_feature: MA Experiment 20000234 PARAMETER Experiment Name: At_Siliques_P Parameter: Organism Value: A. thaliana
  misc_feature: MA Experiment 20000234 PARAMETER Experiment Name: At_Siliques_P Parameter: Plant Line Value: WS
  misc_feature: MA Experiment 20000234 PARAMETER Experiment Name: At_Siliques_P Parameter: Tissue Value: Less Than 5mm Siliques vs. Whole Plant
  misc_feature: MA Experiment ID: 20000235 Result: Down-regulated in Transcription
  misc_feature: MA Experiment 20000235 PARAMETER Experiment Name: At_Siliques_P Parameter: Age (day) Value: 21
  misc_feature: MA Experiment 20000235 PARAMETER Experiment Name: At_Siliques_P Parameter: Organism Value: A. thaliana
  misc_feature: MA Experiment 20000235 PARAMETER Experiment Name: At_Siliques_P Parameter: Plant Line Value: WS
  misc_feature: MA Experiment 20000235 PARAMETER Experiment Name: At_Siliques_P Parameter: Tissue Value: 5-10mm Siliques vs. Whole Plant
  misc_feature: MA Experiment ID: 20000265 Result: Down-regulated in Transcription
  misc_feature: MA Experiment 20000265 PARAMETER Experiment Name: At_Open_Flower_P Parameter: Age (day) Value: 21
  misc_feature: MA Experiment 20000265 PARAMETER Experiment Name: At_Open_Flower_P Parameter: Plant Line Value: WS
  misc_feature: MA Experiment 20000265 PARAMETER Experiment Name: At_Open_Flower_P Parameter: Tissue Value: Closed Flower vs. Whole Plant
  misc_feature: MA Experiment ID: 20000286 Result: Down-regulated in Transcription
  misc_feature: MA Experiment 20000286 PARAMETER Experiment Name: At_Open_Flower_P Parameter: Age (day) Value: 21
  misc_feature: MA Experiment 20000286 PARAMETER Experiment Name: At_Open_Flower_P Parameter: Plant Line Value: WS
  misc_feature: MA Experiment 20000286 PARAMETER Experiment Name: At_Open_Flower_P Parameter: Tissue Value: Half Open vs. Whole Plant
  misc_feature: MA Experiment ID: 20000308 Result: Down-regulated in Transcription
  misc_feature: MA Experiment 20000308 PARAMETER Experiment Name: At_100mM_NaCl__P Parameter: Age (day) Value: 17
  misc_feature: MA Experiment 20000308 PARAMETER Experiment Name: At_100mM_NaCl__P Parameter: Organism Value: A. thaliana
  misc_feature: MA Experiment 20000308 PARAMETER Experiment Name: At_100mM_NaCl__P Parameter: Plant Line Value: WS
  misc_feature: MA Experiment 20000308 PARAMETER Experiment Name: At_100mM_NaCl__P Parameter: Timepoint (hr) Value: 72
  misc_feature: MA Experiment 20000308 PARAMETER Experiment Name: At_100mM_NaCl__P Parameter: Tissue Value: Whole Plant
  misc_feature: MA Experiment 20000308 PARAMETER Experiment Name: At_100mM_NaCl__P Parameter: Treatment Value: 100mM NaCl vs. No Treatment
  misc_feature: MA Experiment ID: 20000437 Result: Up-regulated in Transcription
  misc_feature: MA Experiment 20000437 PARAMETER Experiment Name: At_Drought_P Parameter: Age (day) Value: 8
  misc_feature: MA Experiment 20000437 PARAMETER Experiment Name: At_Drought_P Parameter: Organism Value: A. thaliana
  misc_feature: MA Experiment 20000437 PARAMETER Experiment Name: At_Drought_P Parameter: Plant Line Value: WS
  misc_feature: MA Experiment 20000437 PARAMETER Experiment Name: At_Drought_P Parameter: Timepoint (hr) Value: 24
  misc_feature: MA Experiment 20000437 PARAMETER Experiment Name: At_Drought_P Parameter: Tissue Value: Whole Plant
  misc_feature: MA Experiment 20000437 PARAMETER Experiment Name: At_Drought_P Parameter: Treatment Value: Drought vs. No Drought
  misc_feature: MA Experiment ID: 20000439 Result: Down-regulated in Transcription
  misc_feature: MA Experiment 20000439 PARAMETER Experiment Name: At_Roots__P Parameter: Age (day) Value: 14 vs. 21
  misc_feature: MA Experiment 20000439 PARAMETER Experiment Name: At_Roots__P Parameter: Organism Value: A. thaliana
  misc_feature: MA Experiment 20000439 PARAMETER Experiment Name: At_Roots__P Parameter: Tissue Value: Roots vs. Whole Plant
  misc_feature: MA Experiment ID: 20000574 Result: Down-regulated in Transcription
  misc_feature: MA Experiment 20000574 PARAMETER Experiment Name: At_100uM_ABA_Mutants__P Parameter: Organism Value: A. thaliana
  misc_feature: MA Experiment 20000574 PARAMETER Experiment Name: At_100uM_ABA_Mutants__P Parameter: Plant Line Value: CS23 vs. Ler wt
  misc_feature: MA Experiment 20000574 PARAMETER Experiment Name: At_100uM_ABA_Mutants__P Parameter: Timepoint (hr) Value: N/A
  misc_feature: MA Experiment 20000574 PARAMETER Experiment Name: At_100uM_ABA_Mutants__P Parameter: Tissue Value: Whole Plant
  misc_feature: MA Experiment 20000574 PARAMETER Experiment Name: At_100uM_ABA_Mutants__P Parameter: Treatment Value: None
  misc_feature: MA Experiment ID: 20001247 Result: Up-regulated in Transcription
  misc_feature: MA Experiment 20001247 PARAMETER Experiment Name: At_Far-red-induction_P Parameter: Age (day) Value: 7
  misc_feature: MA Experiment 20001247 PARAMETER Experiment Name: At_Far-red-induction_P Parameter: Light Value: Far-red vs. White
  misc_feature: MA Experiment 20001247 PARAMETER Experiment Name: At_Far-red-induction_P Parameter: Organism Value: A. thaliana
  misc_feature: MA Experiment 20001247 PARAMETER Experiment Name: At_Far-red-induction_P Parameter: Plant Line Value: Columbia
  misc_feature: MA Experiment 20001247 PARAMETER Experiment Name: At_Far-red-induction_P Parameter: Timepoint (hr) Value: 1
  misc_feature: MA Experiment 20001247 PARAMETER Experiment Name: At_Far-red-induction_P Parameter: Tissue Value: Whole Plant
  misc_feature: MA Experiment ID: 20001248 Result: Up-regulated in Transcription
  misc_feature: MA Experiment 20001248 PARAMETER Experiment Name: At_Far-red-induction_P Parameter: Age (day) Value: 7
  misc_feature: MA Experiment 20001248 PARAMETER Experiment Name: At_Far-red-induction_P Parameter: Light Value: Far-red vs. White
  misc_feature: MA Experiment 20001248 PARAMETER Experiment Name: At_Far-red-induction_P Parameter: Organism Value: A. thaliana
  misc_feature: MA Experiment 20001248 PARAMETER Experiment Name: At_Far-red-induction_P Parameter: Plant Line Value: Columbia
  misc_feature: MA Experiment 20001248 PARAMETER Experiment Name: At_Far-red-induction_P Parameter: Timepoint (hr) Value: 4
  misc_feature: MA Experiment 20001248 PARAMETER Experiment Name: At_Far-red-induction_P Parameter: Tissue Value: Whole Plant
  misc_feature: MA Experiment ID: 20001450 Result: Up-regulated in Transcription
  misc_feature: MA Experiment 20001450 PARAMETER Experiment Name: At_Far-red-induction_P Parameter: Age (day) Value: 7
  misc_feature: MA Experiment 20001450 PARAMETER Experiment Name: At_Far-red-induction_P Parameter: Light Value: Far-red vs. White
  misc_feature: MA Experiment 20001450 PARAMETER Experiment Name: At_Far-red-induction_P Parameter: Organism Value: A. thaliana
  misc_feature: MA Experiment 20001450 PARAMETER Experiment Name: At_Far-red-induction_P Parameter: Plant Line Value: Columbia
  misc_feature: MA Experiment 20001450 PARAMETER Experiment Name: At_Far-red-induction_P Parameter: Timepoint (hr) Value: 8
  misc_feature: MA Experiment 20001450 PARAMETER Experiment Name: At_Far-red-induction_P Parameter: Tissue Value: Whole Plant
  misc_feature: MA Experiment ID: 20001451 Result: Up-regulated in Transcription
  misc_feature: MA Experiment 20001451 PARAMETER Experiment Name: At_Far-red-induction_P Parameter: Age (day) Value: 7
  misc_feature: MA Experiment 20001451 PARAMETER Experiment Name: At_Far-red-induction_P Parameter: Light Value: Far-red vs. White
  misc_feature: MA Experiment 20001451 PARAMETER Experiment Name: At_Far-red-induction_P Parameter: Organism Value: A. thaliana
  misc_feature: MA Experiment 20001451 PARAMETER Experiment Name: At_Far-red-induction_P Parameter: Plant Line Value: Columbia
  misc_feature: MA Experiment 20001451 PARAMETER Experiment Name: At_Far-red-induction_P Parameter: Timepoint (hr) Value: 24
  misc_feature: MA Experiment 20001451 PARAMETER Experiment Name: At_Far-red-induction_P Parameter: Tissue Value: Whole Plant
  misc_feature: MA Experiment ID: 20001558 Result: Down-regulated in Transcription
  misc_feature: MA Experiment 20001558 PARAMETER Experiment Name: At_Drought_Soil_Dry_P Parameter: Age (day) Value: 27
  misc_feature: MA Experiment 20001558 PARAMETER Experiment Name: At_Drought_Soil_Dry_P Parameter: Organism Value: A. thaliana
  misc_feature: MA Experiment 20001558 PARAMETER Experiment Name: At_Drought_Soil_Dry_P Parameter: Plant Line Value: WS
  misc_feature: MA Experiment 20001558 PARAMETER Experiment Name: At_Drought_Soil_Dry_P Parameter: Post Timepoint (hr) Value: 6
  misc_feature: MA Experiment 20001558 PARAMETER Experiment Name: At_Drought_Soil_Dry_P Parameter: Post-Treatment Value: Re-Water vs. No Drought
  misc_feature: MA Experiment 20001558 PARAMETER Experiment Name: At_Drought_Soil_Dry_P Parameter: Timepoint (day) Value: 13
  misc_feature: MA Experiment 20001558 PARAMETER Experiment Name: At_Drought_Soil_Dry_P Parameter: Treatment Value: Drought vs. No Drought
  misc_feature: MA Experiment ID: 20001560 Result: Down-regulated in Transcription
  misc_feature: MA Experiment 20001560 PARAMETER Experiment Name: At_Drought_Soil_Dry_P Parameter: Age (day) Value: 28
  misc_feature: MA Experiment 20001560 PARAMETER Experiment Name: At_Drought_Soil_Dry_P Parameter: Organism Value: A. thaliana
  misc_feature: MA Experiment 20001560 PARAMETER Experiment Name: At_Drought_Soil_Dry_P Parameter: Plant Line Value: WS
  misc_feature: MA Experiment 20001560 PARAMETER Experiment Name: At_Drought_Soil_Dry_P Parameter: Post Timepoint (hr) Value: None
  misc_feature: MA Experiment 20001560 PARAMETER Experiment Name: At_Drought_Soil_Dry_P Parameter: Post-Treatment Value: None
  misc_feature: MA Experiment 20001560 PARAMETER Experiment Name: At_Drought_Soil_Dry_P Parameter: Timepoint (day) Value: 14
  misc_feature: MA Experiment 20001560 PARAMETER Experiment Name: At_Drought_Soil_Dry_P Parameter: Treatment Value: Drought vs. No Drought
attctcttaacattccattactcttatccttttaccctcatcatcctccactatttacagttttgccactctgactttatgctagcttcttccggtgactggcgataacacgagagagccttcgccttctccaagcttcatactcttccgacgataaagattagaagacatgaagaacggtaaccggaaaacaacgccggaaacagagaagtctcaccggagaaagttatcagagaaagcgatgtcgtttcacggcagaggaacaacgccgttatcaaatccaggcgagcttcgaagaccgaaaacgttaccggagttattctccaccggtcaaagcatcaccgtaccggagacggtttcacttccgccacgtttgacgaaacttttacttaacgtgacggtacaaggaagtttaggagccgtacaaattataatctcgccggaatccaccgtgagtgatttaatcgacgccgccgttcgtcagtacgttaaagaagctcgccggccatttttaccggaatctgaaccgtcacgatttgatcttcattactcgcagtttagtcttgagagtattgtaagagacgagaagttgatatcgctagggtcgagaaactttttcttatgtggtcggaaagagaccggagggtttatcggctgtggtttatcgtcggaatcttgttctaaggaagcagagaaagtggctaaaactggttttcattggctcaaatttatgggcttctagaagtttttatcattttgaattattgctttttcaaattagttccattctttagaaaaaggatataaaaaacatctgtgtatattatttctatgtagaaatgaaaatcattaattagtggtgtataatgtattttaatcaattatataccaagatgattatatgaagttct

SEQ ID NO: 22519 - protein, 190 aa, Arabidopsis thaliana
  peptide (1)..(190): Ceres Seq. ID no. 12334852
  misc_feature (71)..(156): Homolog of NCBI NO: 18409673 NR Description: expressed protein
  misc_feature (71)..(156): Homolog of NCBI NO: 16226338 NR Description: At1g70780/F5A18_4 [Arabidopsis thaliana]
  misc_feature (17)..(190): Homolog of NCBI NO: 38347592 NR Description: OSJNBa0042I15.5 [Oryza sativa (japonica
  misc_feature (2)..(188): Homolog of NCBI NO: 10279678 NR Description: hypothetical protein [Catharanthus roseus]
  misc_feature (1)..(190): Homolog of NCBI NO: 18401542 NR Description: expressed protein
MKNGNRKTTPETEKSHRRKLSEKAMSFHGRGTTPLSNPGELRRPKTLPELFSTGQSITVPETVSLPPRLTKLLLNVTVQGSLGAVQIIISPESTVSDLIDAAVRQYVKEARRPFLPESEPSRFDLHYSQFSLESIVRDEKLISLGSRNFFLCGRKETGGFIGCGLSSESCSKEAEKVAKTGFHWLKFMGF

SEQ ID NO: 22520 - protein, 166 aa, Arabidopsis thaliana
  peptide (1)..(166): Ceres Seq. ID no. 12334853
  misc_feature (47)..(132): Homolog of NCBI NO: 18409673 NR Description: expressed protein
  misc_feature (47)..(132): Homolog of NCBI NO: 16226338 NR Description: At1g70780/F5A18_4 [Arabidopsis thaliana]
  misc_feature (1)..(166): Homolog of NCBI NO: 38347592 NR Description: OSJNBa0042I15.5 [Oryza sativa (japonica
  misc_feature (1)..(164): Homolog of NCBI NO: 10279678 NR Description: hypothetical protein [Catharanthus roseus]
  misc_feature (1)..(166): Homolog of NCBI NO: 18401542 NR Description: expressed protein
MSFHGRGTTPLSNPGELRRPKTLPELFSTGQSITVPETVSLPPRLTKLLLNVTVQGSLGAVQIIISPESTVSDLIDAAVRQYVKEARRPFLPESEPSRFDLHYSQFSLESIVRDEKLISLGSRNFFLCGRKETGGFIGCGLSSESCSKEAEKVAKTGFHWLKFMGF

SEQ ID NO: 22521 - DNA, 980 bp, Arabidopsis thaliana
  misc_feature (1)..(980): Ceres Seq. ID no. 12394825
  misc_feature: MA Experiment ID: 108434 Result: Up-regulated in Transcription
  misc_feature: MA Experiment 108434 PARAMETER Experiment Name: At_Root_Tips_cDNA_P Parameter: Tissue Value: Root Tips
  misc_feature: MA Experiment ID: 108573 Result: Up-regulated in Transcription
  misc_feature: MA Experiment 108573 PARAMETER Experiment Name: At_Drought_cDNA_P Parameter: Timepoint (hr) Value: 6
  misc_feature: MA Experiment 108573 PARAMETER Experiment Name: At_Drought_cDNA_P Parameter: Tissue Value: Aerial
  misc_feature: MA Experiment 108573 PARAMETER Experiment Name: At_Drought_cDNA_P Parameter: Treatment Value: Drought vs. No Drought
  misc_feature: MA Experiment ID: 108595 Result: Down-regulated in Transcription
  misc_feature: MA Experiment 108595 PARAMETER Experiment Name: At_Ler-pi_Ovule_cDNA_P Parameter: Plant Line Value: null
  misc_feature: MA Experiment ID: 20000069 Result: Down-regulated in Transcription
  misc_feature: MA Experiment 20000069 PARAMETER Experiment Name: At_100uM_ABA_Mutants_cDNA_P Parameter: Plant Line Value: CS23
  misc_feature: MA Experiment 20000069 PARAMETER Experiment Name: At_100uM_ABA_Mutants_cDNA_P Parameter: Timepoint (hr) Value: 6
  misc_feature: MA Experiment 20000069 PARAMETER Experiment Name: At_100uM_ABA_Mutants_cDNA_P Parameter: Tissue Value: Aerial
  misc_feature: MA Experiment 20000069 PARAMETER Experiment Name: At_100uM_ABA_Mutants_cDNA_P Parameter: Treatment Value: 100uM ABA vs. No Treatment
  misc_feature: MA Experiment ID: 20000070 Result: Down-regulated in Transcription
  misc_feature: MA Experiment 20000070 PARAMETER Experiment Name: At_100uM_ABA_Mutants_cDNA_P Parameter: Plant Line Value: CS24
  misc_feature: MA Experiment 20000070 PARAMETER Experiment Name: At_100uM_ABA_Mutants_cDNA_P Parameter: Timepoint (hr) Value: 6
  misc_feature: MA Experiment 20000070 PARAMETER Experiment Name: At_100uM_ABA_Mutants_cDNA_P Parameter: Tissue Value: Aerial
  misc_feature: MA Experiment 20000070 PARAMETER Experiment Name: At_100uM_ABA_Mutants_cDNA_P Parameter: Treatment Value: 100uM ABA vs. No Treatment
  misc_feature: MA Experiment ID: 20000086 Result: Down-regulated in Transcription
  misc_feature: MA Experiment 20000086 PARAMETER Experiment Name: At_100uM_ABA_Mutants_cDNA_P Parameter: Plant Line Value: CS22
  misc_feature: MA Experiment 20000086 PARAMETER Experiment Name: At_100uM_ABA_Mutants_cDNA_P Parameter: Timepoint (hr) Value: 6
  misc_feature: MA Experiment 20000086 PARAMETER Experiment Name: At_100uM_ABA_Mutants_cDNA_P Parameter: Tissue Value: Aerial
  misc_feature: MA Experiment 20000086 PARAMETER Experiment Name: At_100uM_ABA_Mutants_cDNA_P Parameter: Treatment Value: 100uM ABA vs. No Treatment
  misc_feature: MA Experiment ID: 20000113 Result: Up-regulated in Transcription
  misc_feature: MA Experiment 20000113 PARAMETER Experiment Name: At_42deg_Heat_cDNA_P Parameter: Temperature (deg C) Value: 42 vs. 22
  misc_feature: MA Experiment 20000113 PARAMETER Experiment Name: At_42deg_Heat_cDNA_P Parameter: Timepoint (hr) Value: 8
  misc_feature: MA Experiment 20000113 PARAMETER Experiment Name: At_42deg_Heat_cDNA_P Parameter: Tissue Value: Aerial
  misc_feature: MA Experiment ID: 20000184 Result: Up-regulated in Transcription
  misc_feature: MA Experiment 20000184 PARAMETER Experiment Name: At_Shoots__P Parameter: Age (day) Value: 7
  misc_feature: MA Experiment 20000184 PARAMETER Experiment Name: At_Shoots__P Parameter: Tissue Value: Shoots vs. Whole Plant
  misc_feature: MA Experiment ID: 20000185 Result: Up-regulated in Transcription
  misc_feature: MA Experiment 20000185 PARAMETER Experiment Name: At_Roots__P Parameter: Age (day) Value: 7 vs. 21
  misc_feature: MA Experiment 20000185 PARAMETER Experiment Name: At_Roots__P Parameter: Organism Value: A. thaliana
  misc_feature: MA Experiment 20000185 PARAMETER Experiment Name: At_Roots__P Parameter: Tissue Value: Roots vs. Whole Plant
  misc_feature: MA Experiment ID: 20000227 Result: Down-regulated in Transcription
  misc_feature: MA Experiment 20000227 PARAMETER Experiment Name: At_Root-Tips-vs-Tops_P Parameter: Tissue Value: Root Tips vs. Root Tops
  misc_feature: MA Experiment ID: 20000234 Result: Down-regulated in Transcription
  misc_feature: MA Experiment 20000234 PARAMETER Experiment Name: At_Siliques_P Parameter: Age (day) Value: 21
  misc_feature: MA Experiment 20000234 PARAMETER Experiment Name: At_Siliques_P Parameter: Organism Value: A. thaliana
  misc_feature: MA Experiment 20000234 PARAMETER Experiment Name: At_Siliques_P Parameter: Plant Line Value: WS
  misc_feature: MA Experiment 20000234 PARAMETER Experiment Name: At_Siliques_P Parameter: Tissue Value: Less Than 5mm Siliques vs. Whole Plant
  misc_feature: MA Experiment ID: 20000235 Result: Down-regulated in Transcription
  misc_feature: MA Experiment 20000235 PARAMETER Experiment Name: At_Siliques_P Parameter: Age (day) Value: 21
  misc_feature: MA Experiment 20000235 PARAMETER Experiment Name: At_Siliques_P Parameter: Organism Value: A. thaliana
  misc_feature: MA Experiment 20000235 PARAMETER Experiment Name: At_Siliques_P Parameter: Plant Line Value: WS
  misc_feature: MA Experiment 20000235 PARAMETER Experiment Name: At_Siliques_P Parameter: Tissue Value: 5-10mm Siliques vs. Whole Plant
  misc_feature: MA Experiment ID: 20000264 Result: Down-regulated in Transcription
  misc_feature: MA Experiment 20000264 PARAMETER Experiment Name: At_Open_Flower_P Parameter: Age (day) Value: 21
  misc_feature: MA Experiment 20000264 PARAMETER Experiment Name: At_Open_Flower_P Parameter: Plant Line Value: WS
  misc_feature: MA Experiment 20000264 PARAMETER Experiment Name: At_Open_Flower_P Parameter: Tissue Value: Open Flower vs. Whole Plant
  misc_feature: MA Experiment ID: 20000265 Result: Down-regulated in Transcription
  misc_feature: MA Experiment 20000265 PARAMETER Experiment Name: At_Open_Flower_P Parameter: Age (day) Value: 21
  misc_feature: MA Experiment 20000265 PARAMETER Experiment Name: At_Open_Flower_P Parameter: Plant Line Value: WS
  misc_feature: MA Experiment 20000265 PARAMETER Experiment Name: At_Open_Flower_P Parameter: Tissue Value: Closed Flower vs. Whole Plant
  misc_feature: MA Experiment ID: 20000269 Result: Down-regulated in Transcription
  misc_feature: MA Experiment 20000269 PARAMETER Experiment Name: At_1mM_KNO3_L-vs-H_Roots_P Parameter: Age (day) Value: 7,10,12
  misc_feature: MA Experiment 20000269 PARAMETER Experiment Name: At_1mM_KNO3_L-vs-H_Roots_P Parameter: Organism Value: A. thaliana
  misc_feature: MA Experiment 20000269 PARAMETER Experiment Name: At_1mM_KNO3_L-vs-H_Roots_P Parameter: Plant Line Value: WS
  misc_feature: MA Experiment 20000269 PARAMETER Experiment Name: At_1mM_KNO3_L-vs-H_Roots_P Parameter: Timepoint (day) Value: 7,10,12
  misc_feature: MA Experiment 20000269 PARAMETER Experiment Name: At_1mM_KNO3_L-vs-H_Roots_P Parameter: Tissue Value: Roots
  misc_feature: MA Experiment 20000269 PARAMETER Experiment Name: At_1mM_KNO3_L-vs-H_Roots_P Parameter: Treatment Value: 1mM KNO3 vs. 50mM KNO3
  misc_feature: MA Experiment ID: 20000286 Result: Down-regulated in Transcription
  misc_feature: MA Experiment 20000286 PARAMETER Experiment Name: At_Open_Flower_P Parameter: Age (day) Value: 21
  misc_feature: MA Experiment 20000286 PARAMETER Experiment Name: At_Open_Flower_P Parameter: Plant Line Value: WS
  misc_feature: MA Experiment 20000286 PARAMETER Experiment Name: At_Open_Flower_P Parameter: Tissue Value: Half Open vs. Whole Plant
  misc_feature: MA Experiment ID: 20000441 Result: Up-regulated in Transcription
  misc_feature: MA Experiment 20000441 PARAMETER Experiment Name: At_1uM_BR-BRZ__P Parameter: Tissue Value: Shoot Apices
  misc_feature: MA Experiment 20000441 PARAMETER Experiment Name: At_1uM_BR-BRZ__P Parameter: Treatment Value: 1uM BR vs. No Treatment
  misc_feature: MA Experiment ID: 20000443 Result: Up-regulated in Transcription
  misc_feature: MA Experiment 20000443 PARAMETER Experiment Name: At_1uM_BR-BRZ__P Parameter: Tissue Value: Shoot Apices
  misc_feature: MA Experiment 20000443 PARAMETER Experiment Name: At_1uM_BR-BRZ__P Parameter: Treatment Value: 1uM BRZ vs. No Treatment
  misc_feature: MA Experiment ID: 20000456 Result: Down-regulated in Transcription
  misc_feature: MA Experiment 20000456 PARAMETER Experiment Name: At_100uM_BA_P Parameter: Age (day) Value: 14
  misc_feature: MA Experiment 20000456 PARAMETER Experiment Name: At_100uM_BA_P Parameter: Organism Value: A. thaliana
  misc_feature: MA Experiment 20000456 PARAMETER Experiment Name: At_100uM_BA_P Parameter: Plant Line Value: WS
  misc_feature: MA Experiment 20000456 PARAMETER Experiment Name: At_100uM_BA_P Parameter: Timepoint (hr) Value: 6
  misc_feature: MA Experiment 20000456 PARAMETER Experiment Name: At_100uM_BA_P Parameter: Tissue Value: Aerial
  misc_feature: MA Experiment 20000456 PARAMETER Experiment Name: At_100uM_BA_P Parameter: Treatment Value: 100uM BA vs. No Treatment
  misc_feature: MA Experiment ID: 20000527 Result: Up-regulated in Transcription
  misc_feature: MA Experiment 20000527 PARAMETER Experiment Name: At_10percent_PEG_P Parameter: Age (day) Value: 20
  misc_feature: MA Experiment 20000527 PARAMETER Experiment Name: At_10percent_PEG_P Parameter: Organism Value: A. thaliana
  misc_feature: MA Experiment 20000527 PARAMETER Experiment Name: At_10percent_PEG_P Parameter: Plant Line Value: WS
  misc_feature: MA Experiment 20000527 PARAMETER Experiment Name: At_10percent_PEG_P Parameter: Timepoint (day) Value: 20
  misc_feature: MA Experiment 20000527 PARAMETER Experiment Name: At_10percent_PEG_P Parameter: Tissue Value: Whole Plant
  misc_feature: MA Experiment 20000527 PARAMETER Experiment Name: At_10percent_PEG_P Parameter: Treatment Value: 10percent PEG vs. No Treatment
  misc_feature: MA Experiment ID: 20000709 Result: Up-regulated in Transcription
  misc_feature: MA Experiment 20000709 PARAMETER Experiment Name: At_15mM_NH4NO3_L-to-H_P Parameter: Age (hr) Value: 14
  misc_feature: MA Experiment 20000709 PARAMETER Experiment Name: At_15mM_NH4NO3_L-to-H_P Parameter: Organism Value: A. thaliana
  misc_feature: MA Experiment 20000709 PARAMETER Experiment Name: At_15mM_NH4NO3_L-to-H_P Parameter: Plant Line Value: WS
  misc_feature: MA Experiment 20000709 PARAMETER Experiment Name: At_15mM_NH4NO3_L-to-H_P Parameter: Timepoint (hr) Value: 4
  misc_feature: MA Experiment 20000709 PARAMETER Experiment Name: At_15mM_NH4NO3_L-to-H_P Parameter: Tissue Value: Aerial
  misc_feature: MA Experiment 20000709 PARAMETER Experiment Name: At_15mM_NH4NO3_L-to-H_P Parameter: Treatment Value: 15mM NH4NO3 vs. 30mM Mannitol
  misc_feature: MA Experiment ID: 20001451 Result: Up-regulated in Transcription
  misc_feature: MA Experiment 20001451 PARAMETER Experiment Name: At_Far-red-induction_P Parameter: Age (day) Value: 7
  misc_feature: MA Experiment 20001451 PARAMETER Experiment Name: At_Far-red-induction_P Parameter: Light Value: Far-red vs. White
  misc_feature: MA Experiment 20001451 PARAMETER Experiment Name: At_Far-red-induction_P Parameter: Organism Value: A. thaliana
  misc_feature: MA Experiment 20001451 PARAMETER Experiment Name: At_Far-red-induction_P Parameter: Plant Line Value: Columbia
  misc_feature: MA Experiment 20001451 PARAMETER Experiment Name: At_Far-red-induction_P Parameter: Timepoint (hr) Value: 24
  misc_feature: MA Experiment 20001451 PARAMETER Experiment Name: At_Far-red-induction_P Parameter: Tissue Value: Whole Plant
  misc_feature: MA Experiment ID: 20001458 Result: Up-regulated in Transcription
  misc_feature: MA Experiment 20001458 PARAMETER Experiment Name: At_50mM_NH4NO3_L-to-H_P Parameter: Age (day) Value: Undefined
  misc_feature: MA Experiment 20001458 PARAMETER Experiment Name: At_50mM_NH4NO3_L-to-H_P Parameter: Organism Value: Undefined
  misc_feature: MA Experiment 20001458 PARAMETER Experiment Name: At_50mM_NH4NO3_L-to-H_P Parameter: Plant Line Value: Undefined
  misc_feature: MA Experiment 20001458 PARAMETER Experiment Name: At_50mM_NH4NO3_L-to-H_P Parameter: Timepoint (hr) Value: 2
  misc_feature: MA Experiment 20001458 PARAMETER Experiment Name: At_50mM_NH4NO3_L-to-H_P Parameter: Tissue Value: Siliques
  misc_feature: MA Experiment 20001458 PARAMETER Experiment Name: At_50mM_NH4NO3_L-to-H_P Parameter: Treatment Value: 50mM NH4NO3 vs. 100mM Manitol
  misc_feature: MA Experiment ID: 20001555 Result: Up-regulated in Transcription
  misc_feature: MA Experiment 20001555 PARAMETER Experiment Name: At_Drought_Soil_Dry_P Parameter: Age (day) Value: 24
  misc_feature: MA Experiment 20001555 PARAMETER Experiment Name: At_Drought_Soil_Dry_P Parameter: Organism Value: A. thaliana
  misc_feature: MA Experiment 20001555 PARAMETER Experiment Name: At_Drought_Soil_Dry_P Parameter: Plant Line Value: WS
  misc_feature: MA Experiment 20001555 PARAMETER Experiment Name: At_Drought_Soil_Dry_P Parameter: Post Timepoint (hr) Value: None
  misc_feature: MA Experiment 20001555 PARAMETER Experiment Name: At_Drought_Soil_Dry_P Parameter: Post-Treatment Value: None
  misc_feature: MA Experiment 20001555 PARAMETER Experiment Name: At_Drought_Soil_Dry_P Parameter: Timepoint (day) Value: 10
  misc_feature: MA Experiment 20001555 PARAMETER Experiment Name: At_Drought_Soil_Dry_P Parameter: Treatment Value: Drought vs. No Drought
  misc_feature: MA Experiment ID: 20001556 Result: Up-regulated in Transcription
  misc_feature: MA Experiment 20001556 PARAMETER Experiment Name: At_Drought_Soil_Dry_P Parameter: Age (day) Value: 26
  misc_feature: MA Experiment 20001556 PARAMETER Experiment Name: At_Drought_Soil_Dry_P Parameter: Organism Value: A. thaliana
  misc_feature: MA Experiment 20001556 PARAMETER Experiment Name: At_Drought_Soil_Dry_P Parameter: Plant Line Value: WS
  misc_feature: MA Experiment 20001556 PARAMETER Experiment Name: At_Drought_Soil_Dry_P Parameter: Post Timepoint (hr) Value: None
  misc_feature: MA Experiment 20001556 PARAMETER Experiment Name: At_Drought_Soil_Dry_P Parameter: Post-Treatment Value: None
  misc_feature: MA Experiment 20001556 PARAMETER Experiment Name: At_Drought_Soil_Dry_P Parameter: Timepoint (day) Value: 12
  misc_feature: MA Experiment 20001556 PARAMETER Experiment Name: At_Drought_Soil_Dry_P Parameter: Treatment Value: Drought vs. No Drought
  misc_feature: MA Experiment ID: 20001557 Result: Up-regulated in Transcription
  misc_feature: MA Experiment 20001557 PARAMETER Experiment Name: At_Drought_Soil_Dry_P Parameter: Age (day) Value: 27
  misc_feature: MA Experiment 20001557 PARAMETER Experiment Name: At_Drought_Soil_Dry_P Parameter: Organism Value: A. thaliana
  misc_feature: MA Experiment 20001557 PARAMETER Experiment Name: At_Drought_Soil_Dry_P Parameter: Plant Line Value: WS
  misc_feature: MA Experiment 20001557 PARAMETER Experiment Name: At_Drought_Soil_Dry_P Parameter: Post Timepoint (hr) Value: 3
  misc_feature: MA Experiment 20001557 PARAMETER Experiment Name: At_Drought_Soil_Dry_P Parameter: Post-Treatment Value: Re-Water vs. No Drought
  misc_feature: MA Experiment 20001557 PARAMETER Experiment Name: At_Drought_Soil_Dry_P Parameter: Timepoint (day) Value: 13
  misc_feature: MA Experiment 20001557 PARAMETER Experiment Name: At_Drought_Soil_Dry_P Parameter: Treatment Value: Drought vs. No Drought
  misc_feature: MA Experiment ID: 20001558 Result: Up-regulated in Transcription
  misc_feature: MA Experiment 20001558 PARAMETER Experiment Name: At_Drought_Soil_Dry_P Parameter: Age (day) Value: 27
  misc_feature: MA Experiment 20001558 PARAMETER Experiment Name: At_Drought_Soil_Dry_P Parameter: Organism Value: A. thaliana
  misc_feature: MA Experiment 20001558 PARAMETER Experiment Name: At_Drought_Soil_Dry_P Parameter: Plant Line Value: WS
  misc_feature: MA Experiment 20001558 PARAMETER Experiment Name: At_Drought_Soil_Dry_P Parameter: Post Timepoint (hr) Value: 6
  misc_feature: MA Experiment 20001558 PARAMETER Experiment Name: At_Drought_Soil_Dry_P Parameter: Post-Treatment Value: Re-Water vs. No Drought
  misc_feature: MA Experiment 20001558 PARAMETER Experiment Name: At_Drought_Soil_Dry_P Parameter: Timepoint (day) Value: 13
  misc_feature: MA Experiment 20001558 PARAMETER Experiment Name: At_Drought_Soil_Dry_P Parameter: Treatment Value: Drought vs. No Drought
  misc_feature: MA Experiment ID: 20001560 Result: Up-regulated in Transcription
  misc_feature: MA Experiment 20001560 PARAMETER Experiment Name: At_Drought_Soil_Dry_P Parameter: Age (day) Value: 28
  misc_feature: MA Experiment 20001560 PARAMETER Experiment Name: At_Drought_Soil_Dry_P Parameter: Organism Value: A. thaliana
  misc_feature: MA Experiment 20001560 PARAMETER Experiment Name: At_Drought_Soil_Dry_P Parameter: Plant Line Value: WS
  misc_feature: MA Experiment 20001560 PARAMETER Experiment Name: At_Drought_Soil_Dry_P Parameter: Post Timepoint (hr) Value: None
  misc_feature: MA Experiment 20001560 PARAMETER Experiment Name: At_Drought_Soil_Dry_P Parameter: Post-Treatment Value: None
  misc_feature: MA Experiment 20001560 PARAMETER Experiment Name: At_Drought_Soil_Dry_P Parameter: Timepoint (day) Value: 14
  misc_feature: MA Experiment 20001560 PARAMETER Experiment Name: At_Drought_Soil_Dry_P Parameter: Treatment Value: Drought vs. No Drought
  misc_feature: MA Experiment ID: 20001756 Result: Up-regulated in Transcription
  misc_feature: MA Experiment 20001756 PARAMETER Experiment Name: At_50mM_NH4NO3_L-to-H_P Parameter: Timepoint (hr) Value: 4
  misc_feature: MA Experiment 20001756 PARAMETER Experiment Name: At_50mM_NH4NO3_L-to-H_P Parameter: Tissue Value: Leaf
  misc_feature: MA Experiment 20001756 PARAMETER Experiment Name: At_50mM_NH4NO3_L-to-H_P Parameter: Treatment Value: 50mM NH4NO3 vs 100mM Mannitol
  misc_feature: MA Experiment ID: 20001757 Result: Up-regulated in Transcription
  misc_feature: MA Experiment 20001757 PARAMETER Experiment Name: At_50mM_NH4NO3_L-to-H_P Parameter: Timepoint (hr) Value: 6
  misc_feature: MA Experiment 20001757 PARAMETER Experiment Name: At_50mM_NH4NO3_L-to-H_P Parameter: Tissue Value: Leaf
  misc_feature: MA Experiment 20001757 PARAMETER Experiment Name: At_50mM_NH4NO3_L-to-H_P Parameter: Treatment Value: 50mM NH4NO3 vs 100mM Mannitol
  misc_feature: MA Experiment ID: 20001904 Result: Up-regulated in Transcription
  misc_feature: MA Experiment 20001904 PARAMETER Experiment Name: At_Drought_Reproduction_P Parameter: Age (day) Value: 37
  misc_feature: MA Experiment 20001904 PARAMETER Experiment Name: At_Drought_Reproduction_P Parameter: Organism Value: A. thaliana
  misc_feature: MA Experiment 20001904 PARAMETER Experiment Name: At_Drought_Reproduction_P Parameter: Plant Line Value: WS
  misc_feature: MA Experiment 20001904 PARAMETER Experiment Name: At_Drought_Reproduction_P Parameter: Timepoint (day) Value: 7
  misc_feature: MA Experiment 20001904 PARAMETER Experiment Name: At_Drought_Reproduction_P Parameter: Tissue Value: Rosettes
  misc_feature: MA Experiment 20001904 PARAMETER Experiment Name: At_Drought_Reproduction_P Parameter: Treatment Value: Drought vs. No Drought
  misc_feature: MA Experiment ID: 20001905 Result: Up-regulated in Transcription
  misc_feature: MA Experiment 20001905 PARAMETER Experiment Name: At_Drought_Reproduction_P Parameter: Age (day) Value: 40
  misc_feature: MA Experiment 20001905 PARAMETER Experiment Name: At_Drought_Reproduction_P Parameter: Organism Value: A. thaliana
  misc_feature: MA Experiment 20001905 PARAMETER Experiment Name: At_Drought_Reproduction_P Parameter: Plant Line Value: WS
  misc_feature: MA Experiment 20001905 PARAMETER Experiment Name: At_Drought_Reproduction_P Parameter: Timepoint (day) Value: 10
  misc_feature: MA Experiment 20001905 PARAMETER Experiment Name: At_Drought_Reproduction_P Parameter: Tissue Value: Rosettes
  misc_feature: MA Experiment 20001905 PARAMETER Experiment Name: At_Drought_Reproduction_P Parameter: Treatment Value: Drought vs. No Drought
gttttttctttcccttcttcaatcaaaacctatttgcatgctctcaaacccgaattaaatcgacacttttcagtttttgttttaacaagtagagtttcccaaaatattggatatatttctttttcaaatttcggaaaagaaatgagttgcaatggatgtagagttcttcgaaaaggttgcagtgaaacatgcatccttcgtccttgccttcaatggatcgaatccgccgagtcacaaggccacgccaccgtcttcgtcgctaaattctttggtcgtgctggtctcatgtctttcatctcctccgtacctgaactccaacgtcctgctttgtttcagtcgttgttgtttgaagcgtgtgggagaacggtgaatccggttaacggagcggttggtatgttgtggaccaggaactggcacgtatgccaagcggcggttgagactgttcttcgcggcggaactttacgaccgatatcagatcttcttgaatctccgtcgttgatgatctcctgtgatgagtcttcagagatttggcatcaagacgtttcaagaaaccaaacccaccattgtcgcttctccacctccagatccacgacggagatgaaagactctctggttaaccgaaaacgattgaagtccgattcggatcttgatctccaagtgaaccacggtttaaccctaaccgctccggctgtaccggttccttttcttcctccgtcgtcgttttgtaaggtggttaagggtgatcgtccgggaagtccatcggaggaatctgtaacgacgtcgtgttgggaaaatgggatgagaggagataataaacaaaaaagaaacaaaggagagaaaaagttattgaacctttttgtttaaaaccgacgacgcaaaacactcaaagattttgaggctctcttttttagggttttgagtgggaatggatatttagttaatgatttttctctatcgagaaatatgataaaattttgggg

SEQ ID NO: 22522 - protein, 287 aa, Arabidopsis thaliana
  peptide (1)..(287): Ceres Seq. ID no. 12394826
  misc_feature (49)..(154): Pfam Name: Protein of unknown function DUF260 Pfam Description: Protein of unknown function DUF260
  misc_feature (48)..(187): Homolog of NCBI NO: 34895540 NR Description: unnamed protein product [Oryza sativa (japonica
  misc_feature (48)..(158): Homolog of NCBI NO: 40539088 NR Description: expressed protein [Oryza sativa (japonica
  misc_feature (48)..(158): Homolog of NCBI NO: 15219829 NR Description: hypothetical protein; protein id: At1g67100.1
  misc_feature (48)..(287): Homolog of NCBI NO: 34394489 NR Description: putative lateral organ boundaries (LOB) domain
  misc_feature (48)..(287): Homolog of NCBI NO: 15240739 NR Description: putative protein
  misc_feature (48)..(287): Homolog of NCBI NO: 21593577 NR Description: unknown [Arabidopsis thaliana]
  misc_feature (48)..(286): Homolog of NCBI NO: 21553886 NR Description: unknown [Arabidopsis thaliana]
  misc_feature (48)..(286): Homolog of NCBI NO: 15229644 NR Description: putative protein
  misc_feature (48)..(287): Homolog of NCBI NO: 21592894 NR Description: unknown [Arabidopsis thaliana]
  misc_feature (48)..(287): Homolog of NCBI NO: 15235604 NR Description: putative protein
VFSFPSSIKTYLHALKPELNRHFSVFVLTSRVSQNIGYISFSNFGKEMSCNGCRVLRKGCSETCILRPCLQWIESAESQGHATVFVAKFFGRAGLMSFISSVPELQRPALFQSLLFEACGRTVNPVNGAVGMLWTRNWHVCQAAVETVLRGGTLRPISDLLESPSLMISCDESSEIWHQDVSRNQTHHCRFSTSRSTTEMKDSLVNRKRLKSDSDLDLQVNHGLTLTAPAVPVPFLPPSSFCKVVKGDRPGSPSEESVTTSCWENGMRGDNKQKRNKGEKKLLNLFV

SEQ ID NO: 22523 - protein, 240 aa, Arabidopsis thaliana
  peptide (1)..(240): Ceres Seq. ID no. 12394827
  misc_feature (2)..(107): Pfam Name: Protein of unknown function DUF260 Pfam Description: Protein of unknown function DUF260
  misc_feature (1)..(140): Homolog of NCBI NO: 34895540 NR Description: unnamed protein product [Oryza sativa (japonica
  misc_feature (1)..(111): Homolog of NCBI NO: 40539088 NR Description: expressed protein [Oryza sativa (japonica
  misc_feature (1)..(111): Homolog of NCBI NO: 15219829 NR Description: hypothetical protein; protein id: At1g67100.1
  misc_feature (1)..(240): Homolog of NCBI NO: 34394489 NR Description: putative lateral organ boundaries (LOB) domain
  misc_feature (1)..(240): Homolog of NCBI NO: 15240739 NR Description: putative protein
  misc_feature (1)..(240): Homolog of NCBI NO: 21593577 NR Description: unknown [Arabidopsis thaliana]
  misc_feature (1)..(239): Homolog of NCBI NO: 21553886 NR Description: unknown [Arabidopsis thaliana]
  misc_feature (1)..(239): Homolog of NCBI NO: 15229644 NR Description: putative protein
  misc_feature (1)..(240): Homolog of NCBI NO: 21592894 NR Description: unknown [Arabidopsis thaliana]
  misc_feature (1)..(240): Homolog of NCBI NO: 15235604 NR Description: putative protein
MSCNGCRVLRKGCSETCILRPCLQWIESAESQGHATVFVAKFFGRAGLMSFISSVPELQRPALFQSLLFEACGRTVNPVNGAVGMLWTRNWHVCQAAVETVLRGGTLRPISDLLESPSLMISCDESSEIWHQDVSRNQTHHCRFSTSRSTTEMKDSLVNRKRLKSDSDLDLQVNHGLTLTAPAVPVPFLPPSSFCKVVKGDRPGSPSEESVTTSCWENGMRGDNKQKRNKGEKKLLNLFV

SEQ ID NO: 22524 - protein, 192 aa, Arabidopsis thaliana
  peptide (1)..(192): Ceres Seq. ID no. 12394828
  misc_feature (1)..(59): Pfam Name: Protein of unknown function DUF260 Pfam Description: Protein of unknown function DUF260
  misc_feature (1)..(92): Homolog of NCBI NO: 34895540 NR Description: unnamed protein product [Oryza sativa (japonica
  misc_feature (1)..(63): Homolog of NCBI NO: 40539088 NR Description: expressed protein [Oryza sativa (japonica
  misc_feature (1)..(63): Homolog of NCBI NO: 15219829 NR Description: hypothetical protein; protein id: At1g67100.1
  misc_feature (1)..(192): Homolog of NCBI NO: 34394489 NR Description: putative lateral organ boundaries (LOB) domain
  misc_feature (1)..(192): Homolog of NCBI NO: 15240739 NR Description: putative protein
  misc_feature (1)..(192): Homolog of NCBI NO: 21593577 NR Description: unknown [Arabidopsis thaliana]
  misc_feature (1)..(191): Homolog of NCBI NO: 21553886 NR Description: unknown [Arabidopsis thaliana]
  misc_feature (1)..(191): Homolog of NCBI NO: 15229644 NR Description: putative protein
  misc_feature (1)..(192): Homolog of NCBI NO: 21592894 NR Description: unknown [Arabidopsis thaliana]
  misc_feature (1)..(192): Homolog of NCBI NO: 15235604 NR Description: putative protein
MSFISSVPELQRPALFQSLLFEACGRTVNPVNGAVGMLWTRNWHVCQAAVETVLRGGTLRPISDLLESPSLMISCDESSEIWHQDVSRNQTHHCRFSTSRSTTEMKDSLVNRKRLKSDSDLDLQVNHGLTLTAPAVPVPFLPPSSFCKVVKGDRPGSPSEESVTTSCWENGMRGDNKQKRNKGEKKLLNLFV

SEQ ID NO: 22525 - DNA, 1426 bp, Arabidopsis thaliana
  misc_feature (1)..(1426): Ceres Seq. ID no. 12334899
  misc_feature: MA Experiment ID: 108434 Result: Up-regulated in Transcription
  misc_feature: MA Experiment 108434 PARAMETER Experiment Name: At_Root_Tips_cDNA_P Parameter: Tissue Value: Root Tips
  misc_feature: MA Experiment ID: 108577 Result: Down-regulated in Transcription
  misc_feature: MA Experiment 108577 PARAMETER Experiment Name: At_42deg_Heat_cDNA_P Parameter: Temperature (deg C) Value: 42 vs. 22
  misc_feature: MA Experiment 108577 PARAMETER Experiment Name: At_42deg_Heat_cDNA_P Parameter: Timepoint (hr) Value: 6
  misc_feature: MA Experiment 108577 PARAMETER Experiment Name: At_42deg_Heat_cDNA_P Parameter: Tissue Value: Aerial
  misc_feature: MA Experiment ID: 20000069 Result: Up-regulated in Transcription
  misc_feature: MA Experiment 20000069 PARAMETER Experiment Name: At_100uM_ABA_Mutants_cDNA_P Parameter: Plant Line Value: CS23
  misc_feature: MA Experiment 20000069 PARAMETER Experiment Name: At_100uM_ABA_Mutants_cDNA_P Parameter: Timepoint (hr) Value: 6
  misc_feature: MA Experiment 20000069 PARAMETER Experiment Name: At_100uM_ABA_Mutants_cDNA_P Parameter: Tissue Value: Aerial
  misc_feature: MA Experiment 20000069 PARAMETER Experiment Name: At_100uM_ABA_Mutants_cDNA_P Parameter: Treatment Value: 100uM ABA vs. No Treatment
  misc_feature: MA Experiment ID: 20000070 Result: Up-regulated in Transcription
  misc_feature: MA Experiment 20000070 PARAMETER Experiment Name: At_100uM_ABA_Mutants_cDNA_P Parameter: Plant Line Value: CS24
  misc_feature: MA Experiment 20000070 PARAMETER Experiment Name: At_100uM_ABA_Mutants_cDNA_P Parameter: Timepoint (hr) Value: 6
  misc_feature: MA Experiment 20000070 PARAMETER Experiment Name: At_100uM_ABA_Mutants_cDNA_P Parameter: Tissue Value: Aerial
  misc_feature: MA Experiment 20000070 PARAMETER Experiment Name: At_100uM_ABA_Mutants_cDNA_P Parameter: Treatment Value: 100uM ABA vs. No Treatment
  misc_feature: MA Experiment ID: 20000071 Result: Up-regulated in Transcription
  misc_feature: MA Experiment 20000071 PARAMETER Experiment Name: At_100uM_ABA_Mutants_cDNA_P Parameter: Plant Line Value: CS8104
  misc_feature: MA Experiment 20000071 PARAMETER Experiment Name: At_100uM_ABA_Mutants_cDNA_P Parameter: Timepoint (hr) Value: 6
  misc_feature: MA Experiment 20000071 PARAMETER Experiment Name: At_100uM_ABA_Mutants_cDNA_P Parameter: Tissue Value: Aerial
  misc_feature: MA Experiment 20000071 PARAMETER Experiment Name: At_100uM_ABA_Mutants_cDNA_P Parameter: Treatment Value: 100uM ABA vs. No Treatment
  misc_feature: MA Experiment ID: 20000072 Result: Up-regulated in Transcription
  misc_feature: MA Experiment 20000072 PARAMETER Experiment Name: At_100uM_ABA_Mutants_cDNA_P Parameter: Plant Line Value: CS8105
  misc_feature: MA Experiment 20000072 PARAMETER Experiment Name: At_100uM_ABA_Mutants_cDNA_P Parameter: Timepoint (hr) Value: 6
  misc_feature: MA Experiment 20000072 PARAMETER Experiment Name: At_100uM_ABA_Mutants_cDNA_P Parameter: Tissue Value: Aerial
  misc_feature: MA Experiment 20000072 PARAMETER Experiment Name: At_100uM_ABA_Mutants_cDNA_P Parameter: Treatment Value: 100uM ABA vs. No Treatment
  misc_feature: MA Experiment ID: 20000086 Result: Up-regulated in Transcription
  misc_feature: MA Experiment 20000086 PARAMETER Experiment Name: At_100uM_ABA_Mutants_cDNA_P Parameter: Plant Line Value: CS22
  misc_feature: MA Experiment 20000086 PARAMETER Experiment Name: At_100uM_ABA_Mutants_cDNA_P Parameter: Timepoint (hr) Value: 6
  misc_feature: MA Experiment 20000086 PARAMETER Experiment Name: At_100uM_ABA_Mutants_cDNA_P Parameter: Tissue Value: Aerial
  misc_feature: MA Experiment 20000086 PARAMETER Experiment Name: At_100uM_ABA_Mutants_cDNA_P Parameter: Treatment Value: 100uM ABA vs. No Treatment
  misc_feature: MA Experiment ID: 20000087 Result: Up-regulated in Transcription
  misc_feature: MA Experiment 20000087 PARAMETER Experiment Name: At_100uM_ABA_Mutants_cDNA_P Parameter: Plant Line Value: WS
  misc_feature: MA Experiment 20000087 PARAMETER Experiment Name: At_100uM_ABA_Mutants_cDNA_P Parameter: Timepoint (hr) Value: 6
  misc_feature: MA Experiment 20000087 PARAMETER Experiment Name: At_100uM_ABA_Mutants_cDNA_P Parameter: Tissue Value: Aerial
  misc_feature: MA Experiment 20000087 PARAMETER Experiment Name: At_100uM_ABA_Mutants_cDNA_P Parameter: Treatment Value: 100uM ABA vs. No Treatment
  misc_feature: MA Experiment ID: 20000088 Result: Up-regulated in Transcription
  misc_feature: MA Experiment 20000088 PARAMETER Experiment Name: At_100uM_ABA_Mutants_cDNA_P Parameter: Plant Line Value: Landsberg
  misc_feature: MA Experiment 20000088 PARAMETER Experiment Name: At_100uM_ABA_Mutants_cDNA_P Parameter: Timepoint (hr) Value: 6
  misc_feature: MA Experiment 20000088 PARAMETER Experiment Name: At_100uM_ABA_Mutants_cDNA_P Parameter: Tissue Value: Aerial
  misc_feature: MA Experiment 20000088 PARAMETER Experiment Name: At_100uM_ABA_Mutants_cDNA_P Parameter: Treatment Value: 100uM ABA vs. No Treatment
  misc_feature: MA Experiment ID: 20000089 Result: Up-regulated in Transcription
  misc_feature: MA Experiment ID: 20000090 Result: Up-regulated in Transcription
  misc_feature: MA Experiment ID: 20000111 Result: Down-regulated in Transcription
  misc_feature: MA Experiment 20000111 PARAMETER Experiment Name: At_42deg_Heat_cDNA_P Parameter: Temperature (deg C) Value: 42 vs. 22
  misc_feature: MA Experiment 20000111 PARAMETER Experiment Name: At_42deg_Heat_cDNA_P Parameter: Timepoint (hr) Value: 6
  misc_feature: MA Experiment 20000111 PARAMETER Experiment Name: At_42deg_Heat_cDNA_P Parameter: Tissue Value: Aerial
  misc_feature: MA Experiment ID: 20000112 Result: Down-regulated in Transcription
  misc_feature: MA Experiment 20000112 PARAMETER Experiment Name: At_42deg_Heat_cDNA_P Parameter: Temperature (deg C) Value: 42 vs. 22
  misc_feature: MA Experiment 20000112 PARAMETER Experiment Name: At_42deg_Heat_cDNA_P Parameter: Timepoint (hr) Value: 2
  misc_feature: MA Experiment 20000112 PARAMETER Experiment Name: At_42deg_Heat_cDNA_P Parameter: Tissue Value: Aerial
  misc_feature: MA Experiment ID: 20000113 Result: Down-regulated in Transcription
  misc_feature: MA Experiment 20000113 PARAMETER Experiment Name: At_42deg_Heat_cDNA_P Parameter: Temperature (deg C) Value: 42 vs. 22
  misc_feature: MA Experiment 20000113 PARAMETER Experiment Name: At_42deg_Heat_cDNA_P Parameter: Timepoint (hr) Value: 8
  misc_feature: MA Experiment 20000113 PARAMETER Experiment Name: At_42deg_Heat_cDNA_P Parameter: Tissue Value: Aerial
  misc_feature: MA Experiment ID: 20000117 Result: Up-regulated in Transcription
  misc_feature: MA Experiment 20000117 PARAMETER Experiment Name: At_100uM_ABA_Mutants_cDNA_P Parameter: Plant Line Value: Columbia
  misc_feature: MA Experiment 20000117 PARAMETER Experiment Name: At_100uM_ABA_Mutants_cDNA_P Parameter: Timepoint (hr) Value: 6
  misc_feature: MA Experiment 20000117 PARAMETER Experiment Name: At_100uM_ABA_Mutants_cDNA_P Parameter: Tissue Value: Aerial
  misc_feature: MA Experiment 20000117 PARAMETER Experiment Name: At_100uM_ABA_Mutants_cDNA_P Parameter: Treatment Value: 100uM ABA vs. No Treatment
  misc_feature: MA Experiment ID: 20000144 Result: Down-regulated in Transcription
  misc_feature: MA Experiment 20000144 PARAMETER Experiment Name: At_42deg_Heat_cDNA_P Parameter: Temperature (deg C) Value: 42 vs. 22
  misc_feature: MA Experiment 20000144 PARAMETER Experiment Name: At_42deg_Heat_cDNA_P Parameter: Timepoint (hr) Value: 1
  misc_feature: MA Experiment 20000144 PARAMETER Experiment Name: At_42deg_Heat_cDNA_P Parameter: Tissue Value: Aerial
  misc_feature: MA Experiment ID: 20000173 Result: Down-regulated in Transcription
  misc_feature: MA Experiment 20000173 PARAMETER Experiment Name: At_42deg_Heat_P Parameter: Age (day) Value: 14
  misc_feature: MA Experiment 20000173 PARAMETER Experiment Name: At_42deg_Heat_P Parameter: Organism Value: A. thaliana
  misc_feature: MA Experiment 20000173 PARAMETER Experiment Name: At_42deg_Heat_P Parameter: Plant Line Value: WS
  misc_feature: MA Experiment 20000173 PARAMETER Experiment Name: At_42deg_Heat_P Parameter: Temperature (deg C) Value: 42 vs. 22
  misc_feature: MA Experiment 20000173 PARAMETER Experiment Name: At_42deg_Heat_P Parameter: Timepoint (hr) Value: 6
  misc_feature: MA Experiment 20000173 PARAMETER Experiment Name: At_42deg_Heat_P Parameter: Tissue Value: Aerial
  misc_feature: MA Experiment ID: 20000184 Result: Down-regulated in Transcription
  misc_feature: MA Experiment 20000184 PARAMETER Experiment Name: At_Shoots__P Parameter: Age (day) Value: 7
  misc_feature: MA Experiment 20000184 PARAMETER Experiment Name: At_Shoots__P Parameter: Tissue Value: Shoots vs. Whole Plant
  misc_feature: MA Experiment ID: 20000794 Result: Down-regulated in Transcription
  misc_feature: MA Experiment 20000794 PARAMETER Experiment Name: At_Petals_P Parameter: Age (day) Value: 23-25 days
  misc_feature: MA Experiment 20000794 PARAMETER Experiment Name: At_Petals_P Parameter: Plant Line Value: WS
  misc_feature: MA Experiment 20000794 PARAMETER Experiment Name: At_Petals_P Parameter: Tissue Value: Petals vs. Whole plant
  misc_feature: MA Experiment ID: 20001248 Result: Up-regulated in Transcription
  misc_feature: MA Experiment 20001248 PARAMETER Experiment Name: At_Far-red-induction_P Parameter: Age (day) Value: 7
  misc_feature: MA Experiment 20001248 PARAMETER Experiment Name: At_Far-red-induction_P Parameter: Light Value: Far-red vs. White
  misc_feature: MA Experiment 20001248 PARAMETER Experiment Name: At_Far-red-induction_P Parameter: Organism Value: A. thaliana
  misc_feature: MA Experiment 20001248 PARAMETER Experiment Name: At_Far-red-induction_P Parameter: Plant Line Value: Columbia
  misc_feature: MA Experiment 20001248 PARAMETER Experiment Name: At_Far-red-induction_P Parameter: Timepoint (hr) Value: 4
  misc_feature: MA Experiment 20001248 PARAMETER Experiment Name: At_Far-red-induction_P Parameter: Tissue Value: Whole Plant
gtcagatatttttctcaacgtgaaagagagaaaagagaatctctcagaaggtgagcctccaacaaagcgtgaatctctctttctctctctatctctctatctctctgtctccgagatcgcatcaccggaaatctccttctacggtggtggtggtgacagttgaccagagatggcggcggagaatgagagaaaatctccttcagcagtctccgatatgggagcttgggcaatgaatgtaataagctccgttggaatcatcatggcgaataaacaacttatgtcctcttctggattcgcatttagtttcgctacaactctcaccggattccacttcgctttaaccgcattggtcggtatggtatcaaacgctaccggattctctgcttcgaagcatgttcctatgtgggagcttatttggttctccattgttgctaatgtctctattgctgctatgaacttcagtctcatgctcaattccgttggcttctaccaaatctcgaagctgagcatgattcctgtggtgtgtgtaatggaatggattctacatagcaagagatactcaagagaagtgaaaatatctgttgtggttgttgttgttggtgttggtatttgtactgtgactgatgttaaagttaatgccaaaggttttatctgtgcttgtgttgcgattttctcgtcatccttgcagcaaattttaataggttctctacagaagaaatattcaattgggtcctttgagttgttgagtaaaacagcgccgattcaagctttttcgcttcttgttgtcggtcctttagttgattatcttcttagtgggaagttcattatgaagtataatatgtcttccggttgctttctattcattcttctctcatgtggtctagctgtgttctgcaacataagccagtacctttgcatcgggcggttttcagcagtatcgttccaagttattggtcacatgaaaaccgtctgtatcctcacgcttggatggctcctatttgattctgcaatgactttcaaaaacgtagcggggatgattgttgcgattgttgggatggtaatctatagttgggcaatggaattggagaaacagtcgattattgcagcaaaggctttaaacagtgtgaaacatagcttaacagaggaagagtttgaacttttgaaggaaggtgtagaaactacacaatcaaaagatgttgaacttggccgcacaaaagattagagacagatggatagagaaagaaacatagtcttcaggtacaatttgttctgctataatttttgtatgttttgtgttatctaaaccaagagatcggatcctcggagattagtgtctaggcttcgatctaaagtttccttggttatacaaatgttttgtgttatttatatctttttacccaattccatggaaataacttcaatgacc

SEQ ID NO: 22526 - protein, 350 aa, Arabidopsis thaliana
  peptide (1)..(350): Ceres Seq. ID no. 12334900
  misc_feature (1)..(299): Homolog of NCBI NO: 18399097 NR Description: expressed protein
  misc_feature (6)..(299): Homolog of NCBI NO: 15234794 NR Description: hypothetical protein; protein id: At4g09810.1
  misc_feature (2)..(299): Homolog of NCBI NO: 30313364 NR Description: putative transmembrane protein [Oryza sativa]
  misc_feature (4)..(48): Homolog of NCBI NO: 33146838 NR Description: transporter-related-like [Oryza sativa (japonica
  misc_feature (42)..(349): Homolog of NCBI NO: 33146838 NR Description: transporter-related-like [Oryza sativa (japonica
  misc_feature (37)..(349): Homolog of NCBI NO: 26450366 NR Description: unknown protein [Arabidopsis thaliana]
  misc_feature (4)..(349): Homolog of NCBI NO: 18411172 NR Description: expressed protein
  misc_feature (3)..(349): Homolog of NCBI NO: 21536703 NR Description: unknown [Arabidopsis thaliana]
  misc_feature (3)..(349): Homolog of NCBI NO: 18394949 NR Description: expressed protein
  misc_feature (1)..(350): Homolog of NCBI NO: 15238957 NR Description: putative protein; protein id: At5g42420.1
MAAENERKSPSAVSDMGAWAMNVISSVGIIMANKQLMSSSGFAFSFATTLTGFHFALTALVGMVSNATGFSASKHVPMWELIWFSIVANVSIAAMNFSLMLNSVGFYQISKLSMIPVVCVMEWILHSKRYSREVKISVVVVVVGVGICTVTDVKVNAKGFICACVAIFSSSLQQILIGSLQKKYSIGSFELLSKTAPIQAFSLLVVGPLVDYLLSGKFIMKYNMSSGCFLFILLSCGLAVFCNISQYLCIGRFSAVSFQVIGHMKTVCILTLGWLLFDSAMTFKNVAGMIVAIVGMVIYSWAMELEKQSIIAAKALNSVKHSLTEEEFELLKEGVETTQSKDVELGRTKD

SEQ ID NO: 22527 - protein, 335 aa, Arabidopsis thaliana
  peptide (1)..(335): Ceres Seq. ID no. 12334901
  misc_feature (1)..(284): Homolog of NCBI NO: 18399097 NR Description: expressed protein
  misc_feature (1)..(284): Homolog of NCBI NO: 15234794 NR Description: hypothetical protein; protein id: At4g09810.1
  misc_feature (1)..(284): Homolog of NCBI NO: 30313364 NR Description: putative transmembrane protein [Oryza sativa]
  misc_feature (1)..(33): Homolog of NCBI NO: 33146838 NR Description: transporter-related-like [Oryza sativa (japonica
  misc_feature (27)..(334): Homolog of NCBI NO: 33146838 NR Description: transporter-related-like [Oryza sativa (japonica
  misc_feature (22)..(334): Homolog of NCBI NO: 26450366 NR Description: unknown protein [Arabidopsis thaliana]
  misc_feature (1)..(334): Homolog of NCBI NO: 18411172 NR Description: expressed protein
  misc_feature (1)..(334): Homolog of NCBI NO: 21536703 NR Description: unknown [Arabidopsis thaliana]
  misc_feature (1)..(334): Homolog of NCBI NO: 18394949 NR Description: expressed protein
  misc_feature (1)..(335): Homolog of NCBI NO: 15238957 NR Description: putative protein; protein id: At5g42420.1
MGAWAMNVISSVGIIMANKQLMSSSGFAFSFATTLTGFHFALTALVGMVSNATGFSASKHVPMWELIWFSIVANVSIAAMNFSLMLNSVGFYQISKLSMIPVVCVMEWILHSKRYSREVKISVVVVVVGVGICTVTDVKVNAKGFICACVAIFSSSLQQILIGSLQKKYSIGSFELLSKTAPIQAFSLLVVGPLVDYLLSGKFIMKYNMSSGCFLFILLSCGLAVFCNISQYLCIGRFSAVSFQVIGHMKTVCILTLGWLLFDSAMTFKNVAGMIVAIVGMVIYSWAMELEKQSIIAAKALNSVKHSLTEEEFELLKEGVETTQSKDVELGRTKD

SEQ ID NO: 22528 - protein, 330 aa, Arabidopsis thaliana
  peptide (1)..(330): Ceres Seq. ID no. 12334902
  misc_feature (1)..(330): Homolog of NCBI NO: 15238957 NR Description: putative protein; protein id: At5g42420.1
  misc_feature (1)..(279): Homolog of NCBI NO: 18399097 NR Description: expressed protein
  misc_feature (1)..(279): Homolog of NCBI NO: 15234794 NR Description: hypothetical protein; protein id: At4g09810.1
  misc_feature (1)..(279): Homolog of NCBI NO: 30313364 NR Description: putative transmembrane protein [Oryza sativa]
  misc_feature (1)..(28): Homolog of NCBI NO: 33146838 NR Description: transporter-related-like [Oryza sativa (japonica
  misc_feature (22)..(329): Homolog of NCBI NO: 33146838 NR Description: transporter-related-like [Oryza sativa (japonica
  misc_feature (17)..(329): Homolog of NCBI NO: 26450366 NR Description: unknown protein [Arabidopsis thaliana]
  misc_feature (1)..(329): Homolog of NCBI NO: 18411172 NR Description: expressed protein
  misc_feature (1)..(329): Homolog of NCBI NO: 21536703 NR Description: unknown [Arabidopsis thaliana]
  misc_feature (1)..(329): Homolog of NCBI NO: 18394949 NR Description: expressed protein
MNVISSVGIIMANKQLMSSSGFAFSFATTLTGFHFALTALVGMVSNATGFSASKHVPMWELIWFSIVANVSIAAMNFSLMLNSVGFYQISKLSMIPVVCVMEWILHSKRYSREVKISVVVVVVGVGICTVTDVKVNAKGFICACVAIFSSSLQQILIGSLQKKYSIGSFELLSKTAPIQAFSLLVVGPLVDYLLSGKFIMKYNMSSGCFLFILLSCGLAVFCNISQYLCIGRFSAVSFQVIGHMKTVCILTLGWLLFDSAMTFKNVAGMIVAIVGMVIYSWAMELEKQSIIAAKALNSVKHSLTEEEFELLKEGVETTQSKDVELGRTKD

SEQ ID NO: 22529 - DNA, 1388 bp, Arabidopsis thaliana
  misc_feature (1)..(1388): Ceres Seq. ID no. 12421518
  misc_feature: MA Experiment ID: 108461 Result: Down-regulated in Transcription
  misc_feature: MA Experiment 108461 PARAMETER Experiment Name: At_Germinating_Seeds_cDNA_P Parameter: Age (day) Value: 1 vs. 0
  misc_feature: MA Experiment 108461 PARAMETER Experiment Name: At_Germinating_Seeds_cDNA_P Parameter: Tissue Value: Germinating Seeds
  misc_feature: MA Experiment ID: 108573 Result: Up-regulated in Transcription
  misc_feature: MA Experiment 108573 PARAMETER Experiment Name: At_Drought_cDNA_P Parameter: Timepoint (hr) Value: 6
  misc_feature: MA Experiment 108573 PARAMETER Experiment Name: At_Drought_cDNA_P Parameter: Tissue Value: Aerial
  misc_feature: MA Experiment 108573 PARAMETER Experiment Name: At_Drought_cDNA_P Parameter: Treatment Value: Drought vs. No Drought
  misc_feature: MA Experiment ID: 20000111 Result: Up-regulated in Transcription
  misc_feature: MA Experiment 20000111 PARAMETER Experiment Name: At_42deg_Heat_cDNA_P Parameter: Temperature (deg C) Value: 42 vs. 22
  misc_feature: MA Experiment 20000111 PARAMETER Experiment Name: At_42deg_Heat_cDNA_P Parameter: Timepoint (hr) Value: 6
  misc_feature: MA Experiment 20000111 PARAMETER Experiment Name: At_42deg_Heat_cDNA_P Parameter: Tissue Value: Aerial
  misc_feature: MA Experiment ID: 20000112 Result: Up-regulated in Transcription
  misc_feature: MA Experiment 20000112 PARAMETER Experiment Name: At_42deg_Heat_cDNA_P Parameter: Temperature (deg C) Value: 42 vs. 22
  misc_feature: MA Experiment 20000112 PARAMETER Experiment Name: At_42deg_Heat_cDNA_P Parameter: Timepoint (hr) Value: 2
  misc_feature: MA Experiment 20000112 PARAMETER Experiment Name: At_42deg_Heat_cDNA_P Parameter: Tissue Value: Aerial
  misc_feature: MA Experiment ID: 20000113 Result: Up-regulated in Transcription
  misc_feature: MA Experiment 20000113 PARAMETER Experiment Name: At_42deg_Heat_cDNA_P Parameter: Temperature (deg C) Value: 42 vs. 22
  misc_feature: MA Experiment 20000113 PARAMETER Experiment Name: At_42deg_Heat_cDNA_P Parameter: Timepoint (hr) Value: 8
  misc_feature: MA Experiment 20000113 PARAMETER Experiment Name: At_42deg_Heat_cDNA_P Parameter: Tissue Value: Aerial
  misc_feature: MA Experiment ID: 20000184 Result: Down-regulated in Transcription
  misc_feature: MA Experiment 20000184 PARAMETER Experiment Name: At_Shoots__P Parameter: Age (day) Value: 7
  misc_feature: MA Experiment 20000184 PARAMETER Experiment Name: At_Shoots__P Parameter: Tissue Value: Shoots vs. Whole Plant
  misc_feature: MA Experiment ID: 20000224 Result: Up-regulated in Transcription
  misc_feature: MA Experiment ID: 20000234 Result: Down-regulated in Transcription
  misc_feature: MA Experiment 20000234 PARAMETER Experiment Name: At_Siliques_P Parameter: Age (day) Value: 21
  misc_feature: MA Experiment 20000234 PARAMETER Experiment Name: At_Siliques_P Parameter: Organism Value: A. thaliana
  misc_feature: MA Experiment 20000234 PARAMETER Experiment Name: At_Siliques_P Parameter: Plant Line Value: WS
  misc_feature: MA Experiment 20000234 PARAMETER Experiment Name: At_Siliques_P Parameter: Tissue Value: Less Than 5mm Siliques vs. Whole Plant
  misc_feature: MA Experiment ID: 20000235 Result: Down-regulated in Transcription
  misc_feature: MA Experiment 20000235 PARAMETER Experiment Name: At_Siliques_P Parameter: Age (day) Value: 21
  misc_feature: MA Experiment 20000235 PARAMETER Experiment Name: At_Siliques_P Parameter: Organism Value: A. thaliana
  misc_feature: MA Experiment 20000235 PARAMETER Experiment Name: At_Siliques_P Parameter: Plant Line Value: WS
  misc_feature: MA Experiment 20000235 PARAMETER Experiment Name: At_Siliques_P Parameter: Tissue Value: 5-10mm Siliques vs. Whole Plant
  misc_feature: MA Experiment ID: 20000437 Result: Up-regulated in Transcription
  misc_feature: MA Experiment 20000437 PARAMETER Experiment Name: At_Drought_P Parameter: Age (day) Value: 8
  misc_feature: MA Experiment 20000437 PARAMETER Experiment Name: At_Drought_P Parameter: Organism Value: A. thaliana
  misc_feature: MA Experiment 20000437 PARAMETER Experiment Name: At_Drought_P Parameter: Plant Line Value: WS
  misc_feature: MA Experiment 20000437 PARAMETER Experiment Name: At_Drought_P Parameter: Timepoint (hr) Value: 24
  misc_feature: MA Experiment 20000437 PARAMETER Experiment Name: At_Drought_P Parameter: Tissue Value: Whole Plant
  misc_feature: MA Experiment 20000437 PARAMETER Experiment Name: At_Drought_P Parameter: Treatment Value: Drought vs. No Drought
  misc_feature: MA Experiment ID: 20000438 Result: Down-regulated in Transcription
  misc_feature: MA Experiment 20000438 PARAMETER Experiment Name: At_Shoots__P Parameter: Age (day) Value: 14
  misc_feature: MA Experiment 20000438 PARAMETER Experiment Name: At_Shoots__P Parameter: Tissue Value: Shoots vs. Whole Plant
  misc_feature: MA Experiment ID: 20001248 Result: Up-regulated in Transcription
  misc_feature: MA Experiment 20001248 PARAMETER Experiment Name: At_Far-red-induction_P Parameter: Age (day) Value: 7
  misc_feature: MA Experiment 20001248 PARAMETER Experiment Name: At_Far-red-induction_P Parameter: Light Value: Far-red vs. White
  misc_feature: MA Experiment 20001248 PARAMETER Experiment Name: At_Far-red-induction_P Parameter: Organism Value: A. thaliana
  misc_feature: MA Experiment 20001248 PARAMETER Experiment Name: At_Far-red-induction_P Parameter: Plant Line Value: Columbia
  misc_feature: MA Experiment 20001248 PARAMETER Experiment Name: At_Far-red-induction_P Parameter: Timepoint (hr) Value: 4
  misc_feature: MA Experiment 20001248 PARAMETER Experiment Name: At_Far-red-induction_P Parameter: Tissue Value: Whole Plant
  misc_feature: MA Experiment ID: 20001450 Result: Up-regulated in Transcription
  misc_feature: MA Experiment 20001450 PARAMETER Experiment Name: At_Far-red-induction_P Parameter: Age (day) Value: 7
  misc_feature: MA Experiment 20001450 PARAMETER Experiment Name: At_Far-red-induction_P Parameter: Light Value: Far-red vs. White
  misc_feature: MA Experiment 20001450 PARAMETER Experiment Name: At_Far-red-induction_P Parameter: Organism Value: A. thaliana
  misc_feature: MA Experiment 20001450 PARAMETER Experiment Name: At_Far-red-induction_P Parameter: Plant Line Value: Columbia
  misc_feature: MA Experiment 20001450 PARAMETER Experiment Name: At_Far-red-induction_P Parameter: Timepoint (hr) Value: 8
  misc_feature: MA Experiment 20001450 PARAMETER Experiment Name: At_Far-red-induction_P Parameter: Tissue Value: Whole Plant
  misc_feature: MA Experiment ID: 20001451 Result: Up-regulated in Transcription
  misc_feature: MA Experiment 20001451 PARAMETER Experiment Name: At_Far-red-induction_P Parameter: Age (day) Value: 7
  misc_feature: MA Experiment 20001451 PARAMETER Experiment Name: At_Far-red-induction_P Parameter: Light Value: Far-red vs. White
  misc_feature: MA Experiment 20001451 PARAMETER Experiment Name: At_Far-red-induction_P Parameter: Organism Value: A. thaliana
  misc_feature: MA Experiment 20001451 PARAMETER Experiment Name: At_Far-red-induction_P Parameter: Plant Line Value: Columbia
  misc_feature: MA Experiment 20001451 PARAMETER Experiment Name: At_Far-red-induction_P Parameter: Timepoint (hr) Value: 24
  misc_feature: MA Experiment 20001451 PARAMETER Experiment Name: At_Far-red-induction_P Parameter: Tissue Value: Whole Plant
tcgttagctctctcaatgaggagcccgatttagggtttcctccattggttatatcaattcgatcatctccacaaagctctctaagactctttcggtgatctcatcttcttcttcttgtttagcctccttgaggttactttgtttgttactagttccaaaacatgccgaaagagaggaaagaacggtccgtatctcttgataagtataaacgatcgccactgtgttgtgaggcaagccttgctttgaagccgagtgagaaacaagttaaagaatgggaagaggctcgttgtcctgtttgtatggaacatcctcacaatgggattcttctcatttgttcttcttatgaaaatggttgtcgaccttacatgtgcgacactagccatcggcattctaactgtttcgatcagttccgcaaagcttctaaagagaaaccttctttgtctttacttcgtgaggaagaggaaagtaatgaaccaactgagatggaagatgtggattcagactcaactgctgtaaatctattaggagaagctgcatctgagataacagttgtggatttaagtgatggtgagagaggagaagaagaagtagaagaagatcaaaaaaaaaacaaaccaccaaagcttacttgtccgttatgtcgtggacatataaaagaatgggtagttgttaaagcagctcgatgtttcatgaactcaaaacatagaagctgttcttgtgagacttgtgatttcagtggaagctattccgatctgagaaagcacgcaaggcttctacatccaggagttaggccatcagaagcagatccagagagacagagaagctggaggaggctagaaaggcagagcgatttaggggatttacttagcacactccaatcttcttttggaggagatgaaataagtaacgatgatgggtttctatttgctgatactcgcttgcttacagtgtactttctcatccgcgtgtttagaccagaatcgagtggctcaaggagtagtagctggtctggtacatctagagctaggacacatacaagtgggagaagaagatcttcaagacctgcaagtctttggggagagagctatgaaggtaatacaggaacatcacctagagatgaggagaataatcaatcttctgatgtacaagtgtctggaactcggagacgtcgttctagaagaagaactgtcattgatgatgatgatgaagaagaagaaccgtgatgctctgcagtttggaaatttggtctttggagtttatgataaaatgggggaaaccttgtagtaataaccccacttatgaaaccctattatgtaaaatttctttggagattgaaaaaagtttctactattgggaaacaaaatgttcaatatttcattaccgtttac

SEQ ID NO: 22530 - protein, 353 aa, Arabidopsis thaliana
  peptide (1)..(353): Ceres Seq. ID no. 12421519
  misc_feature (143)..(250): Homolog of NCBI NO: 38344827 NR Description: OSJNBa0064H22.8 [Oryza sativa (japonica
  misc_feature (36)..(92): Homolog of NCBI NO: 15236507 NR Description: hypothetical protein
  misc_feature (137)..(250): Homolog of NCBI NO: 15236507 NR Description: hypothetical protein
  misc_feature (36)..(92): Homolog of NCBI NO: 15221290 NR Description: unknown protein
  misc_feature (139)..(250): Homolog of NCBI NO: 15221290 NR Description: unknown protein
  misc_feature (36)..(327): Homolog of NCBI NO: 15230170 NR Description: unknown protein
  misc_feature (1)..(89): Homolog of NCBI NO: 34912600 NR Description: P0046B10.17 [Oryza sativa (japonica
  misc_feature (151)..(347): Homolog of NCBI NO: 34912600 NR Description: P0046B10.17 [Oryza sativa (japonica
  misc_feature (1)..(149): Homolog of NCBI NO: 18404727 NR Description: expressed protein
  misc_feature (77)..(353): Homolog of NCBI NO: 18404727 NR Description: expressed protein
MPKERKERSVSLDKYKRSPLCCEASLALKPSEKQVKEWEEARCPVCMEHPHNGILLICSSYENGCRPYMCDTSHRHSNCFDQFRKASKEKPSLSLLREEEESNEPTEMEDVDSDSTAVNLLGEAASEITVVDLSDGERGEEEVEEDQKKNKPPKLTCPLCRGHIKEWVVVKAARCFMNSKHRSCSCETCDFSGSYSDLRKHARLLHPGVRPSEADPERQRSWRRLERQSDLGDLLSTLQSSFGGDEISNDDGFLFADTRLLTVYFLIRVFRPESSGSRSSSWSGTSRARTHTSGRRRSSRPASLWGESYEGNTGTSPRDEENNQSSDVQVSGTRRRRSRRRTVIDDDDEEEEP

SEQ ID NO: 22531 - protein, 307 aa, Arabidopsis thaliana
  peptide (1)..(307): Ceres Seq. ID no. 12421520
  misc_feature (97)..(204): Homolog of NCBI NO: 38344827 NR Description: OSJNBa0064H22.8 [Oryza sativa (japonica
  misc_feature (1)..(46): Homolog of NCBI NO: 15236507 NR Description: hypothetical protein
  misc_feature (91)..(204): Homolog of NCBI NO: 15236507 NR Description: hypothetical protein
  misc_feature (1)..(46): Homolog of NCBI NO: 15221290 NR Description: unknown protein
  misc_feature (93)..(204): Homolog of NCBI NO: 15221290 NR Description: unknown protein
  misc_feature (1)..(281): Homolog of NCBI NO: 15230170 NR Description: unknown protein
  misc_feature (1)..(43): Homolog of NCBI NO: 34912600 NR Description: P0046B10.17 [Oryza sativa (japonica
  misc_feature (105)..(301): Homolog of NCBI NO: 34912600 NR Description: P0046B10.17 [Oryza sativa (japonica
  misc_feature (1)..(103): Homolog of NCBI NO: 18404727 NR Description: expressed protein
  misc_feature (31)..(307): Homolog of NCBI NO: 18404727 NR Description: expressed protein
MEHPHNGILLICSSYENGCRPYMCDTSHRHSNCFDQFRKASKEKPSLSLLREEEESNEPTEMEDVDSDSTAVNLLGEAASEITVVDLSDGERGEEEVEEDQKKNKPPKLTCPLCRGHIKEWVVVKAARCFMNSKHRSCSCETCDFSGSYSDLRKHARLLHPGVRPSEADPERQRSWRRLERQSDLGDLLSTLQSSFGGDEISNDDGFLFADTRLLTVYFLIRVFRPESSGSRSSSWSGTSRARTHTSGRRRSSRPASLWGESYEGNTGTSPRDEENNQSSDVQVSGTRRRRSRRRTVIDDDDEEEEP

SEQ ID NO: 22532 - protein, 285 aa, Arabidopsis thaliana
  peptide (1)..(285): Ceres Seq. ID no. 12421521
  misc_feature (75)..(182): Homolog of NCBI NO: 38344827 NR Description: OSJNBa0064H22.8 [Oryza sativa (japonica
  misc_feature (1)..(24): Homolog of NCBI NO: 15236507 NR Description: hypothetical protein
  misc_feature (69)..(182): Homolog of NCBI NO: 15236507 NR Description: hypothetical protein
  misc_feature (1)..(24): Homolog of NCBI NO: 15221290 NR Description: unknown protein
  misc_feature (71)..(182): Homolog of NCBI NO: 15221290 NR Description: unknown protein
  misc_feature (1)..(259): Homolog of NCBI NO: 15230170 NR Description: unknown protein
  misc_feature (1)..(21): Homolog of NCBI NO: 34912600 NR Description: P0046B10.17 [Oryza sativa (japonica
  misc_feature (83)..(279): Homolog of NCBI NO: 34912600 NR Description: P0046B10.17 [Oryza sativa (japonica
  misc_feature (1)..(81): Homolog of NCBI NO: 18404727 NR Description: expressed protein
  misc_feature (9)..(285): Homolog of NCBI NO: 18404727 NR Description: expressed protein
MCDTSHRHSNCFDQFRKASKEKPSLSLLREEEESNEPTEMEDVDSDSTAVNLLGEAASEITVVDLSDGERGEEEVEEDQKKNKPPKLTCPLCRGHIKEWVVVKAARCFMNSKHRSCSCETCDFSGSYSDLRKHARLLHPGVRPSEADPERQRSWRRLERQSDLGDLLSTLQSSFGGDEISNDDGFLFADTRLLTVYFLIRVFRPESSGSRSSSWSGTSRARTHTSGRRRSSRPASLWGESYEGNTGTSPRDEENNQSSDVQVSGTRRRRSRRRTVIDDDDEEEEP

SEQ ID NO: 22533 - DNA, 1903 bp, Arabidopsis thaliana
  misc_feature (1)..(1903): Ceres Seq. ID no. 12328210
  misc_feature: MA Experiment ID: 108462 Result: Down-regulated in Transcription
  misc_feature: MA Experiment 108462 PARAMETER Experiment Name: At_Germinating_Seeds_cDNA_P Parameter: Age (day) Value: 2 vs. 0
  misc_feature: MA Experiment 108462 PARAMETER Experiment Name: At_Germinating_Seeds_cDNA_P Parameter: Tissue Value: Germinating Seeds
  misc_feature: MA Experiment ID: 108463 Result: Down-regulated in Transcription
  misc_feature: MA Experiment 108463 PARAMETER Experiment Name: At_Germinating_Seeds_cDNA_P Parameter: Age (day) Value: 3 vs. 0
  misc_feature: MA Experiment 108463 PARAMETER Experiment Name: At_Germinating_Seeds_cDNA_P Parameter: Tissue Value: Germinating Seeds
  misc_feature: MA Experiment ID: 108501 Result: Down-regulated in Transcription
  misc_feature: MA Experiment 108501 PARAMETER Experiment Name: At_ap2_floral_buds_cDNA_P Parameter: Plant Line Value: ap2 (Ler.)
  misc_feature: MA Experiment 108501 PARAMETER Experiment Name: At_ap2_floral_buds_cDNA_P Parameter: Tissue Value: Closed Flower
  misc_feature: MA Experiment ID: 108573 Result: Up-regulated in Transcription
  misc_feature: MA Experiment 108573 PARAMETER Experiment Name: At_Drought_cDNA_P Parameter: Timepoint (hr) Value: 6
  misc_feature: MA Experiment 108573 PARAMETER Experiment Name: At_Drought_cDNA_P Parameter: Tissue Value: Aerial
  misc_feature: MA Experiment 108573 PARAMETER Experiment Name: At_Drought_cDNA_P Parameter: Treatment Value: Drought vs. No Drought
  misc_feature: MA Experiment ID: 108577 Result: Down-regulated in Transcription
  misc_feature: MA Experiment 108577 PARAMETER Experiment Name: At_42deg_Heat_cDNA_P Parameter: Temperature (deg C) Value: 42 vs. 22
  misc_feature: MA Experiment 108577 PARAMETER Experiment Name: At_42deg_Heat_cDNA_P Parameter: Timepoint (hr) Value: 6
  misc_feature: MA Experiment 108577 PARAMETER Experiment Name: At_42deg_Heat_cDNA_P Parameter: Tissue Value: Aerial
  misc_feature: MA Experiment ID: 108594 Result: Up-regulated in Transcription
  misc_feature: MA Experiment 108594 PARAMETER Experiment Name: At_Ler-rhl_Root_cDNA_P Parameter: Plant Line Value: null
  misc_feature: MA Experiment ID: 20000111 Result: Down-regulated in Transcription
  misc_feature: MA Experiment 20000111 PARAMETER Experiment Name: At_42deg_Heat_cDNA_P Parameter: Temperature (deg C) Value: 42 vs. 22
  misc_feature: MA Experiment 20000111 PARAMETER Experiment Name: At_42deg_Heat_cDNA_P Parameter: Timepoint (hr) Value: 6
  misc_feature: MA Experiment 20000111 PARAMETER Experiment Name: At_42deg_Heat_cDNA_P Parameter: Tissue Value: Aerial
  misc_feature: MA Experiment ID: 20000113 Result: Down-regulated in Transcription
  misc_feature: MA Experiment 20000113 PARAMETER Experiment Name: At_42deg_Heat_cDNA_P Parameter: Temperature (deg C) Value: 42 vs. 22
  misc_feature: MA Experiment 20000113 PARAMETER Experiment Name: At_42deg_Heat_cDNA_P Parameter: Timepoint (hr) Value: 8
  misc_feature: MA Experiment 20000113 PARAMETER Experiment Name: At_42deg_Heat_cDNA_P Parameter: Tissue Value: Aerial
  misc_feature: MA Experiment ID: 20000117 Result: Down-regulated in Transcription
  misc_feature: MA Experiment 20000117 PARAMETER Experiment Name: At_100uM_ABA_Mutants_cDNA_P Parameter: Plant Line Value: Columbia
  misc_feature: MA Experiment 20000117 PARAMETER Experiment Name: At_100uM_ABA_Mutants_cDNA_P Parameter: Timepoint (hr) Value: 6
  misc_feature: MA Experiment 20000117 PARAMETER Experiment Name: At_100uM_ABA_Mutants_cDNA_P Parameter: Tissue Value: Aerial
  misc_feature: MA Experiment 20000117 PARAMETER Experiment Name: At_100uM_ABA_Mutants_cDNA_P Parameter: Treatment Value: 100uM ABA vs. No Treatment
  misc_feature: MA Experiment ID: 20000173 Result: Down-regulated in Transcription
  misc_feature: MA Experiment 20000173 PARAMETER Experiment Name: At_42deg_Heat_P Parameter: Age (day) Value: 14
  misc_feature: MA Experiment 20000173 PARAMETER Experiment Name: At_42deg_Heat_P Parameter: Organism Value: A. thaliana
  misc_feature: MA Experiment 20000173 PARAMETER Experiment Name: At_42deg_Heat_P Parameter: Plant Line Value: WS
  misc_feature: MA Experiment 20000173 PARAMETER Experiment Name: At_42deg_Heat_P Parameter: Temperature (deg C) Value: 42 vs. 22
  misc_feature: MA Experiment 20000173 PARAMETER Experiment Name: At_42deg_Heat_P Parameter: Timepoint (hr) Value: 6
  misc_feature: MA Experiment 20000173 PARAMETER Experiment Name: At_42deg_Heat_P Parameter: Tissue Value: Aerial
  misc_feature: MA Experiment ID: 20000179 Result: Down-regulated in Transcription
  misc_feature: MA Experiment 20000179 PARAMETER Experiment Name: At_Germinating_Seeds_P Parameter: Age (hr) Value: 6 vs. 0
  misc_feature: MA Experiment 20000179 PARAMETER Experiment Name: At_Germinating_Seeds_P Parameter: Tissue Value: Germinating Seeds
  misc_feature: MA Experiment ID: 20000180 Result: Down-regulated in Transcription
  misc_feature: MA Experiment 20000180 PARAMETER Experiment Name: At_Germinating_Seeds_P Parameter: Age (hr) Value: 24 vs. 0
  misc_feature: MA Experiment 20000180 PARAMETER Experiment Name: At_Germinating_Seeds_P Parameter: Tissue Value: Germinating Seeds
  misc_feature: MA Experiment ID: 20000185 Result: Down-regulated in Transcription
  misc_feature: MA Experiment 20000185 PARAMETER Experiment Name: At_Roots__P Parameter: Age (day) Value: 7 vs. 21
  misc_feature: MA Experiment 20000185 PARAMETER Experiment Name: At_Roots__P Parameter: Organism Value: A. thaliana
  misc_feature: MA Experiment 20000185 PARAMETER Experiment Name: At_Roots__P Parameter: Tissue Value: Roots vs. Whole Plant
  misc_feature: MA Experiment ID: 20000224 Result: Down-regulated in Transcription
  misc_feature: MA Experiment ID: 20000227 Result: Up-regulated in Transcription
  misc_feature: MA Experiment 20000227 PARAMETER Experiment Name: At_Root-Tips-vs-Tops_P Parameter: Tissue Value: Root Tips vs. Root Tops
  misc_feature: MA Experiment ID: 20000234 Result: Down-regulated in Transcription
  misc_feature: MA Experiment 20000234 PARAMETER Experiment Name: At_Siliques_P Parameter: Age (day) Value: 21
  misc_feature: MA Experiment 20000234 PARAMETER Experiment Name: At_Siliques_P Parameter: Organism Value: A. thaliana
  misc_feature: MA Experiment 20000234 PARAMETER Experiment Name: At_Siliques_P Parameter: Plant Line Value: WS
  misc_feature: MA Experiment 20000234 PARAMETER Experiment Name: At_Siliques_P Parameter: Tissue Value: Less Than 5mm Siliques vs. Whole Plant
  misc_feature: MA Experiment ID: 20000264 Result: Down-regulated in Transcription
  misc_feature: MA Experiment 20000264 PARAMETER Experiment Name: At_Open_Flower_P Parameter: Age (day) Value: 21
  misc_feature: MA Experiment 20000264 PARAMETER Experiment Name: At_Open_Flower_P Parameter: Plant Line Value: WS
  misc_feature: MA Experiment 20000264 PARAMETER Experiment Name: At_Open_Flower_P Parameter: Tissue Value: Open Flower vs. Whole Plant
  misc_feature: MA Experiment ID: 20000265 Result: Down-regulated in Transcription
  misc_feature: MA Experiment 20000265 PARAMETER Experiment Name: At_Open_Flower_P Parameter: Age (day) Value: 21
  misc_feature: MA Experiment 20000265 PARAMETER Experiment Name: At_Open_Flower_P Parameter: Plant Line Value: WS
  misc_feature: MA Experiment 20000265 PARAMETER Experiment Name: At_Open_Flower_P Parameter: Tissue Value: Closed Flower vs. Whole Plant
  misc_feature: MA Experiment ID: 20000268 Result: Down-regulated in Transcription
  misc_feature: MA Experiment 20000268 PARAMETER Experiment Name: At_100mM_NaCl__P Parameter: Age (day) Value: 14
  misc_feature: MA Experiment 20000268 PARAMETER Experiment Name: At_100mM_NaCl__P Parameter: Organism Value: A. thaliana
  misc_feature: MA Experiment 20000268 PARAMETER Experiment Name: At_100mM_NaCl__P Parameter: Plant Line Value: WS
  misc_feature: MA Experiment 20000268 PARAMETER Experiment Name: At_100mM_NaCl__P Parameter: Timepoint (hr) Value: 6
  misc_feature: MA Experiment 20000268 PARAMETER Experiment Name: At_100mM_NaCl__P Parameter: Tissue Value: Whole Plant
  misc_feature: MA Experiment 20000268 PARAMETER Experiment Name: At_100mM_NaCl__P Parameter: Treatment Value: 100mM NaCl vs. No Treatment
  misc_feature: MA Experiment ID: 20000286 Result: Down-regulated in Transcription
  misc_feature: MA Experiment 20000286 PARAMETER Experiment Name: At_Open_Flower_P Parameter: Age (day) Value: 21
  misc_feature: MA Experiment 20000286 PARAMETER Experiment Name: At_Open_Flower_P Parameter: Plant Line Value: WS
  misc_feature: MA Experiment 20000286 PARAMETER Experiment Name: At_Open_Flower_P Parameter: Tissue Value: Half Open vs. Whole Plant
  misc_feature: MA Experiment ID: 20000308 Result: Down-regulated in Transcription
  misc_feature: MA Experiment 20000308 PARAMETER Experiment Name: At_100mM_NaCl__P Parameter: Age (day) Value: 17
  misc_feature: MA Experiment 20000308 PARAMETER Experiment Name: At_100mM_NaCl__P Parameter: Organism Value: A. thaliana
  misc_feature: MA Experiment 20000308 PARAMETER Experiment Name: At_100mM_NaCl__P Parameter: Plant Line Value: WS
  misc_feature: MA Experiment 20000308 PARAMETER Experiment Name: At_100mM_NaCl__P Parameter: Timepoint (hr) Value: 72
  misc_feature: MA Experiment 20000308 PARAMETER Experiment Name: At_100mM_NaCl__P Parameter: Tissue Value: Whole Plant
  misc_feature: MA Experiment 20000308 PARAMETER Experiment Name: At_100mM_NaCl__P Parameter: Treatment Value: 100mM NaCl vs. No Treatment
  misc_feature: MA Experiment ID: 20000438 Result: Down-regulated in Transcription
  misc_feature: MA Experiment 20000438 PARAMETER Experiment Name: At_Shoots__P Parameter: Age (day) Value: 14
  misc_feature: MA Experiment 20000438 PARAMETER Experiment Name: At_Shoots__P Parameter: Tissue Value: Shoots vs. Whole Plant
  misc_feature: MA Experiment ID: 20000439 Result: Down-regulated in Transcription
  misc_feature: MA Experiment 20000439 PARAMETER Experiment Name: At_Roots__P Parameter: Age (day) Value: 14 vs. 21
  misc_feature: MA Experiment 20000439 PARAMETER Experiment Name: At_Roots__P Parameter: Organism Value: A. thaliana
  misc_feature: MA Experiment 20000439 PARAMETER Experiment Name: At_Roots__P Parameter: Tissue Value: Roots vs. Whole Plant
  misc_feature: MA Experiment ID: 20000441 Result: Up-regulated in Transcription
  misc_feature: MA Experiment 20000441 PARAMETER Experiment Name: At_1uM_BR-BRZ__P Parameter: Tissue Value: Shoot Apices
  misc_feature: MA Experiment 20000441 PARAMETER Experiment Name: At_1uM_BR-BRZ__P Parameter: Treatment Value: 1uM BR vs. No Treatment
  misc_feature: MA Experiment ID: 20000443 Result: Up-regulated in Transcription
  misc_feature: MA Experiment 20000443 PARAMETER Experiment Name: At_1uM_BR-BRZ__P Parameter: Tissue Value: Shoot Apices
  misc_feature: MA Experiment 20000443 PARAMETER Experiment Name: At_1uM_BR-BRZ__P Parameter: Treatment Value: 1uM BRZ vs. No Treatment
  misc_feature: MA Experiment ID: 20000452 Result: Down-regulated in Transcription
  misc_feature: MA Experiment 20000452 PARAMETER Experiment Name: At_CS6879_Shoots-Roots_P Parameter: Age (day) Value: 14
  misc_feature: MA Experiment 20000452 PARAMETER Experiment Name: At_CS6879_Shoots-Roots_P Parameter: Organism Value: A. thaliana
  misc_feature: MA Experiment 20000452 PARAMETER Experiment Name: At_CS6879_Shoots-Roots_P Parameter: Plant Line Value: CS6879 vs. WS
  misc_feature: MA Experiment 20000452 PARAMETER Experiment Name: At_CS6879_Shoots-Roots_P Parameter: Tissue Value: Shoots
  misc_feature: MA Experiment ID: 20000496 Result: Up-regulated in Transcription
  misc_feature: MA Experiment 20000496 PARAMETER Experiment Name: At_Guard_Cells_P Parameter: Harvest Date Value: 7/19/2002
  misc_feature: MA Experiment 20000496 PARAMETER Experiment Name: At_Guard_Cells_P Parameter: Organism Value: Canola
  misc_feature: MA Experiment 20000496 PARAMETER Experiment Name: At_Guard_Cells_P Parameter: Tissue Value: Guard Cells vs. Leaves
  misc_feature: MA Experiment ID: 20000573 Result: Up-regulated in Transcription
  misc_feature: MA Experiment 20000573 PARAMETER Experiment Name: At_100uM_ABA_Mutants__P Parameter: Organism Value: A. thaliana
  misc_feature: MA Experiment 20000573 PARAMETER Experiment Name: At_100uM_ABA_Mutants__P Parameter: Plant Line Value: CS22 vs. Ler wt
  misc_feature: MA Experiment 20000573 PARAMETER Experiment Name: At_100uM_ABA_Mutants__P Parameter: Timepoint (hr) Value: N/A
  misc_feature: MA Experiment 20000573 PARAMETER Experiment Name: At_100uM_ABA_Mutants__P Parameter: Tissue Value: Whole Plant
  misc_feature: MA Experiment 20000573 PARAMETER Experiment Name: At_100uM_ABA_Mutants__P Parameter: Treatment Value: None
  misc_feature: MA Experiment ID: 20000794 Result: Down-regulated in Transcription
  misc_feature: MA Experiment 20000794 PARAMETER Experiment Name: At_Petals_P Parameter: Age (day) Value: 23-25 days
  misc_feature: MA Experiment 20000794 PARAMETER Experiment Name: At_Petals_P Parameter: Plant Line Value: WS
  misc_feature: MA Experiment 20000794 PARAMETER Experiment Name: At_Petals_P Parameter: Tissue Value: Petals vs. Whole plant
  misc_feature: MA Experiment ID: 20001247 Result: Up-regulated in Transcription
  misc_feature: MA Experiment 20001247 PARAMETER Experiment Name: At_Far-red-induction_P Parameter: Age (day) Value: 7
  misc_feature: MA Experiment 20001247 PARAMETER Experiment Name: At_Far-red-induction_P Parameter: Light Value: Far-red vs. White
  misc_feature: MA Experiment 20001247 PARAMETER Experiment Name: At_Far-red-induction_P Parameter: Organism Value: A. thaliana
  misc_feature: MA Experiment 20001247 PARAMETER Experiment Name: At_Far-red-induction_P Parameter: Plant Line Value: Columbia
  misc_feature: MA Experiment 20001247 PARAMETER Experiment Name: At_Far-red-induction_P Parameter: Timepoint (hr) Value: 1
  misc_feature: MA Experiment 20001247 PARAMETER Experiment Name: At_Far-red-induction_P Parameter: Tissue Value: Whole Plant
  misc_feature: MA Experiment ID: 20001248 Result: Up-regulated in Transcription
  misc_feature: MA Experiment 20001248 PARAMETER Experiment Name: At_Far-red-induction_P Parameter: Age (day) Value: 7
  misc_feature: MA Experiment 20001248 PARAMETER Experiment Name: At_Far-red-induction_P Parameter: Light Value: Far-red vs. White
  misc_feature: MA Experiment 20001248 PARAMETER Experiment Name: At_Far-red-induction_P Parameter: Organism Value: A. thaliana
  misc_feature: MA Experiment 20001248 PARAMETER Experiment Name: At_Far-red-induction_P Parameter: Plant Line Value: Columbia
  misc_feature: MA Experiment 20001248 PARAMETER Experiment Name: At_Far-red-induction_P Parameter: Timepoint (hr) Value: 4
  misc_feature: MA Experiment 20001248 PARAMETER Experiment Name: At_Far-red-induction_P Parameter: Tissue Value: Whole Plant
  misc_feature: MA Experiment ID: 20001450 Result: Up-regulated in Transcription
  misc_feature: MA Experiment 20001450 PARAMETER Experiment Name: At_Far-red-induction_P Parameter: Age (day) Value: 7
  misc_feature: MA Experiment 20001450 PARAMETER Experiment Name: At_Far-red-induction_P Parameter: Light Value: Far-red vs. White
  misc_feature: MA Experiment 20001450 PARAMETER Experiment Name: At_Far-red-induction_P Parameter: Organism Value: A. thaliana
  misc_feature: MA Experiment 20001450 PARAMETER Experiment Name: At_Far-red-induction_P Parameter: Plant Line Value: Columbia
  misc_feature: MA Experiment 20001450 PARAMETER Experiment Name: At_Far-red-induction_P Parameter: Timepoint (hr) Value: 8
  misc_feature: MA Experiment 20001450 PARAMETER Experiment Name: At_Far-red-induction_P Parameter: Tissue Value: Whole Plant
  misc_feature: MA Experiment ID: 20001451 Result: Up-regulated in Transcription
  misc_feature: MA Experiment 20001451 PARAMETER Experiment Name: At_Far-red-induction_P Parameter: Age (day) Value: 7
  misc_feature: MA Experiment 20001451 PARAMETER Experiment Name: At_Far-red-induction_P Parameter: Light Value: Far-red vs. White
  misc_feature: MA Experiment 20001451 PARAMETER Experiment Name: At_Far-red-induction_P Parameter: Organism Value: A. thaliana
  misc_feature: MA Experiment 20001451 PARAMETER Experiment Name: At_Far-red-induction_P Parameter: Plant Line Value: Columbia
  misc_feature: MA Experiment 20001451 PARAMETER Experiment Name: At_Far-red-induction_P Parameter: Timepoint (hr) Value: 24
  misc_feature: MA Experiment 20001451 PARAMETER Experiment Name: At_Far-red-induction_P Parameter: Tissue Value: Whole Plant
  misc_feature: MA Experiment ID: 20001554 Result: Down-regulated in Transcription
  misc_feature: MA Experiment 20001554 PARAMETER Experiment Name: At_Drought_Soil_Dry_P Parameter: Age (day) Value: 21
  misc_feature: MA Experiment 20001554 PARAMETER Experiment Name: At_Drought_Soil_Dry_P Parameter: Organism Value: A. thaliana
  misc_feature: MA Experiment 20001554 PARAMETER Experiment Name: At_Drought_Soil_Dry_P Parameter: Plant Line Value: WS
  misc_feature: MA Experiment 20001554 PARAMETER Experiment Name: At_Drought_Soil_Dry_P Parameter: Post Timepoint (hr) Value: None
  misc_feature: MA Experiment 20001554 PARAMETER Experiment Name: At_Drought_Soil_Dry_P Parameter: Post-Treatment Value: None
  misc_feature: MA Experiment 20001554 PARAMETER Experiment Name: At_Drought_Soil_Dry_P Parameter: Timepoint (day) Value: 7
  misc_feature: MA Experiment 20001554 PARAMETER Experiment Name: At_Drought_Soil_Dry_P Parameter: Treatment Value: Drought vs. No Drought
  misc_feature: MA Experiment ID: 20001555 Result: Down-regulated in Transcription
  misc_feature: MA Experiment 20001555 PARAMETER Experiment Name: At_Drought_Soil_Dry_P Parameter: Age (day) Value: 24
  misc_feature: MA Experiment 20001555 PARAMETER Experiment Name: At_Drought_Soil_Dry_P Parameter: Organism Value: A. thaliana
  misc_feature: MA Experiment 20001555 PARAMETER Experiment Name: At_Drought_Soil_Dry_P Parameter: Plant Line Value: WS
  misc_feature: MA Experiment 20001555 PARAMETER Experiment Name: At_Drought_Soil_Dry_P Parameter: Post Timepoint (hr) Value: None
  misc_feature: MA Experiment 20001555 PARAMETER Experiment Name: At_Drought_Soil_Dry_P Parameter: Post-Treatment Value: None
  misc_feature: MA Experiment 20001555 PARAMETER Experiment Name: At_Drought_Soil_Dry_P Parameter: Timepoint (day) Value: 10
  misc_feature: MA Experiment 20001555 PARAMETER Experiment Name: At_Drought_Soil_Dry_P Parameter: Treatment Value: Drought vs. No Drought
  misc_feature: MA Experiment ID: 20001556 Result: Down-regulated in Transcription
  misc_feature: MA Experiment 20001556 PARAMETER Experiment Name: At_Drought_Soil_Dry_P Parameter: Age (day) Value: 26
  misc_feature: MA Experiment 20001556 PARAMETER Experiment Name: At_Drought_Soil_Dry_P Parameter: Organism Value: A. thaliana
  misc_feature: MA Experiment 20001556 PARAMETER Experiment Name: At_Drought_Soil_Dry_P Parameter: Plant Line Value: WS
  misc_feature: MA Experiment 20001556 PARAMETER Experiment Name: At_Drought_Soil_Dry_P Parameter: Post Timepoint (hr) Value: None
  misc_feature: MA Experiment 20001556 PARAMETER Experiment Name: At_Drought_Soil_Dry_P Parameter: Post-Treatment Value: None
  misc_feature: MA Experiment 20001556 PARAMETER Experiment Name: At_Drought_Soil_Dry_P Parameter: Timepoint (day) Value: 12
  misc_feature: MA Experiment 20001556 PARAMETER Experiment Name: At_Drought_Soil_Dry_P Parameter: Treatment Value: Drought vs. No Drought
  misc_feature: MA Experiment ID: 20001558 Result: Down-regulated in Transcription
  misc_feature: MA Experiment 20001558 PARAMETER Experiment Name: At_Drought_Soil_Dry_P Parameter: Age (day) Value: 27
  misc_feature: MA Experiment 20001558 PARAMETER Experiment Name: At_Drought_Soil_Dry_P Parameter: Organism Value: A. thaliana
  misc_feature: MA Experiment 20001558 PARAMETER Experiment Name: At_Drought_Soil_Dry_P Parameter: Plant Line Value: WS
  misc_feature: MA Experiment 20001558 PARAMETER Experiment Name: At_Drought_Soil_Dry_P Parameter: Post Timepoint (hr) Value: 6
  misc_feature: MA Experiment 20001558 PARAMETER Experiment Name: At_Drought_Soil_Dry_P Parameter: Post-Treatment Value: Re-Water vs. No Drought
  misc_feature: MA Experiment 20001558 PARAMETER Experiment Name: At_Drought_Soil_Dry_P Parameter: Timepoint (day) Value: 13
  misc_feature: MA Experiment 20001558 PARAMETER Experiment Name: At_Drought_Soil_Dry_P Parameter: Treatment Value: Drought vs. No Drought
  misc_feature: MA Experiment ID: 20001559 Result: Down-regulated in Transcription
  misc_feature: MA Experiment 20001559 PARAMETER Experiment Name: At_Drought_Soil_Dry_P Parameter: Age (day) Value: 28
  misc_feature: MA Experiment 20001559 PARAMETER Experiment Name: At_Drought_Soil_Dry_P Parameter: Organism Value: A. thaliana
  misc_feature: MA Experiment 20001559 PARAMETER Experiment Name: At_Drought_Soil_Dry_P Parameter: Plant Line Value: WS
  misc_feature: MA Experiment 20001559 PARAMETER Experiment Name: At_Drought_Soil_Dry_P Parameter: Post Timepoint (hr) Value: 29
  misc_feature: MA Experiment 20001559 PARAMETER Experiment Name: At_Drought_Soil_Dry_P Parameter: Post-Treatment Value: Re-Water vs. No Drought
  misc_feature: MA Experiment 20001559 PARAMETER Experiment Name: At_Drought_Soil_Dry_P Parameter: Timepoint (day) Value: 14
  misc_feature: MA Experiment 20001559 PARAMETER Experiment Name: At_Drought_Soil_Dry_P Parameter: Treatment Value: Drought vs. No Drought
  misc_feature: MA Experiment ID: 20001560 Result: Down-regulated in Transcription
  misc_feature: MA Experiment 20001560 PARAMETER Experiment Name: At_Drought_Soil_Dry_P Parameter: Age (day) Value: 28
  misc_feature: MA Experiment 20001560 PARAMETER Experiment Name: At_Drought_Soil_Dry_P Parameter: Organism Value: A. thaliana
  misc_feature: MA Experiment 20001560 PARAMETER Experiment Name: At_Drought_Soil_Dry_P Parameter: Plant Line Value: WS
  misc_feature: MA Experiment 20001560 PARAMETER Experiment Name: At_Drought_Soil_Dry_P Parameter: Post Timepoint (hr) Value: None
  misc_feature: MA Experiment 20001560 PARAMETER Experiment Name: At_Drought_Soil_Dry_P Parameter: Post-Treatment Value: None
  misc_feature: MA Experiment 20001560 PARAMETER Experiment Name: At_Drought_Soil_Dry_P Parameter: Timepoint (day) Value: 14
  misc_feature: MA Experiment 20001560 PARAMETER Experiment Name: At_Drought_Soil_Dry_P Parameter: Treatment Value: Drought vs. No Drought
  misc_feature: MA Experiment ID: 20001755 Result: Down-regulated in Transcription
  misc_feature: MA Experiment 20001755 PARAMETER Experiment Name: At_50mM_NH4NO3_L-to-H_P Parameter: Timepoint (hr) Value: 2
  misc_feature: MA Experiment 20001755 PARAMETER Experiment Name: At_50mM_NH4NO3_L-to-H_P Parameter: Tissue Value: Leaf
  misc_feature: MA Experiment 20001755 PARAMETER Experiment Name: At_50mM_NH4NO3_L-to-H_P Parameter: Treatment Value: 50mM NH4NO3 vs 100mM Mannitol
  misc_feature: MA Experiment ID: 20001757 Result: Up-regulated in Transcription
  misc_feature: MA Experiment 20001757 PARAMETER Experiment Name: At_50mM_NH4NO3_L-to-H_P Parameter: Timepoint (hr) Value: 6
  misc_feature: MA Experiment 20001757 PARAMETER Experiment Name: At_50mM_NH4NO3_L-to-H_P Parameter: Tissue Value: Leaf
  misc_feature: MA Experiment 20001757 PARAMETER Experiment Name: At_50mM_NH4NO3_L-to-H_P Parameter: Treatment Value: 50mM NH4NO3 vs 100mM Mannitol
  misc_feature: MA Experiment ID: 20001904 Result: Down-regulated in Transcription
  misc_feature: MA Experiment 20001904 PARAMETER Experiment Name: At_Drought_Reproduction_P Parameter: Age (day) Value: 37
  misc_feature: MA Experiment 20001904 PARAMETER Experiment Name: At_Drought_Reproduction_P Parameter: Organism Value: A. thaliana
  misc_feature: MA Experiment 20001904 PARAMETER Experiment Name: At_Drought_Reproduction_P Parameter: Plant Line Value: WS
  misc_feature: MA Experiment 20001904 PARAMETER Experiment Name: At_Drought_Reproduction_P Parameter: Timepoint (day) Value: 7
  misc_feature: MA Experiment 20001904 PARAMETER Experiment Name: At_Drought_Reproduction_P Parameter: Tissue Value: Rosettes
  misc_feature: MA Experiment 20001904 PARAMETER Experiment Name: At_Drought_Reproduction_P Parameter: Treatment Value: Drought vs. No Drought
  misc_feature: MA Experiment ID: 20001905 Result: Down-regulated in Transcription
  misc_feature: MA Experiment 20001905 PARAMETER Experiment Name: At_Drought_Reproduction_P Parameter: Age (day) Value: 40
  misc_feature: MA Experiment 20001905 PARAMETER Experiment Name: At_Drought_Reproduction_P Parameter: Organism Value: A. thaliana
  misc_feature: MA Experiment 20001905 PARAMETER Experiment Name: At_Drought_Reproduction_P Parameter: Plant Line Value: WS
  misc_feature: MA Experiment 20001905 PARAMETER Experiment Name: At_Drought_Reproduction_P Parameter: Timepoint (day) Value: 10
  misc_feature: MA Experiment 20001905 PARAMETER Experiment Name: At_Drought_Reproduction_P Parameter: Tissue Value: Rosettes
  misc_feature: MA Experiment 20001905 PARAMETER Experiment Name: At_Drought_Reproduction_P Parameter: Treatment Value: Drought vs. No Drought
  misc_feature: MA Experiment ID: 20001906 Result: Down-regulated in Transcription
  misc_feature: MA Experiment 20001906 PARAMETER Experiment Name: At_Drought_Reproduction_P Parameter: Age (day) Value: 35
  misc_feature: MA Experiment 20001906 PARAMETER Experiment Name: At_Drought_Reproduction_P Parameter: Organism Value: A. thaliana
  misc_feature: MA Experiment 20001906 PARAMETER Experiment Name: At_Drought_Reproduction_P Parameter: Plant Line Value: WS
  misc_feature: MA Experiment 20001906 PARAMETER Experiment Name: At_Drought_Reproduction_P Parameter: Timepoint (day) Value: 5
  misc_feature: MA Experiment 20001906 PARAMETER Experiment Name: At_Drought_Reproduction_P Parameter: Tissue Value: Siliques
  misc_feature: MA Experiment 20001906 PARAMETER Experiment Name: At_Drought_Reproduction_P Parameter: Treatment Value: Drought vs. No Drought
  misc_feature: MA Experiment ID: 20001907 Result: Down-regulated in Transcription
  misc_feature: MA Experiment 20001907 PARAMETER Experiment Name: At_Drought_Reproduction_P Parameter: Age (day) Value: 37
  misc_feature: MA Experiment 20001907 PARAMETER Experiment Name: At_Drought_Reproduction_P Parameter: Organism Value: A. thaliana
  misc_feature: MA Experiment 20001907 PARAMETER Experiment Name: At_Drought_Reproduction_P Parameter: Plant Line Value: WS
  misc_feature: MA Experiment 20001907 PARAMETER Experiment Name: At_Drought_Reproduction_P Parameter: Timepoint (day) Value: 7
  misc_feature: MA Experiment 20001907 PARAMETER Experiment Name: At_Drought_Reproduction_P Parameter: Tissue Value: Siliques
  misc_feature: MA Experiment 20001907 PARAMETER Experiment Name: At_Drought_Reproduction_P Parameter: Treatment Value: Drought vs. No Drought
  misc_feature: MA Experiment ID: 20001908 Result: Down-regulated in Transcription
  misc_feature: MA Experiment 20001908 PARAMETER Experiment Name: At_Drought_Reproduction_P Parameter: Age (day) Value: 40
  misc_feature: MA Experiment 20001908 PARAMETER Experiment Name: At_Drought_Reproduction_P Parameter: Organism Value: A. thaliana
  misc_feature: MA Experiment 20001908 PARAMETER Experiment Name: At_Drought_Reproduction_P Parameter: Plant Line Value: WS
  misc_feature: MA Experiment 20001908 PARAMETER Experiment Name: At_Drought_Reproduction_P Parameter: Timepoint (day) Value: 10
  misc_feature: MA Experiment 20001908 PARAMETER Experiment Name: At_Drought_Reproduction_P Parameter: Tissue Value: Siliques
  misc_feature: MA Experiment 20001908 PARAMETER Experiment Name: At_Drought_Reproduction_P Parameter: Treatment Value: Drought vs. No Drought
  misc_feature: MA Experiment ID: 20001911 Result: Down-regulated in Transcription
  misc_feature: MA Experiment 20001911 PARAMETER Experiment Name: At_Drought_Reproduction_P Parameter: Age (day) Value: 40
  misc_feature: MA Experiment 20001911 PARAMETER Experiment Name: At_Drought_Reproduction_P Parameter: Organism Value: A. thaliana
  misc_feature: MA Experiment 20001911 PARAMETER Experiment Name: At_Drought_Reproduction_P Parameter: Plant Line Value: WS
  misc_feature: MA Experiment 20001911 PARAMETER Experiment Name: At_Drought_Reproduction_P Parameter: Timepoint (day) Value: 10
  misc_feature: MA Experiment 20001911 PARAMETER Experiment Name: At_Drought_Reproduction_P Parameter: Tissue Value: Flowers
  misc_feature: MA Experiment 20001911 PARAMETER Experiment Name: At_Drought_Reproduction_P Parameter: Treatment Value: Drought vs. No Drought
atctaatatctctttctcaatttcggttccactttcctttcgtttgcaaaaacccatcccatcaaaaataaacaagagggcctaaagaagaatcctaaagactttacgggtcttgtttaggataaaagaaatgcctgccggtggattcgtcgtcggggatggccaaaaggcttatcccggcaaactcactccctttgttctcttcacttgcgttgttgctgccatgggcggtctcatcttcggatacgatatcggaatctccggtggtgtgacgtctatgccgtctttcctcaagcgattcttcccgtcggtgtatcggaaacaacaagaggacgcgtcaacgaaccagtactgtcagtacgatagcccgacgctaacgatgttcacatcgtctctatatctagcggcgctaatttcgtcgctggtggcttccaccgtgacaagaaagttcggacggcggctctcgatgctcttcggcggcatactcttctgcgccggagctctcatcaatggtttcgccaaacatgtttggatgctcatcgtcggtcgtatcttgcttggtttcggtatcggtttcgctaatcaggctgtgccactgtacctctctgagatggctccatacaaatacagaggagctttaaacattggtttccagctctcaattacaatcggaatcctcgtcgccgaagtgctaaactacttcttcgccaagatcaaaggcggttggggatggcggctcagtctcggaggcgcggtggttcctgccttgatcataaccatcggctccctcgtcctccctgacactcccaattcaatgatcgagcgtggccaacacgaagaagccaaaaccaagctcagacgaatccgtggtgtcgatgacgtcagccaagagtttgacgatttggtcgccgctagtaaagagtcgcagtcgatagagcacccgtggagaaacctcctccgccgcaagtaccgaccacatctcacaatggccgttatgattccgttctttcaacagctaaccggaatcaatgtgattatgttttacgctccggttttgttcaacaccattggtttcacgaccgatgcttctctcatgtccgctgtggtcactggctcggttaacgtggccgctacgcttgtttctatctacggtgttgacagatggggacgtcggtttctctttcttgaaggtggtacacaaatgcttatatgccaggctgtggttgcagcttgcataggggccaagtttggggtagacgggacccctggtgagctaccaaagtggtatgctatagtggttgtaacgttcatttgcatctatgtggcgggttttgcgtggtcgtggggcccactagggtggttagtaccgagtgaaatcttcccgttggagataaggtcggcggcgcagagtatcaccgtgtccgtgaacatgatcttcacgttcattatcgcgcaaatcttcttgacgatgctttgtcatttgaagtttgggttattccttgttttcgcctttttcgtggtggtgatgtcgatctttgtatacattttcttgccggagacgaaagggattccgatagaggagatgggtcaagtgtggaggtcacactggtattggtcaaggtttgtggaggatggtgagtatgggaatgcgcttgagatgggcaagaacagtaaccaagctggaacgaagcatgtttgatttatcattgtttttaatgagagttttaagaaagaaagaaaaaagatttgtaatttctaatgtcgtaaaggaaaaagtgtattagcctagatatttattggtgtttatataattcaataccacatgaagaaattatgcatatgattcttcgttaattgtccgtaattgttatactctttacttaaaccaagtgttttctctttg

SEQ ID NO: 22534 - protein, 522 aa, Arabidopsis thaliana
  peptide (1)..(522): Ceres Seq. ID no. 12328211
  misc_feature (26)..(489): Pfam Name: Sugar (and other) transporter Pfam Description: Sugar (and other) transporter
  misc_feature (3)..(522): Homolog of NCBI NO: 100347 NR Description: monosaccharide transport protein MST1 - common
  misc_feature (1)..(522): Homolog of NCBI NO: 7446727 NR Description: monosaccharid transport protein - fava bean
  misc_feature (1)..(514): Homolog of NCBI NO: 1353516 NR Description: sugar transporter
  misc_feature (1)..(514): Homolog of NCBI NO: 4138722 NR Description: hexose transporter [Vitis vinifera]
  misc_feature (1)..(512): Homolog of NCBI NO: 3915039 NR Description: Sugar carrier protein C
  misc_feature (1)..(514): Homolog of NCBI NO: 4138724 NR Description: hexose transporter [Vitis vinifera]
  misc_feature (1)..(516): Homolog of NCBI NO: 30349804 NR Description: monosaccharide-H+ symporter [Datisca glomerata]
  misc_feature (1)..(522): Homolog of NCBI NO: 21618276 NR Description: glucose transporter [Arabidopsis thaliana]
  misc_feature (1)..(522): Homolog of NCBI NO: 81619 NR Description: glucose transport protein STP1 - Arabidopsis
  misc_feature (1)..(522): Homolog of NCBI NO: 15220330 NR Description: glucose transporter
MPAGGFVVGDGQKAYPGKLTPFVLFTCVVAAMGGLIFGYDIGISGGVTSMPSFLKRFFPSVYRKQQEDASTNQYCQYDSPTLTMFTSSLYLAALISSLVASTVTRKFGRRLSMLFGGILFCAGALINGFAKHVWMLIVGRILLGFGIGFANQAVPLYLSEMAPYKYRGALNIGFQLSITIGILVAEVLNYFFAKIKGGWGWRLSLGGAVVPALIITIGSLVLPDTPNSMIERGQHEEAKTKLRRIRGVDDVSQEFDDLVAASKESQSIEHPWRNLLRRKYRPHLTMAVMIPFFQQLTGINVIMFYAPVLFNTIGFTTDASLMSAVVTGSVNVAATLVSIYGVDRWGRRFLFLEGGTQMLICQAVVAACIGAKFGVDGTPGELPKWYAIVVVTFICIYVAGFAWSWGPLGWLVPSEIFPLEIRSAAQSITVSVNMIFTFIIAQIFLTMLCHLKFGLFLVFAFFVVVMSIFVYIFLPETKGIPIEEMGQVWRSHWYWSRFVEDGEYGNALEMGKNSNQAGTKHV

SEQ ID NO: 22535 - protein, 491 aa, Arabidopsis thaliana
  peptide (1)..(491): Ceres Seq. ID no. 12328212
  misc_feature (1)..(458): Pfam Name: Sugar (and other) transporter Pfam Description: Sugar (and other) transporter
  misc_feature (1)..(491): Homolog of NCBI NO: 100347 NR Description: monosaccharide transport protein MST1 - common
  misc_feature (1)..(491): Homolog of NCBI NO: 7446727 NR Description: monosaccharid transport protein - fava bean
  misc_feature (1)..(483): Homolog of NCBI NO: 1353516 NR Description: sugar transporter
  misc_feature (1)..(483): Homolog of NCBI NO: 4138722 NR Description: hexose transporter [Vitis vinifera]
  misc_feature (1)..(481): Homolog of NCBI NO: 3915039 NR Description: Sugar carrier protein C
  misc_feature (1)..(483): Homolog of NCBI NO: 4138724 NR Description: hexose transporter [Vitis vinifera]
  misc_feature (1)..(485): Homolog of NCBI NO: 30349804 NR Description: monosaccharide-H+ symporter [Datisca glomerata]
  misc_feature (1)..(491): Homolog of NCBI NO: 21618276 NR Description: glucose transporter [Arabidopsis thaliana]
  misc_feature (1)..(491): Homolog of NCBI NO: 81619 NR Description: glucose transport protein STP1 - Arabidopsis
  misc_feature (1)..(491): Homolog of NCBI NO: 15220330 NR Description: glucose transporter
MGGLIFGYDIGISGGVTSMPSFLKRFFPSVYRKQQEDASTNQYCQYDSPTLTMFTSSLYLAALISSLVASTVTRKFGRRLSMLFGGILFCAGALINGFAKHVWMLIVGRILLGFGIGFANQAVPLYLSEMAPYKYRGALNIGFQLSITIGILVAEVLNYFFAKIKGGWGWRLSLGGAVVPALIITIGSLVLPDTPNSMIERGQHEEAKTKLRRIRGVDDVSQEFDDLVAASKESQSIEHPWRNLLRRKYRPHLTMAVMIPFFQQLTGINVIMFYAPVLFNTIGFTTDASLMSAVVTGSVNVAATLVSIYGVDRWGRRFLFLEGGTQMLICQAVVAACIGAKFGVDGTPGELPKWYAIVVVTFICIYVAGFAWSWGPLGWLVPSEIFPLEIRSAAQSITVSVNMIFTFIIAQIFLTMLCHLKFGLFLVFAFFVVVMSIFVYIFLPETKGIPIEEMGQVWRSHWYWSRFVEDGEYGNALEMGKNSNQAGTKHV

SEQ ID NO: 22536 - protein, 473 aa, Arabidopsis thaliana
  peptide (1)..(473): Ceres Seq. ID no. 12328213
  misc_feature (1)..(440): Pfam Name: Sugar (and other) transporter Pfam Description: Sugar (and other) transporter
  misc_feature (1)..(473): Homolog of NCBI NO: 100347 NR Description: monosaccharide transport protein MST1 - common
  misc_feature (1)..(473): Homolog of NCBI NO: 7446727 NR Description: monosaccharid transport protein - fava bean
  misc_feature (1)..(465): Homolog of NCBI NO: 1353516 NR Description: sugar transporter
  misc_feature (1)..(465): Homolog of NCBI NO: 4138722 NR Description: hexose transporter [Vitis vinifera]
  misc_feature (1)..(463): Homolog of NCBI NO: 3915039 NR Description: Sugar carrier protein C
  misc_feature (1)..(465): Homolog of NCBI NO: 4138724 NR Description: hexose transporter [Vitis vinifera]
  misc_feature (1)..(467): Homolog of NCBI NO: 30349804 NR Description: monosaccharide-H+ symporter [Datisca glomerata]
  misc_feature (1)..(473): Homolog of NCBI NO: 21618276 NR Description: glucose transporter [Arabidopsis thaliana]
  misc_feature (1)..(473): Homolog of NCBI NO: 81619 NR Description: glucose transport protein STP1 - Arabidopsis
  misc_feature (1)..(473): Homolog of NCBI NO: 15220330 NR Description: glucose transporter
MPSFLKRFFPSVYRKQQEDASTNQYCQYDSPTLTMFTSSLYLAALISSLVASTVTRKFGRRLSMLFGGILFCAGALINGFAKHVWMLIVGRILLGFGIGFANQAVPLYLSEMAPYKYRGALNIGFQLSITIGILVAEVLNYFFAKIKGGWGWRLSLGGAVVPALIITIGSLVLPDTPNSMIERGQHEEAKTKLRRIRGVDDVSQEFDDLVAASKESQSIEHPWRNLLRRKYRPHLTMAVMIPFFQQLTGINVIMFYAPVLFNTIGFTTDASLMSAVVTGSVNVAATLVSIYGVDRWGRRFLFLEGGTQMLICQAVVAACIGAKFGVDGTPGELPKWYAIVVVTFICIYVAGFAWSWGPLGWLVPSEIFPLEIRSAAQSITVSVNMIFTFIIAQIFLTMLCHLKFGLFLVFAFFVVVMSIFVYIFLPETKGIPIEEMGQVWRSHWYWSRFVEDGEYGNALEMGKNSNQAGTKHV

SEQ ID NO: 22537 - DNA, 1183 bp, Arabidopsis thaliana
  misc_feature (1)..(1183): Ceres Seq. ID no. 12335039
  misc_feature: MA Experiment ID: 108434 Result: Up-regulated in Transcription
  misc_feature: MA Experiment 108434 PARAMETER Experiment Name: At_Root_Tips_cDNA_P Parameter: Tissue Value: Root Tips
  misc_feature: MA Experiment ID: 108461 Result: Down-regulated in Transcription
  misc_feature: MA Experiment 108461 PARAMETER Experiment Name: At_Germinating_Seeds_cDNA_P Parameter: Age (day) Value: 1 vs. 0
  misc_feature: MA Experiment 108461 PARAMETER Experiment Name: At_Germinating_Seeds_cDNA_P Parameter: Tissue Value: Germinating Seeds
  misc_feature: MA Experiment ID: 108462 Result: Down-regulated in Transcription
  misc_feature: MA Experiment 108462 PARAMETER Experiment Name: At_Germinating_Seeds_cDNA_P Parameter: Age (day) Value: 2 vs. 0
  misc_feature: MA Experiment 108462 PARAMETER Experiment Name: At_Germinating_Seeds_cDNA_P Parameter: Tissue Value: Germinating Seeds
  misc_feature: MA Experiment ID: 108463 Result: Down-regulated in Transcription
  misc_feature: MA Experiment 108463 PARAMETER Experiment Name: At_Germinating_Seeds_cDNA_P Parameter: Age (day) Value: 3 vs. 0
  misc_feature: MA Experiment 108463 PARAMETER Experiment Name: At_Germinating_Seeds_cDNA_P Parameter: Tissue Value: Germinating Seeds
  misc_feature: MA Experiment ID: 108464 Result: Down-regulated in Transcription
  misc_feature: MA Experiment 108464 PARAMETER Experiment Name: At_Germinating_Seeds_cDNA_P Parameter: Age (day) Value: 4 vs. 0
  misc_feature: MA Experiment 108464 PARAMETER Experiment Name: At_Germinating_Seeds_cDNA_P Parameter: Tissue Value: Germinating Seeds
  misc_feature: MA Experiment ID: 20000090 Result: Up-regulated in Transcription
  misc_feature: MA Experiment ID: 20000111 Result: Up-regulated in Transcription
  misc_feature: MA Experiment 20000111 PARAMETER Experiment Name: At_42deg_Heat_cDNA_P Parameter: Temperature (deg C) Value: 42 vs. 22
  misc_feature: MA Experiment 20000111 PARAMETER Experiment Name: At_42deg_Heat_cDNA_P Parameter: Timepoint (hr) Value: 6
  misc_feature: MA Experiment 20000111 PARAMETER Experiment Name: At_42deg_Heat_cDNA_P Parameter: Tissue Value: Aerial
  misc_feature: MA Experiment ID: 20000112 Result: Up-regulated in Transcription
  misc_feature: MA Experiment 20000112 PARAMETER Experiment Name: At_42deg_Heat_cDNA_P Parameter: Temperature (deg C) Value: 42 vs. 22
  misc_feature: MA Experiment 20000112 PARAMETER Experiment Name: At_42deg_Heat_cDNA_P Parameter: Timepoint (hr) Value: 2
  misc_feature: MA Experiment 20000112 PARAMETER Experiment Name: At_42deg_Heat_cDNA_P Parameter: Tissue Value: Aerial
  misc_feature: MA Experiment ID: 20000113 Result: Up-regulated in Transcription
  misc_feature: MA Experiment 20000113 PARAMETER Experiment Name: At_42deg_Heat_cDNA_P Parameter: Temperature (deg C) Value: 42 vs. 22
  misc_feature: MA Experiment 20000113 PARAMETER Experiment Name: At_42deg_Heat_cDNA_P Parameter: Timepoint (hr) Value: 8
  misc_feature: MA Experiment 20000113 PARAMETER Experiment Name: At_42deg_Heat_cDNA_P Parameter: Tissue Value: Aerial
  misc_feature: MA Experiment ID: 20000173 Result: Up-regulated in Transcription
  misc_feature: MA Experiment 20000173 PARAMETER Experiment Name: At_42deg_Heat_P Parameter: Age (day) Value: 14
  misc_feature: MA Experiment 20000173 PARAMETER Experiment Name: At_42deg_Heat_P Parameter: Organism Value: A. thaliana
  misc_feature: MA Experiment 20000173 PARAMETER Experiment Name: At_42deg_Heat_P Parameter: Plant Line Value: WS
  misc_feature: MA Experiment 20000173 PARAMETER Experiment Name: At_42deg_Heat_P Parameter: Temperature (deg C) Value: 42 vs. 22
  misc_feature: MA Experiment 20000173 PARAMETER Experiment Name: At_42deg_Heat_P Parameter: Timepoint (hr) Value: 6
  misc_feature: MA Experiment 20000173 PARAMETER Experiment Name: At_42deg_Heat_P Parameter: Tissue Value: Aerial
  misc_feature: MA Experiment ID: 20000180 Result: Down-regulated in Transcription
  misc_feature: MA Experiment 20000180 PARAMETER Experiment Name: At_Germinating_Seeds_P Parameter: Age (hr) Value: 24 vs. 0
  misc_feature: MA Experiment 20000180 PARAMETER Experiment Name: At_Germinating_Seeds_P Parameter: Tissue Value: Germinating Seeds
  misc_feature: MA Experiment ID: 20000227 Result: Up-regulated in Transcription
  misc_feature: MA Experiment 20000227 PARAMETER Experiment Name: At_Root-Tips-vs-Tops_P Parameter: Tissue Value: Root Tips vs. Root Tops
  misc_feature: MA Experiment ID: 20000794 Result: Down-regulated in Transcription
  misc_feature: MA Experiment 20000794 PARAMETER Experiment Name: At_Petals_P Parameter: Age (day) Value: 23-25 days
  misc_feature: MA Experiment 20000794 PARAMETER Experiment Name: At_Petals_P Parameter: Plant Line Value: WS
  misc_feature: MA Experiment 20000794 PARAMETER Experiment Name: At_Petals_P Parameter: Tissue Value: Petals vs. Whole plant
  misc_feature: MA Experiment ID: 20001247 Result: Down-regulated in Transcription
  misc_feature: MA Experiment 20001247 PARAMETER Experiment Name: At_Far-red-induction_P Parameter: Age (day) Value: 7
  misc_feature: MA Experiment 20001247 PARAMETER Experiment Name: At_Far-red-induction_P Parameter: Light Value: Far-red vs. White
  misc_feature: MA Experiment 20001247 PARAMETER Experiment Name: At_Far-red-induction_P Parameter: Organism Value: A. thaliana
  misc_feature: MA Experiment 20001247 PARAMETER Experiment Name: At_Far-red-induction_P Parameter: Plant Line Value: Columbia
  misc_feature: MA Experiment 20001247 PARAMETER Experiment Name: At_Far-red-induction_P Parameter: Timepoint (hr) Value: 1
  misc_feature: MA Experiment 20001247 PARAMETER Experiment Name: At_Far-red-induction_P Parameter: Tissue Value: Whole Plant
  misc_feature: MA Experiment ID: 20001557 Result: Up-regulated in Transcription
  misc_feature: MA Experiment 20001557 PARAMETER Experiment Name: At_Drought_Soil_Dry_P Parameter: Age (day) Value: 27
  misc_feature: MA Experiment 20001557 PARAMETER Experiment Name: At_Drought_Soil_Dry_P Parameter: Organism Value: A. thaliana
  misc_feature: MA Experiment 20001557 PARAMETER Experiment Name: At_Drought_Soil_Dry_P Parameter: Plant Line Value: WS
  misc_feature: MA Experiment 20001557 PARAMETER Experiment Name: At_Drought_Soil_Dry_P Parameter: Post Timepoint (hr) Value: 3
  misc_feature: MA Experiment 20001557 PARAMETER Experiment Name: At_Drought_Soil_Dry_P Parameter: Post-Treatment Value: Re-Water vs. No Drought
  misc_feature: MA Experiment 20001557 PARAMETER Experiment Name: At_Drought_Soil_Dry_P Parameter: Timepoint (day) Value: 13
  misc_feature: MA Experiment 20001557 PARAMETER Experiment Name: At_Drought_Soil_Dry_P Parameter: Treatment Value: Drought vs. No Drought
  misc_feature: MA Experiment ID: 20001558 Result: Up-regulated in Transcription
  misc_feature: MA Experiment 20001558 PARAMETER Experiment Name: At_Drought_Soil_Dry_P Parameter: Age (day) Value: 27
  misc_feature: MA Experiment 20001558 PARAMETER Experiment Name: At_Drought_Soil_Dry_P Parameter: Organism Value: A. thaliana
  misc_feature: MA Experiment 20001558 PARAMETER Experiment Name: At_Drought_Soil_Dry_P Parameter: Plant Line Value: WS
  misc_feature: MA Experiment 20001558 PARAMETER Experiment Name: At_Drought_Soil_Dry_P Parameter: Post Timepoint (hr) Value: 6
  misc_feature: MA Experiment 20001558 PARAMETER Experiment Name: At_Drought_Soil_Dry_P Parameter: Post-Treatment Value: Re-Water vs. No Drought
  misc_feature: MA Experiment 20001558 PARAMETER Experiment Name: At_Drought_Soil_Dry_P Parameter: Timepoint (day) Value: 13
  misc_feature: MA Experiment 20001558 PARAMETER Experiment Name: At_Drought_Soil_Dry_P Parameter: Treatment Value: Drought vs. No Drought
  misc_feature: MA Experiment ID: 20001560 Result: Up-regulated in Transcription
  misc_feature: MA Experiment 20001560 PARAMETER Experiment Name: At_Drought_Soil_Dry_P Parameter: Age (day) Value: 28
  misc_feature: MA Experiment 20001560 PARAMETER Experiment Name: At_Drought_Soil_Dry_P Parameter: Organism Value: A. thaliana
  misc_feature: MA Experiment 20001560 PARAMETER Experiment Name: At_Drought_Soil_Dry_P Parameter: Plant Line Value: WS
  misc_feature: MA Experiment 20001560 PARAMETER Experiment Name: At_Drought_Soil_Dry_P Parameter: Post Timepoint (hr) Value: None
  misc_feature: MA Experiment 20001560 PARAMETER Experiment Name: At_Drought_Soil_Dry_P Parameter: Post-Treatment Value: None
  misc_feature: MA Experiment 20001560 PARAMETER Experiment Name: At_Drought_Soil_Dry_P Parameter: Timepoint (day) Value: 14
  misc_feature: MA Experiment 20001560 PARAMETER Experiment Name: At_Drought_Soil_Dry_P Parameter: Treatment Value: Drought vs. No Drought
  misc_feature: MA Experiment ID: 20001757 Result: Up-regulated in Transcription
  misc_feature: MA Experiment 20001757 PARAMETER Experiment Name: At_50mM_NH4NO3_L-to-H_P Parameter: Timepoint (hr) Value: 6
  misc_feature: MA Experiment 20001757 PARAMETER Experiment Name: At_50mM_NH4NO3_L-to-H_P Parameter: Tissue Value: Leaf
  misc_feature: MA Experiment 20001757 PARAMETER Experiment Name: At_50mM_NH4NO3_L-to-H_P Parameter: Treatment Value: 50mM NH4NO3 vs 100mM Mannitol
aattctctccttcgaagtttttttcttgtgaggtcagaaaagaaaatgggaagtcaacaagcagcgatttcgtttctgacgaacttggcgaaggcggcgtttgggttaggtgtggcggcgacggcactaaactcgtcgctctacactgttgatggtggcgagagagctgttttgttcgatcgattcaggggagtgttggatcagaccgtcggcgaagggactcatttcttgatcccgtatctccagacgccgcacatatacgatattcgtacgaaacctcacactttctcctccaaatctggtactaaggatcttcagatggttaatctcacccttcgtgttctctttcgccctgaggtttctcgtctcccgtacattttccaaacattgggtcttgaatacgatgagaaggttcttccatcgattggaaatgaggtcttgaaagctgtggttgctaatttcaatgctgatcagctcctcactgagcgtcctcaagtatcagcacttgttcgtgaggctcttatcaagcgtgccagggaatttaacattgagctcgacgacatagccattactcacttatcgtacggtgctgagttctcgagggcagtggaggcgaagcaagtggctcagcaggaagctgaaaggtcaaagtttgtggtgatgaaggctgatcaagagaggagagctgcggttataagagcagaaggtgagagtgaagctgctcagttgatatcagatgcaacagctaaagcaggaatgggactaattgagcttaggaggattgaagcttcaagggaggttgcggctactctggctaggtctccgaacgtggcttacttacctggtggacaaagcatgctctttaatctgaaccctggtcgttgagctataacattggtgggaagaggagcttcagtggagacaaaacgacggagctgtgaagtttattaacgttgatgctcttttatttttgatgaacacaatgtgaaaaaagataattgttttgagccgttctatcttttctgactctagaagtaaagactatgccattgttgtcgaaacccgatcattccaatgaaaggcttcaccaaaaaatctaccataacaatagtcgaaatttgtattgtcaaaaacaatttccaacaccaaggttgttgtacttgtattatttaaaatataaatc

SEQ ID NO: 22538 - protein, 294 aa, Arabidopsis thaliana
  peptide (1)..(294): Ceres Seq. ID no. 12335040
  misc_feature (29)..(285): Homolog of NCBI NO: 6321571 NR Description: antiproliferative protein involved in
  misc_feature (22)..(284): Homolog of NCBI NO: 40746306 NR Description: conserved hypothetical protein [Aspergillus
  misc_feature (16)..(291): Homolog of NCBI NO: 38567717 NR Description: B1358B12.15 [Oryza sativa (japonica
  misc_feature (17)..(294): Homolog of NCBI NO: 7716460 NR Description: prohibitin [Zea mays]
  misc_feature (16)..(291): Homolog of NCBI NO: 7716458 NR Description: prohibitin [Zea mays]
  misc_feature (16)..(294): Homolog of NCBI NO: 7489185 NR Description: prohibitin - common tobacco
  misc_feature (16)..(291): Homolog of NCBI NO: 15237488 NR Description: prohibitin (gb|AAC49691.1)
  misc_feature (16)..(294): Homolog of NCBI NO: 27765032 NR Description: At3g27280 [Arabidopsis thaliana]
  misc_feature (16)..(294): Homolog of NCBI NO: 15232129 NR Description: prohibitin, putative
  misc_feature (16)..(294): Homolog of NCBI NO: 21592895 NR Description: prohibitin, putative [Arabidopsis thaliana]
NSLLRSFFLVRSEKKMGSQQAAISFLTNLAKAAFGLGVAATALNSSLYTVDGGERAVLFDRFRGVLDQTVGEGTHFLIPYLQTPHIYDIRTKPHTFSSKSGTKDLQMVNLTLRVLFRPEVSRLPYIFQTLGLEYDEKVLPSIGNEVLKAVVANFNADQLLTERPQVSALVREALIKRAREFNIELDDIAITHLSYGAEFSRAVEAKQVAQQEAERSKFVVMKADQERRAAVIRAEGESEAAQLISDATAKAGMGLIELRRIEASREVAATLARSPNVAYLPGGQSMLFNLNPGR

SEQ ID NO: 22539 - protein, 279 aa, Arabidopsis thaliana
  peptide (1)..(279): Ceres Seq. ID no. 12335041
  misc_feature (1)..(279): Homolog of NCBI NO: 27765032 NR Description: At3g27280 [Arabidopsis thaliana]
  misc_feature (1)..(279): Homolog of NCBI NO: 15232129 NR Description: prohibitin, putative
  misc_feature (1)..(279): Homolog of NCBI NO: 21592895 NR Description: prohibitin, putative [Arabidopsis thaliana]
  misc_feature (14)..(270): Homolog of NCBI NO: 6321571 NR Description: antiproliferative protein involved in
  misc_feature (7)..(269): Homolog of NCBI NO: 40746306 NR Description: conserved hypothetical protein [Aspergillus
  misc_feature (1)..(276): Homolog of NCBI NO: 38567717 NR Description: B1358B12.15 [Oryza sativa (japonica
  misc_feature (2)..(279): Homolog of NCBI NO: 7716460 NR Description: prohibitin [Zea mays]
  misc_feature (1)..(276): Homolog of NCBI NO: 7716458 NR Description: prohibitin [Zea mays]
  misc_feature (1)..(279): Homolog of NCBI NO: 7489185 NR Description: prohibitin - common tobacco
  misc_feature (1)..(276): Homolog of NCBI NO: 15237488 NR Description: prohibitin (gb|AAC49691.1)
MGSQQAAISFLTNLAKAAFGLGVAATALNSSLYTVDGGERAVLFDRFRGVLDQTVGEGTHFLIPYLQTPHIYDIRTKPHTFSSKSGTKDLQMVNLTLRVLFRPEVSRLPYIFQTLGLEYDEKVLPSIGNEVLKAVVANFNADQLLTERPQVSALVREALIKRAREFNIELDDIAITHLSYGAEFSRAVEAKQVAQQEAERSKFVVMKADQERRAAVIRAEGESEAAQLISDATAKAGMGLIELRRIEASREVAATLARSPNVAYLPGGQSMLFNLNPGR

SEQ ID NO: 22540 - protein, 188 aa, Arabidopsis thaliana
  peptide (1)..(188): Ceres Seq. ID no. 12335042
  misc_feature (1)..(179): Homolog of NCBI NO: 6321571 NR Description: antiproliferative protein involved in
  misc_feature (1)..(178): Homolog of NCBI NO: 40746306 NR Description: conserved hypothetical protein [Aspergillus
  misc_feature (1)..(185): Homolog of NCBI NO: 38567717 NR Description: B1358B12.15 [Oryza sativa (japonica
  misc_feature (1)..(188): Homolog of NCBI NO: 7716460 NR Description: prohibitin [Zea mays]
  misc_feature (1)..(185): Homolog of NCBI NO: 7716458 NR Description: prohibitin [Zea mays]
  misc_feature (1)..(188): Homolog of NCBI NO: 7489185 NR Description: prohibitin - common tobacco
  misc_feature (1)..(185): Homolog of NCBI NO: 15237488 NR Description: prohibitin (gb|AAC49691.1)
  misc_feature (1)..(188): Homolog of NCBI NO: 27765032 NR Description: At3g27280 [Arabidopsis thaliana]
  misc_feature (1)..(188): Homolog of NCBI NO: 15232129 NR Description: prohibitin, putative
  misc_feature (1)..(188): Homolog of NCBI NO: 21592895 NR Description: prohibitin, putative [Arabidopsis thaliana]
MVNLTLRVLFRPEVSRLPYIFQTLGLEYDEKVLPSIGNEVLKAVVANFNADQLLTERPQVSALVREALIKRAREFNIELDDIAITHLSYGAEFSRAVEAKQVAQQEAERSKFVVMKADQERRAAVIRAEGESEAAQLISDATAKAGMGLIELRRIEASREVAATLARSPNVAYLPGGQSMLFNLNPGR

SEQ ID NO: 22541 - DNA, 930 bp, Arabidopsis thaliana
  misc_feature (1)..(930): Ceres Seq. ID no. 12334665
  misc_feature: MA Experiment ID: 108434 Result: Up-regulated in Transcription
  misc_feature: MA Experiment 108434 PARAMETER Experiment Name: At_Root_Tips_cDNA_P Parameter: Tissue Value: Root Tips
  misc_feature: MA Experiment ID: 108488 Result: Down-regulated in Transcription
  misc_feature: MA Experiment ID: 108579 Result: Down-regulated in Transcription
  misc_feature: MA Experiment 108579 PARAMETER Experiment Name: At_4deg_Cold_cDNA_P Parameter: Temperature (deg C) Value: 4 vs. 22
  misc_feature: MA Experiment 108579 PARAMETER Experiment Name: At_4deg_Cold_cDNA_P Parameter: Timepoint (hr) Value: 6
  misc_feature: MA Experiment 108579 PARAMETER Experiment Name: At_4deg_Cold_cDNA_P Parameter: Tissue Value: Aerial
  misc_feature: MA Experiment ID: 20000184 Result: Down-regulated in Transcription
  misc_feature: MA Experiment 20000184 PARAMETER Experiment Name: At_Shoots__P Parameter: Age (day) Value: 7
  misc_feature: MA Experiment 20000184 PARAMETER Experiment Name: At_Shoots__P Parameter: Tissue Value: Shoots vs. Whole Plant
  misc_feature: MA Experiment ID: 20000794 Result: Up-regulated in Transcription
  misc_feature: MA Experiment 20000794 PARAMETER Experiment Name: At_Petals_P Parameter: Age (day) Value: 23-25 days
  misc_feature: MA Experiment 20000794 PARAMETER Experiment Name: At_Petals_P Parameter: Plant Line Value: WS
  misc_feature: MA Experiment 20000794 PARAMETER Experiment Name: At_Petals_P Parameter: Tissue Value: Petals vs. Whole plant
aaataacgaattcgattttaaccggaaactgaaccggaagctgagtctcgtgcctgccttctctaggcttctttgtttccgatcagaatctcgagctcaactgtcaaaactagccgaccactaagtcgttgtcctaactttctctctgttcctcatcgaacattattgggaggagagagagagagagaagaacaagaaacaacgagaatagatcggaggattttgtcggaaccagaaggaggaagatgggagatatctggacatggcttatttccttcttcttcctcatcgctcttgtcggaatcatcgtctatcagcttgtttgcttagcggatctcgagtttgattatatcaacccttacgactctgcgtcgagaataaactcagtggttttaccggagttcattgttcaaggagttctatgcgtattctacctcctaacaggacactggttcatgacactcttatgtctcccctatctctactacaatttccatctttactcgaagcgacaacacttagtagatgtcaccgagatcttcaatttgctaaactgggagaagaagaaacggctgttcaagcttgcttacattgtccttaacctctttctcactatcttctggatgatttattcggcgctggatgattacgaggactgactaatgaagaagacatggtccatcttcttcggtttattgacactacgcttaaagatacagcgacatgctcgtggacgaaaaaaagcaaggaaaagtgtttgctttgtgatgtttgtaagattagtggcaggaagatttgtgtatttatttatttcttagaaacatgttcagattaactgttttttttttatcttatgtcttgatcattatttgtacaagcaatcaagctcgtaaactactggttacagtaacaatgaaactgaatattttc

SEQ ID NO: 22542 - protein, 137 aa, Arabidopsis thaliana
  peptide (1)..(137): Ceres Seq. ID no. 12334666
  misc_feature (3)..(126): Pfam Name: Cornichon protein Pfam Description: Cornichon protein
  misc_feature (2)..(134): Homolog of NCBI NO: 40743186 NR Description: conserved hypothetical protein [Aspergillus
  misc_feature (3)..(125): Homolog of NCBI NO: 9294117 NR Description: gene_id:T23B7.14~pir||T06616~similar to unknown
  misc_feature (3)..(137): Homolog of NCBI NO: 15230426 NR Description: unknown protein; protein id: At3g12180.1
  misc_feature (24)..(134): Homolog of NCBI NO: 15234412 NR Description: putative protein; protein id: At4g12090.1
  misc_feature (22)..(116): Homolog of NCBI NO: 8778623 NR Description: F5O11.7 [Arabidopsis thaliana]
  misc_feature (1)..(126): Homolog of NCBI NO: 8778625 NR Description: F5O11.11 [Arabidopsis thaliana]
  misc_feature (22)..(126): Homolog of NCBI NO: 18391380 NR Description: hypothetical protein; protein id: At1g12340.1
  misc_feature (1)..(126): Homolog of NCBI NO: 25336823 NR Description: hypothetical protein F16P17.3 [imported] -
  misc_feature (1)..(137): Homolog of NCBI NO: 15221614 NR Description: unknown protein; protein id: At1g62880.1
  misc_feature (1)..(137): Homolog of NCBI NO: 30682747 NR Description: expressed protein [Arabidopsis thaliana]
MGDIWTWLISFFFLIALVGIIVYQLVCLADLEFDYINPYDSASRINSVVLPEFIVQGVLCVFYLLTGHWFMTLLCLPYLYYNFHLYSKRQHLVDVTEIFNLLNWEKKKRLFKLAYIVLNLFLTIFWMIYSALDDYED

SEQ ID NO: 22543 - DNA, 1652 bp, Arabidopsis thaliana
  misc_feature (1)..(1652): Ceres Seq. ID no. 13487639
  misc_feature: MA Experiment ID: 108434 Result: Up-regulated in Transcription
  misc_feature: MA Experiment 108434 PARAMETER Experiment Name: At_Root_Tips_cDNA_P Parameter: Tissue Value: Root Tips
  misc_feature: MA Experiment ID: 108569 Result: Up-regulated in Transcription
  misc_feature: MA Experiment 108569 PARAMETER Experiment Name: At_0.001%_MeJA__cDNA_P Parameter: Timepoint (hr) Value: 6
  misc_feature: MA Experiment 108569 PARAMETER Experiment Name: At_0.001%_MeJA__cDNA_P Parameter: Tissue Value: Aerial
  misc_feature: MA Experiment 108569 PARAMETER Experiment Name: At_0.001%_MeJA__cDNA_P Parameter: Treatment Value: 0.001% MeJA vs. No Treatment
  misc_feature: MA Experiment ID: 20000214 Result: Down-regulated in Transcription
  misc_feature: MA Experiment 20000214 PARAMETER Experiment Name: At_4deg_Cold_P Parameter: Timepoint (hr) Value: 6
  misc_feature: MA Experiment ID: 20001248 Result: Up-regulated in Transcription
  misc_feature: MA Experiment 20001248 PARAMETER Experiment Name: At_Far-red-induction_P Parameter: Age (day) Value: 7
  misc_feature: MA Experiment 20001248 PARAMETER Experiment Name: At_Far-red-induction_P Parameter: Light Value: Far-red vs. White
  misc_feature: MA Experiment 20001248 PARAMETER Experiment Name: At_Far-red-induction_P Parameter: Organism Value: A. thaliana
  misc_feature: MA Experiment 20001248 PARAMETER Experiment Name: At_Far-red-induction_P Parameter: Plant Line Value: Columbia
  misc_feature: MA Experiment 20001248 PARAMETER Experiment Name: At_Far-red-induction_P Parameter: Timepoint (hr) Value: 4
  misc_feature: MA Experiment 20001248 PARAMETER Experiment Name: At_Far-red-induction_P Parameter: Tissue Value: Whole Plant
  misc_feature: MA Experiment ID: 20001451 Result: Down-regulated in Transcription
  misc_feature: MA Experiment 20001451 PARAMETER Experiment Name: At_Far-red-induction_P Parameter: Age (day) Value: 7
  misc_feature: MA Experiment 20001451 PARAMETER Experiment Name: At_Far-red-induction_P Parameter: Light Value: Far-red vs. White
  misc_feature: MA Experiment 20001451 PARAMETER Experiment Name: At_Far-red-induction_P Parameter: Organism Value: A. thaliana
  misc_feature: MA Experiment 20001451 PARAMETER Experiment Name: At_Far-red-induction_P Parameter: Plant Line Value: Columbia
  misc_feature: MA Experiment 20001451 PARAMETER Experiment Name: At_Far-red-induction_P Parameter: Timepoint (hr) Value: 24
  misc_feature: MA Experiment 20001451 PARAMETER Experiment Name: At_Far-red-induction_P Parameter: Tissue Value: Whole Plant
aaaagaagcttcttcaccttgtctcttttcacagtctcacacagcatagaaataatcgaaagatttctttttaaaatctgggatttgttttttttgttcattgatcattttcgattgttagagaagaatcaaatggcgatggctatggatcggatcgtcttctccccttcatcttacgtctatcgtccttgtcaagctaggggatccagatcttccagagtttccatggcttctacgattcgctctgcgactacagaggttacgaatggaaggaaactgtatatccctcccagagaggtgcatgtccaagtcaaacattcaatgccgccacaaaagttagatatctttaagtctttagaaggatgggctgatgaaaccctgttgacttatttaaaacctgttgagaaatcgtggcagcctaccgattttcttcccgaacctgagtcggaaggattctatgaccaagtcaaggagctaagggaaaggtgcaaggaacttcctgatgactattttgtggtgcttgttggggatatgatcactgaagaagcacttcctacttaccagaccatgttgaacacattggatggtgttagggatgagacaggagctagtcctactccttgggctatatggaccagggcttggactgctgaggagaatagacatggggatctccttaacaagtatctttatctgtctggtcgggtagacatgaggcagattgaaaagactattcagtacctgattggttctggaatggatccaaaaactgaaaacaacccttacttgggtttcatctacacatcatttcaagaaagagcgaccttcatctcccatggaaacactgccagactggcgaaagatcgtggagatttgaaacttgcgcagatatgcgggaccattgctgctgatgagaggcgtcatgagactgcttacaccaagattgtagagaagctctttgaaattgaccctgatggcacgatcttgggcctggctgatatgatgaagaaaaagatatcaatgcctgcacatttaatgtatgatggccaagatgataacctgtttgagcacttctcaaccgttgcccagaggctcggtgtctacactgccaaggactatgctgatattctggagtttcttgttgaacggtggaatgtggagactttgacagacctttctagtgaaggacacagggcccaggactttgtctgcggactacctgcaagaatccgtaaaattgaagagagagctcaaggaagagccaaagaagctgccaaaaacataccattcagctggatatttggtcgaaatatcagggcttaagaagtttactacacaattctctttccaattatcccaagtaagtcataaaggtcttcaccaaccatttcaccaatgaaggaccagtttttaagaccacgaaagttcatttgaatgtgttttgttttatacggaacattgtagataaagttatgtggttaggttatgtttcttgtttgaatcagtcaagaccaaagaaaatgtgtttgagtgttcttagatattgtatggtttaccaagaacaagacttaagattttcctttacctttttgattctctttttgttgtatcagtctaaagaatgttctctcttaaataaagagtggtttggc

SEQ ID NO: 22544 - protein, 440 aa, Arabidopsis thaliana
  peptide (1)..(440): Ceres Seq. ID no. 13487640
  misc_feature (55)..(439): Homolog of NCBI NO: 417820 NR Description: Acyl-
  misc_feature (55)..(439): Homolog of NCBI NO: 100145 NR Description: acyl-
  misc_feature (45)..(438): Homolog of NCBI NO: 3355634 NR Description: stearoyl-acyl carrier protein desaturase [Linum
  misc_feature (45)..(439): Homolog of NCBI NO: 3915030 NR Description: Acyl-
  misc_feature (45)..(438): Homolog of NCBI NO: 3355632 NR Description: stearoyl-acyl carrier protein desaturase [Linum
  misc_feature (45)..(440): Homolog of NCBI NO: 15237308 NR Description: acyl-
  misc_feature (45)..(440): Homolog of NCBI NO: 21593675 NR Description: stearoyl-acyl carrier protein desaturase
  misc_feature (45)..(440): Homolog of NCBI NO: 21592896 NR Description: putative stearoyl-acyl carrier protein desaturase
  misc_feature (45)..(440): Homolog of NCBI NO: 15232943 NR Description: acyl-
  misc_feature (45)..(440): Homolog of NCBI NO: 20466636 NR Description: putative stearoyl-acyl carrier protein desaturase
KRSFFTLSLFTVSHSIEIIERFLFKIWDLFFLFIDHFRLLEKNQMAMAMDRIVFSPSSYVYRPCQARGSRSSRVSMASTIRSATTEVTNGRKLYIPPREVHVQVKHSMPPQKLDIFKSLEGWADETLLTYLKPVEKSWQPTDFLPEPESEGFYDQVKELRERCKELPDDYFVVLVGDMITEEALPTYQTMLNTLDGVRDETGASPTPWAIWTRAWTAEENRHGDLLNKYLYLSGRVDMRQIEKTIQYLIGSGMDPKTENNPYLGFIYTSFQERATFISHGNTARLAKDRGDLKLAQICGTIAADERRHETAYTKIVEKLFEIDPDGTILGLADMMKKKISMPAHLMYDGQDDNLFEHFSTVAQRLGVYTAKDYADILEFLVERWNVETLTDLSSEGHRAQDFVCGLPARIRKIEERAQGRAKEAAKNIPFSWIFGRNIRA

SEQ ID NO: 22545 - protein, 396 aa, Arabidopsis thaliana
  peptide (1)..(396): Ceres Seq. ID no. 13487641
  misc_feature (11)..(395): Homolog of NCBI NO: 417820 NR Description: Acyl-
  misc_feature (11)..(395): Homolog of NCBI NO: 100145 NR Description: acyl-
  misc_feature (1)..(394): Homolog of NCBI NO: 3355634 NR Description: stearoyl-acyl carrier protein desaturase [Linum
  misc_feature (1)..(395): Homolog of NCBI NO: 3915030 NR Description: Acyl-
  misc_feature (1)..(394): Homolog of NCBI NO: 3355632 NR Description: stearoyl-acyl carrier protein desaturase [Linum
  misc_feature (1)..(396): Homolog of NCBI NO: 15237308 NR Description: acyl-
  misc_feature (1)..(396): Homolog of NCBI NO: 21593675 NR Description: stearoyl-acyl carrier protein desaturase
  misc_feature (1)..(396): Homolog of NCBI NO: 21592896 NR Description: putative stearoyl-acyl carrier protein desaturase
  misc_feature (1)..(396): Homolog of NCBI NO: 15232943 NR Description: acyl-
  misc_feature (1)..(396): Homolog of NCBI NO: 20466636 NR Description: putative stearoyl-acyl carrier protein desaturase
MAMAMDRIVFSPSSYVYRPCQARGSRSSRVSMASTIRSATTEVTNGRKLYIPPREVHVQVKHSMPPQKLDIFKSLEGWADETLLTYLKPVEKSWQPTDFLPEPESEGFYDQVKELRERCKELPDDYFVVLVGDMITEEALPTYQTMLNTLDGVRDETGASPTPWAIWTRAWTAEENRHGDLLNKYLYLSGRVDMRQIEKTIQYLIGSGMDPKTENNPYLGFIYTSFQERATFISHGNTARLAKDRGDLKLAQICGTIAADERRHETAYTKIVEKLFEIDPDGTILGLADMMKKKISMPAHLMYDGQDDNLFEHFSTVAQRLGVYTAKDYADILEFLVERWNVETLTDLSSEGHRAQDFVCGLPARIRKIEERAQGRAKEAAKNIPFSWIFGRNIRA

SEQ ID NO: 22546 - protein, 394 aa, Arabidopsis thaliana
  peptide (1)..(394): Ceres Seq. ID no. 13487642
  misc_feature (9)..(393): Homolog of NCBI NO: 417820 NR Description: Acyl-
  misc_feature (9)..(393): Homolog of NCBI NO: 100145 NR Description: acyl-
  misc_feature (1)..(392): Homolog of NCBI NO: 3355634 NR Description: stearoyl-acyl carrier protein desaturase [Linum
  misc_feature (1)..(393): Homolog of NCBI NO: 3915030 NR Description: Acyl-
  misc_feature (1)..(392): Homolog of NCBI NO: 3355632 NR Description: stearoyl-acyl carrier protein desaturase [Linum
  misc_feature (1)..(394): Homolog of NCBI NO: 15237308 NR Description: acyl-
  misc_feature (1)..(394): Homolog of NCBI NO: 21593675 NR Description: stearoyl-acyl carrier protein desaturase
  misc_feature (1)..(394): Homolog of NCBI NO: 21592896 NR Description: putative stearoyl-acyl carrier protein desaturase
  misc_feature (1)..(394): Homolog of NCBI NO: 15232943 NR Description: acyl-
  misc_feature (1)..(394): Homolog of NCBI NO: 20466636 NR Description: putative stearoyl-acyl carrier protein desaturase
MAMDRIVFSPSSYVYRPCQARGSRSSRVSMASTIRSATTEVTNGRKLYIPPREVHVQVKHSMPPQKLDIFKSLEGWADETLLTYLKPVEKSWQPTDFLPEPESEGFYDQVKELRERCKELPDDYFVVLVGDMITEEALPTYQTMLNTLDGVRDETGASPTPWAIWTRAWTAEENRHGDLLNKYLYLSGRVDMRQIEKTIQYLIGSGMDPKTENNPYLGFIYTSFQERATFISHGNTARLAKDRGDLKLAQICGTIAADERRHETAYTKIVEKLFEIDPDGTILGLADMMKKKISMPAHLMYDGQDDNLFEHFSTVAQRLGVYTAKDYADILEFLVERWNVETLTDLSSEGHRAQDFVCGLPARIRKIEERAQGRAKEAAKNIPFSWIFGRNIRA

SEQ ID NO: 22547 - DNA, 1274 bp, Arabidopsis thaliana
  misc_feature (1)..(1274): Ceres Seq. ID no. 13491491
  misc_feature: MA Experiment ID: 108488 Result: Down-regulated in Transcription
  misc_feature: MA Experiment ID: 108501 Result: Up-regulated in Transcription
  misc_feature: MA Experiment 108501 PARAMETER Experiment Name: At_ap2_floral_buds_cDNA_P Parameter: Plant Line Value: ap2 (Ler.)
  misc_feature: MA Experiment 108501 PARAMETER Experiment Name: At_ap2_floral_buds_cDNA_P Parameter: Tissue Value: Closed Flower
  misc_feature: MA Experiment ID: 20000173 Result: Down-regulated in Transcription
  misc_feature: MA Experiment 20000173 PARAMETER Experiment Name: At_42deg_Heat_P Parameter: Age (day) Value: 14
  misc_feature: MA Experiment 20000173 PARAMETER Experiment Name: At_42deg_Heat_P Parameter: Organism Value: A. thaliana
  misc_feature: MA Experiment 20000173 PARAMETER Experiment Name: At_42deg_Heat_P Parameter: Plant Line Value: WS
  misc_feature: MA Experiment 20000173 PARAMETER Experiment Name: At_42deg_Heat_P Parameter: Temperature (deg C) Value: 42 vs. 22
  misc_feature: MA Experiment 20000173 PARAMETER Experiment Name: At_42deg_Heat_P Parameter: Timepoint (hr) Value: 6
  misc_feature: MA Experiment 20000173 PARAMETER Experiment Name: At_42deg_Heat_P Parameter: Tissue Value: Aerial
  misc_feature: MA Experiment ID: 20000227 Result: Up-regulated in Transcription
  misc_feature: MA Experiment 20000227 PARAMETER Experiment Name: At_Root-Tips-vs-Tops_P Parameter: Tissue Value: Root Tips vs. Root Tops
  misc_feature: MA Experiment ID: 20000234 Result: Up-regulated in Transcription
  misc_feature: MA Experiment 20000234 PARAMETER Experiment Name: At_Siliques_P Parameter: Age (day) Value: 21
  misc_feature: MA Experiment 20000234 PARAMETER Experiment Name: At_Siliques_P Parameter: Organism Value: A. thaliana
  misc_feature: MA Experiment 20000234 PARAMETER Experiment Name: At_Siliques_P Parameter: Plant Line Value: WS
  misc_feature: MA Experiment 20000234 PARAMETER Experiment Name: At_Siliques_P Parameter: Tissue Value: Less Than 5mm Siliques vs. Whole Plant
  misc_feature: MA Experiment ID: 20000235 Result: Up-regulated in Transcription
  misc_feature: MA Experiment 20000235 PARAMETER Experiment Name: At_Siliques_P Parameter: Age (day) Value: 21
  misc_feature: MA Experiment 20000235 PARAMETER Experiment Name: At_Siliques_P Parameter: Organism Value: A. thaliana
  misc_feature: MA Experiment 20000235 PARAMETER Experiment Name: At_Siliques_P Parameter: Plant Line Value: WS
  misc_feature: MA Experiment 20000235 PARAMETER Experiment Name: At_Siliques_P Parameter: Tissue Value: 5-10mm Siliques vs. Whole Plant
  misc_feature: MA Experiment ID: 20000264 Result: Up-regulated in Transcription
  misc_feature: MA Experiment 20000264 PARAMETER Experiment Name: At_Open_Flower_P Parameter: Age (day) Value: 21
  misc_feature: MA Experiment 20000264 PARAMETER Experiment Name: At_Open_Flower_P Parameter: Plant Line Value: WS
  misc_feature: MA Experiment 20000264 PARAMETER Experiment Name: At_Open_Flower_P Parameter: Tissue Value: Open Flower vs. Whole Plant
  misc_feature: MA Experiment ID: 20000265 Result: Up-regulated in Transcription
  misc_feature: MA Experiment 20000265 PARAMETER Experiment Name: At_Open_Flower_P Parameter: Age (day) Value: 21
  misc_feature: MA Experiment 20000265 PARAMETER Experiment Name: At_Open_Flower_P Parameter: Plant Line Value: WS
  misc_feature: MA Experiment 20000265 PARAMETER Experiment Name: At_Open_Flower_P Parameter: Tissue Value: Closed Flower vs. Whole Plant
  misc_feature: MA Experiment ID: 20000286 Result: Up-regulated in Transcription
  misc_feature: MA Experiment 20000286 PARAMETER Experiment Name: At_Open_Flower_P Parameter: Age (day) Value: 21
  misc_feature: MA Experiment 20000286 PARAMETER Experiment Name: At_Open_Flower_P Parameter: Plant Line Value: WS
  misc_feature: MA Experiment 20000286 PARAMETER Experiment Name: At_Open_Flower_P Parameter: Tissue Value: Half Open vs. Whole Plant
  misc_feature: MA Experiment ID: 20000436 Result: Up-regulated in Transcription
  misc_feature: MA Experiment 20000436 PARAMETER Experiment Name: At_Drought_P Parameter: Age (day) Value: 7
  misc_feature: MA Experiment 20000436 PARAMETER Experiment Name: At_Drought_P Parameter: Organism Value: A. thaliana
  misc_feature: MA Experiment 20000436 PARAMETER Experiment Name: At_Drought_P Parameter: Plant Line Value: WS
  misc_feature: MA Experiment 20000436 PARAMETER Experiment Name: At_Drought_P Parameter: Timepoint (hr) Value: 12
  misc_feature: MA Experiment 20000436 PARAMETER Experiment Name: At_Drought_P Parameter: Tissue Value: Whole Plant
  misc_feature: MA Experiment 20000436 PARAMETER Experiment Name: At_Drought_P Parameter: Treatment Value: Drought vs. No Drought
  misc_feature: MA Experiment ID: 20000437 Result: Up-regulated in Transcription
  misc_feature: MA Experiment 20000437 PARAMETER Experiment Name: At_Drought_P Parameter: Age (day) Value: 8
  misc_feature: MA Experiment 20000437 PARAMETER Experiment Name: At_Drought_P Parameter: Organism Value: A. thaliana
  misc_feature: MA Experiment 20000437 PARAMETER Experiment Name: At_Drought_P Parameter: Plant Line Value: WS
  misc_feature: MA Experiment 20000437 PARAMETER Experiment Name: At_Drought_P Parameter: Timepoint (hr) Value: 24
  misc_feature: MA Experiment 20000437 PARAMETER Experiment Name: At_Drought_P Parameter: Tissue Value: Whole Plant
  misc_feature: MA Experiment 20000437 PARAMETER Experiment Name: At_Drought_P Parameter: Treatment Value: Drought vs. No Drought
  misc_feature: MA Experiment ID: 20000453 Result: Up-regulated in Transcription
  misc_feature: MA Experiment 20000453 PARAMETER Experiment Name: At_100uM_ABA_P Parameter: Age (day) Value: 15
  misc_feature: MA Experiment 20000453 PARAMETER Experiment Name: At_100uM_ABA_P Parameter: Organism Value: A. thaliana
  misc_feature: MA Experiment 20000453 PARAMETER Experiment Name: At_100uM_ABA_P Parameter: Plant Line Value: WS
  misc_feature: MA Experiment 20000453 PARAMETER Experiment Name: At_100uM_ABA_P Parameter: Timepoint (hr) Value: 24
  misc_feature: MA Experiment 20000453 PARAMETER Experiment Name: At_100uM_ABA_P Parameter: Tissue Value: Aerial
  misc_feature: MA Experiment 20000453 PARAMETER Experiment Name: At_100uM_ABA_P Parameter: Treatment Value: 100uM ABA vs. No Treatment
  misc_feature: MA Experiment ID: 20000794 Result: Up-regulated in Transcription
  misc_feature: MA Experiment 20000794 PARAMETER Experiment Name: At_Petals_P Parameter: Age (day) Value: 23-25 days
  misc_feature: MA Experiment 20000794 PARAMETER Experiment Name: At_Petals_P Parameter: Plant Line Value: WS
  misc_feature: MA Experiment 20000794 PARAMETER Experiment Name: At_Petals_P Parameter: Tissue Value: Petals vs. Whole plant
  misc_feature: MA Experiment ID: 20001559 Result: Up-regulated in Transcription
  misc_feature: MA Experiment 20001559 PARAMETER Experiment Name: At_Drought_Soil_Dry_P Parameter: Age (day) Value: 28
  misc_feature: MA Experiment 20001559 PARAMETER Experiment Name: At_Drought_Soil_Dry_P Parameter: Organism Value: A. thaliana
  misc_feature: MA Experiment 20001559 PARAMETER Experiment Name: At_Drought_Soil_Dry_P Parameter: Plant Line Value: WS
  misc_feature: MA Experiment 20001559 PARAMETER Experiment Name: At_Drought_Soil_Dry_P Parameter: Post Timepoint (hr) Value: 29
  misc_feature: MA Experiment 20001559 PARAMETER Experiment Name: At_Drought_Soil_Dry_P Parameter: Post-Treatment Value: Re-Water vs. No Drought
  misc_feature: MA Experiment 20001559 PARAMETER Experiment Name: At_Drought_Soil_Dry_P Parameter: Timepoint (day) Value: 14
  misc_feature: MA Experiment 20001559 PARAMETER Experiment Name: At_Drought_Soil_Dry_P Parameter: Treatment Value: Drought vs. No Drought
  misc_feature: MA Experiment ID: 20001560 Result: Up-regulated in Transcription
  misc_feature: MA Experiment 20001560 PARAMETER Experiment Name: At_Drought_Soil_Dry_P Parameter: Age (day) Value: 28
  misc_feature: MA Experiment 20001560 PARAMETER Experiment Name: At_Drought_Soil_Dry_P Parameter: Organism Value: A. thaliana
  misc_feature: MA Experiment 20001560 PARAMETER Experiment Name: At_Drought_Soil_Dry_P Parameter: Plant Line Value: WS
  misc_feature: MA Experiment 20001560 PARAMETER Experiment Name: At_Drought_Soil_Dry_P Parameter: Post Timepoint (hr) Value: None
  misc_feature: MA Experiment 20001560 PARAMETER Experiment Name: At_Drought_Soil_Dry_P Parameter: Post-Treatment Value: None
  misc_feature: MA Experiment 20001560 PARAMETER Experiment Name: At_Drought_Soil_Dry_P Parameter: Timepoint (day) Value: 14
  misc_feature: MA Experiment 20001560 PARAMETER Experiment Name: At_Drought_Soil_Dry_P Parameter: Treatment Value: Drought vs. No Drought
  misc_feature: MA Experiment ID: 20001904 Result: Up-regulated in Transcription
  misc_feature: MA Experiment 20001904 PARAMETER Experiment Name: At_Drought_Reproduction_P Parameter: Age (day) Value: 37
  misc_feature: MA Experiment 20001904 PARAMETER Experiment Name: At_Drought_Reproduction_P Parameter: Organism Value: A. thaliana
  misc_feature: MA Experiment 20001904 PARAMETER Experiment Name: At_Drought_Reproduction_P Parameter: Plant Line Value: WS
  misc_feature: MA Experiment 20001904 PARAMETER Experiment Name: At_Drought_Reproduction_P Parameter: Timepoint (day) Value: 7
  misc_feature: MA Experiment 20001904 PARAMETER Experiment Name: At_Drought_Reproduction_P Parameter: Tissue Value: Rosettes
  misc_feature: MA Experiment 20001904 PARAMETER Experiment Name: At_Drought_Reproduction_P Parameter: Treatment Value: Drought vs. No Drought
  misc_feature: MA Experiment ID: 20001905 Result: Up-regulated in Transcription
  misc_feature: MA Experiment 20001905 PARAMETER Experiment Name: At_Drought_Reproduction_P Parameter: Age (day) Value: 40
  misc_feature: MA Experiment 20001905 PARAMETER Experiment Name: At_Drought_Reproduction_P Parameter: Organism Value: A. thaliana
  misc_feature: MA Experiment 20001905 PARAMETER Experiment Name: At_Drought_Reproduction_P Parameter: Plant Line Value: WS
  misc_feature: MA Experiment 20001905 PARAMETER Experiment Name: At_Drought_Reproduction_P Parameter: Timepoint (day) Value: 10
  misc_feature: MA Experiment 20001905 PARAMETER Experiment Name: At_Drought_Reproduction_P Parameter: Tissue Value: Rosettes
  misc_feature: MA Experiment 20001905 PARAMETER Experiment Name: At_Drought_Reproduction_P Parameter: Treatment Value: Drought vs. No Drought
  misc_feature: MA Experiment ID: 20001906 Result: Up-regulated in Transcription
  misc_feature: MA Experiment 20001906 PARAMETER Experiment Name: At_Drought_Reproduction_P Parameter: Age (day) Value: 35
  misc_feature: MA Experiment 20001906 PARAMETER Experiment Name: At_Drought_Reproduction_P Parameter: Organism Value: A. thaliana
  misc_feature: MA Experiment 20001906 PARAMETER Experiment Name: At_Drought_Reproduction_P Parameter: Plant Line Value: WS
  misc_feature: MA Experiment 20001906 PARAMETER Experiment Name: At_Drought_Reproduction_P Parameter: Timepoint (day) Value: 5
  misc_feature: MA Experiment 20001906 PARAMETER Experiment Name: At_Drought_Reproduction_P Parameter: Tissue Value: Siliques
  misc_feature: MA Experiment 20001906 PARAMETER Experiment Name: At_Drought_Reproduction_P Parameter: Treatment Value: Drought vs. No Drought
  misc_feature: MA Experiment ID: 20001908 Result: Up-regulated in Transcription
  misc_feature: MA Experiment 20001908 PARAMETER Experiment Name: At_Drought_Reproduction_P Parameter: Age (day) Value: 40
  misc_feature: MA Experiment 20001908 PARAMETER Experiment Name: At_Drought_Reproduction_P Parameter: Organism Value: A. thaliana
  misc_feature: MA Experiment 20001908 PARAMETER Experiment Name: At_Drought_Reproduction_P Parameter: Plant Line Value: WS
  misc_feature: MA Experiment 20001908 PARAMETER Experiment Name: At_Drought_Reproduction_P Parameter: Timepoint (day) Value: 10
  misc_feature: MA Experiment 20001908 PARAMETER Experiment Name: At_Drought_Reproduction_P Parameter: Tissue Value: Siliques
  misc_feature: MA Experiment 20001908 PARAMETER Experiment Name: At_Drought_Reproduction_P Parameter: Treatment Value: Drought vs. No Drought
gatcgtcttctctttccctaaacacactgattattttctctccgacgccgccatgtctctgctctcagatctcgttaacctcaacctcaccgatgccaccgggaaaatcatcgccgaatacatatggatcggtggatctggaatggatatcagaagcaaagccaggacactaccaggaccagtgactgatccatcaaagcttcccaagtggaactacgacggatccagcaccggtcaggctgctggagaagacagtgaagtcattctataccctcaggcaatattcaaggatcccttcaggaaagacaacaacatcctggtgatgtgtgatgcttacacaccagctggtgatcctattccaaccaacaagaggcacaacgctgctaagatcttcagccaccccgacgttgccaaggaggagccttggtatgggattgagcaagaatacactttgatgcaaaaggatgtgaactggccaattggttggcctgttggtggctaccctggccctcagggaccttactactgtggtgtgggagctgacaaagccattggtcgtgacattgtggatgctcactacaaggcctgtctttacgccggtattggtatttctggtatcaatggagaagtcatgccaggccagtgggagttccaagtcggccctgttgagggtattagttctggtgatcaagtctgggttgctcgataccttctcgagaggatcactgagatctctggtgtaattgtcagcttcgacccgaaaccagtcccgggtgactggaatggagctggagctcactgcaactacagcactaagacaatgagaaacgatggaggattagaagtgatcaagaaagcgatagggaagcttcagctgaaacacaaagaacacattgctgcttacggtgaaggaaacgagcgtcgtctcactggaaagcacgaaaccgcagacatcaacacattctcttggggagtcgcgaaccgtggagcgtcagtgagagtgggacgtgacacagagaaggaaggtaaagggtacttcgaagacagaaggccagcttctaacatggatccttacgttgtcacctccatgatcgctgagacgaccatactcggttgatgacacatttcatgatttgatttctctccaatttggttttttttttttcccttttgattgcacttttcgataataaaaaaataattcttattatgggcgtattgttgtgacattttgtgttttgtttcgaataattaaataagcgcttcttaaggtg

SEQ ID NO: 22548 - protein, 371 aa, Arabidopsis thaliana
  peptide (1)..(371): Ceres Seq. ID no. 13491492
  misc_feature (120)..(371): Pfam Name: Glutamine synthetase, catalytic domain Pfam Description: Glutamine synthetase, catalytic domain
  misc_feature (18)..(370): Homolog of NCBI NO: 1835154 NR Description: glutamine synthetase [Medicago truncatula]
  misc_feature (18)..(370): Homolog of NCBI NO: 121349 NR Description: Glutamine synthetase shoot isozyme
  misc_feature (18)..(370): Homolog of NCBI NO: 15240288 NR Description: glutamate--ammonia ligase [Arabidopsis thaliana]
  misc_feature (18)..(370): Homolog of NCBI NO: 1084350 NR Description: glutamate-ammonia ligase (EC 6.3.1.2) - rape
  misc_feature (18)..(370): Homolog of NCBI NO: 417060 NR Description: Glutamine synthetase nodule isozyme
  misc_feature (18)..(371): Homolog of NCBI NO: 1076473 NR Description: Gln 1.1 protein - radish
  misc_feature (19)..(371): Homolog of NCBI NO: 228456 NR Description: Gln synthetase
  misc_feature (19)..(371): Homolog of NCBI NO: 99698 NR Description: glutamate-ammonia ligase (EC 6.3.1.2), cytosolic
  misc_feature (18)..(371): Homolog of NCBI NO: 15229530 NR Description: glutamine synthetase -related [Arabidopsis
  misc_feature (18)..(371): Homolog of NCBI NO: 28393681 NR Description: putative glutamine synthetase [Arabidopsis
IVFSFPKHTDYFLSDAAMSLLSDLVNLNLTDATGKIIAEYIWIGGSGMDIRSKARTLPGPVTDPSKLPKWNYDGSSTGQAAGEDSEVILYPQAIFKDPFRKDNNILVMCDAYTPAGDPIPTNKRHNAAKIFSHPDVAKEEPWYGIEQEYTLMQKDVNWPIGWPVGGYPGPQGPYYCGVGADKAIGRDIVDAHYKACLYAGIGISGINGEVMPGQWEFQVGPVEGISSGDQVWVARYLLERITEISGVIVSFDPKPVPGDWNGAGAHCNYSTKTMRNDGGLEVIKKAIGKLQLKHKEHIAAYGEGNERRLTGKHETADINTFSWGVANRGASVRVGRDTEKEGKGYFEDRRPASNMDPYVVTSMIAETTILG

SEQ ID NO: 22549 - protein, 354 aa, Arabidopsis thaliana
  peptide (1)..(354): Ceres Seq. ID no. 13491493
  misc_feature (103)..(354): Pfam Name: Glutamine synthetase, catalytic domain Pfam Description: Glutamine synthetase, catalytic domain
  misc_feature (1)..(353): Homolog of NCBI NO: 1835154 NR Description: glutamine synthetase [Medicago truncatula]
  misc_feature (1)..(353): Homolog of NCBI NO: 121349 NR Description: Glutamine synthetase shoot isozyme
  misc_feature (1)..(353): Homolog of NCBI NO: 15240288 NR Description: glutamate--ammonia ligase [Arabidopsis thaliana]
  misc_feature (1)..(353): Homolog of NCBI NO: 1084350 NR Description: glutamate-ammonia ligase (EC 6.3.1.2) - rape
  misc_feature (1)..(353): Homolog of NCBI NO: 417060 NR Description: Glutamine synthetase nodule isozyme
  misc_feature (1)..(354): Homolog of NCBI NO: 1076473 NR Description: Gln 1.1 protein - radish
  misc_feature (2)..(354): Homolog of NCBI NO: 228456 NR Description: Gln synthetase
  misc_feature (2)..(354): Homolog of NCBI NO: 99698 NR Description: glutamate-ammonia ligase (EC 6.3.1.2), cytosolic
  misc_feature (1)..(354): Homolog of NCBI NO: 15229530 NR Description: glutamine synthetase -related [Arabidopsis
  misc_feature (1)..(354): Homolog of NCBI NO: 28393681 NR Description: putative glutamine synthetase [Arabidopsis
MSLLSDLVNLNLTDATGKIIAEYIWIGGSGMDIRSKARTLPGPVTDPSKLPKWNYDGSSTGQAAGEDSEVILYPQAIFKDPFRKDNNILVMCDAYTPAGDPIPTNKRHNAAKIFSHPDVAKEEPWYGIEQEYTLMQKDVNWPIGWPVGGYPGPQGPYYCGVGADKAIGRDIVDAHYKACLYAGIGISGINGEVMPGQWEFQVGPVEGISSGDQVWVARYLLERITEISGVIVSFDPKPVPGDWNGAGAHCNYSTKTMRNDGGLEVIKKAIGKLQLKHKEHIAAYGEGNERRLTGKHETADINTFSWGVANRGASVRVGRDTEKEGKGYFEDRRPASNMDPYVVTSMIAETTILG

SEQ ID NO: 22550 - protein, 324 aa, Arabidopsis thaliana
  peptide (1)..(324): Ceres Seq. ID no. 13491494
  misc_feature (73)..(324): Pfam Name: Glutamine synthetase, catalytic domain Pfam Description: Glutamine synthetase, catalytic domain
  misc_feature (1)..(323): Homolog of NCBI NO: 1835154 NR Description: glutamine synthetase [Medicago truncatula]
  misc_feature (1)..(323): Homolog of NCBI NO: 121349 NR Description: Glutamine synthetase shoot isozyme
  misc_feature (1)..(323): Homolog of NCBI NO: 15240288 NR Description: glutamate--ammonia ligase [Arabidopsis thaliana]
  misc_feature (1)..(323): Homolog of NCBI NO: 1084350 NR Description: glutamate-ammonia ligase (EC 6.3.1.2) - rape
  misc_feature (1)..(323): Homolog of NCBI NO: 417060 NR Description: Glutamine synthetase nodule isozyme
  misc_feature (1)..(324): Homolog of NCBI NO: 1076473 NR Description: Gln 1.1 protein - radish
  misc_feature (1)..(324): Homolog of NCBI NO: 228456 NR Description: Gln synthetase
  misc_feature (1)..(324): Homolog of NCBI NO: 99698 NR Description: glutamate-ammonia ligase (EC 6.3.1.2), cytosolic
  misc_feature (1)..(324): Homolog of NCBI NO: 15229530 NR Description: glutamine synthetase -related [Arabidopsis
  misc_feature (1)..(324): Homolog of NCBI NO: 28393681 NR Description: putative glutamine synthetase [Arabidopsis
MDIRSKARTLPGPVTDPSKLPKWNYDGSSTGQAAGEDSEVILYPQAIFKDPFRKDNNILVMCDAYTPAGDPIPTNKRHNAAKIFSHPDVAKEEPWYGIEQEYTLMQKDVNWPIGWPVGGYPGPQGPYYCGVGADKAIGRDIVDAHYKACLYAGIGISGINGEVMPGQWEFQVGPVEGISSGDQVWVARYLLERITEISGVIVSFDPKPVPGDWNGAGAHCNYSTKTMRNDGGLEVIKKAIGKLQLKHKEHIAAYGEGNERRLTGKHETADINTFSWGVANRGASVRVGRDTEKEGKGYFEDRRPASNMDPYVVTSMIAETTILG

SEQ ID NO: 22551 - DNA, 1222 bp, Arabidopsis thaliana
  misc_feature (1)..(1222): Ceres Seq. ID no. 12324824
  misc_feature: MA Experiment ID: 20000166 Result: Up-regulated in Transcription
  misc_feature: MA Experiment 20000166 PARAMETER Experiment Name: At_100uM_ABA_P Parameter: Age (day) Value: 14
  misc_feature: MA Experiment 20000166 PARAMETER Experiment Name: At_100uM_ABA_P Parameter: Organism Value: A. thaliana
  misc_feature: MA Experiment 20000166 PARAMETER Experiment Name: At_100uM_ABA_P Parameter: Plant Line Value: WS
  misc_feature: MA Experiment 20000166 PARAMETER Experiment Name: At_100uM_ABA_P Parameter: Timepoint (hr) Value: 1
  misc_feature: MA Experiment 20000166 PARAMETER Experiment Name: At_100uM_ABA_P Parameter: Tissue Value: Aerial
  misc_feature: MA Experiment 20000166 PARAMETER Experiment Name: At_100uM_ABA_P Parameter: Treatment Value: 100uM ABA vs. No Treatment
  misc_feature: MA Experiment ID: 20000169 Result: Up-regulated in Transcription
  misc_feature: MA Experiment 20000169 PARAMETER Experiment Name: At_100uM_ABA_P Parameter: Age (day) Value: 14
  misc_feature: MA Experiment 20000169 PARAMETER Experiment Name: At_100uM_ABA_P Parameter: Organism Value: A. thaliana
  misc_feature: MA Experiment 20000169 PARAMETER Experiment Name: At_100uM_ABA_P Parameter: Plant Line Value: WS
  misc_feature: MA Experiment 20000169 PARAMETER Experiment Name: At_100uM_ABA_P Parameter: Timepoint (hr) Value: 6
  misc_feature: MA Experiment 20000169 PARAMETER Experiment Name: At_100uM_ABA_P Parameter: Tissue Value: Aerial
  misc_feature: MA Experiment 20000169 PARAMETER Experiment Name: At_100uM_ABA_P Parameter: Treatment Value: 100uM ABA vs. No Treatment
  misc_feature: MA Experiment ID: 20000184 Result: Down-regulated in Transcription
  misc_feature: MA Experiment 20000184 PARAMETER Experiment Name: At_Shoots__P Parameter: Age (day) Value: 7
  misc_feature: MA Experiment 20000184 PARAMETER Experiment Name: At_Shoots__P Parameter: Tissue Value: Shoots vs. Whole Plant
  misc_feature: MA Experiment ID: 20000185 Result: Down-regulated in Transcription
  misc_feature: MA Experiment 20000185 PARAMETER Experiment Name: At_Roots__P Parameter: Age (day) Value: 7 vs. 21
  misc_feature: MA Experiment 20000185 PARAMETER Experiment Name: At_Roots__P Parameter: Organism Value: A. thaliana
  misc_feature: MA Experiment 20000185 PARAMETER Experiment Name: At_Roots__P Parameter: Tissue Value: Roots vs. Whole Plant
  misc_feature: MA Experiment ID: 20000211 Result: Up-regulated in Transcription
  misc_feature: MA Experiment 20000211 PARAMETER Experiment Name: At_0.001percent_MeJA__P Parameter: Age (day) Value: 14
  misc_feature: MA Experiment 20000211 PARAMETER Experiment Name: At_0.001percent_MeJA__P Parameter: Organism Value: A. thaliana
  misc_feature: MA Experiment 20000211 PARAMETER Experiment Name: At_0.001percent_MeJA__P Parameter: Plant Line Value: WS
  misc_feature: MA Experiment 20000211 PARAMETER Experiment Name: At_0.001percent_MeJA__P Parameter: Timepoint (hr) Value: 1
  misc_feature: MA Experiment 20000211 PARAMETER Experiment Name: At_0.001percent_MeJA__P Parameter: Tissue Value: Aerial
  misc_feature: MA Experiment 20000211 PARAMETER Experiment Name: At_0.001percent_MeJA__P Parameter: Treatment Value: 0.001percent MeJA vs. No Treatment
  misc_feature: MA Experiment ID: 20000213 Result: Up-regulated in Transcription
  misc_feature: MA Experiment 20000213 PARAMETER Experiment Name: At_4deg_Cold_P Parameter: Timepoint (hr) Value: 2
  misc_feature: MA Experiment ID: 20000234 Result: Down-regulated in Transcription
  misc_feature: MA Experiment 20000234 PARAMETER Experiment Name: At_Siliques_P Parameter: Age (day) Value: 21
  misc_feature: MA Experiment 20000234 PARAMETER Experiment Name: At_Siliques_P Parameter: Organism Value: A. thaliana
  misc_feature: MA Experiment 20000234 PARAMETER Experiment Name: At_Siliques_P Parameter: Plant Line Value: WS
  misc_feature: MA Experiment 20000234 PARAMETER Experiment Name: At_Siliques_P Parameter: Tissue Value: Less Than 5mm Siliques vs. Whole Plant
  misc_feature: MA Experiment ID: 20000235 Result: Down-regulated in Transcription
  misc_feature: MA Experiment 20000235 PARAMETER Experiment Name: At_Siliques_P Parameter: Age (day) Value: 21
  misc_feature: MA Experiment 20000235 PARAMETER Experiment Name: At_Siliques_P Parameter: Organism Value: A. thaliana
  misc_feature: MA Experiment 20000235 PARAMETER Experiment Name: At_Siliques_P Parameter: Plant Line Value: WS
  misc_feature: MA Experiment 20000235 PARAMETER Experiment Name: At_Siliques_P Parameter: Tissue Value: 5-10mm Siliques vs. Whole Plant
  misc_feature: MA Experiment ID: 20000265 Result: Down-regulated in Transcription
  misc_feature: MA Experiment 20000265 PARAMETER Experiment Name: At_Open_Flower_P Parameter: Age (day) Value: 21
  misc_feature: MA Experiment 20000265 PARAMETER Experiment Name: At_Open_Flower_P Parameter: Plant Line Value: WS
  misc_feature: MA Experiment 20000265 PARAMETER Experiment Name: At_Open_Flower_P Parameter: Tissue Value: Closed Flower vs. Whole Plant
  misc_feature: MA Experiment ID: 20000268 Result: Down-regulated in Transcription
  misc_feature: MA Experiment 20000268 PARAMETER Experiment Name: At_100mM_NaCl__P Parameter: Age (day) Value: 14
  misc_feature: MA Experiment 20000268 PARAMETER Experiment Name: At_100mM_NaCl__P Parameter: Organism Value: A. thaliana
  misc_feature: MA Experiment 20000268 PARAMETER Experiment Name: At_100mM_NaCl__P Parameter: Plant Line Value: WS
  misc_feature: MA Experiment 20000268 PARAMETER Experiment Name: At_100mM_NaCl__P Parameter: Timepoint (hr) Value: 6
  misc_feature: MA Experiment 20000268 PARAMETER Experiment Name: At_100mM_NaCl__P Parameter: Tissue Value: Whole Plant
  misc_feature: MA Experiment 20000268 PARAMETER Experiment Name: At_100mM_NaCl__P Parameter: Treatment Value: 100mM NaCl vs. No Treatment
  misc_feature: MA Experiment ID: 20000437 Result: Up-regulated in Transcription
  misc_feature: MA Experiment 20000437 PARAMETER Experiment Name: At_Drought_P Parameter: Age (day) Value: 8
  misc_feature: MA Experiment 20000437 PARAMETER Experiment Name: At_Drought_P Parameter: Organism Value: A. thaliana
  misc_feature: MA Experiment 20000437 PARAMETER Experiment Name: At_Drought_P Parameter: Plant Line Value: WS
  misc_feature: MA Experiment 20000437 PARAMETER Experiment Name: At_Drought_P Parameter: Timepoint (hr) Value: 24
  misc_feature: MA Experiment 20000437 PARAMETER Experiment Name: At_Drought_P Parameter: Tissue Value: Whole Plant
  misc_feature: MA Experiment 20000437 PARAMETER Experiment Name: At_Drought_P Parameter: Treatment Value: Drought vs. No Drought
  misc_feature: MA Experiment ID: 20000438 Result: Down-regulated in Transcription
  misc_feature: MA Experiment 20000438 PARAMETER Experiment Name: At_Shoots__P Parameter: Age (day) Value: 14
  misc_feature: MA Experiment 20000438 PARAMETER Experiment Name: At_Shoots__P Parameter: Tissue Value: Shoots vs. Whole Plant
  misc_feature: MA Experiment ID: 20000439 Result: Down-regulated in Transcription
  misc_feature: MA Experiment 20000439 PARAMETER Experiment Name: At_Roots__P Parameter: Age (day) Value: 14 vs. 21
  misc_feature: MA Experiment 20000439 PARAMETER Experiment Name: At_Roots__P Parameter: Organism Value: A. thaliana
  misc_feature: MA Experiment 20000439 PARAMETER Experiment Name: At_Roots__P Parameter: Tissue Value: Roots vs. Whole Plant
  misc_feature: MA Experiment ID: 20000441 Result: Up-regulated in Transcription
  misc_feature: MA Experiment 20000441 PARAMETER Experiment Name: At_1uM_BR-BRZ__P Parameter: Tissue Value: Shoot Apices
  misc_feature: MA Experiment 20000441 PARAMETER Experiment Name: At_1uM_BR-BRZ__P Parameter: Treatment Value: 1uM BR vs. No Treatment
  misc_feature: MA Experiment ID: 20000453 Result: Up-regulated in Transcription
  misc_feature: MA Experiment 20000453 PARAMETER Experiment Name: At_100uM_ABA_P Parameter: Age (day) Value: 15
  misc_feature: MA Experiment 20000453 PARAMETER Experiment Name: At_100uM_ABA_P Parameter: Organism Value: A. thaliana
  misc_feature: MA Experiment 20000453 PARAMETER Experiment Name: At_100uM_ABA_P Parameter: Plant Line Value: WS
  misc_feature: MA Experiment 20000453 PARAMETER Experiment Name: At_100uM_ABA_P Parameter: Timepoint (hr) Value: 24
  misc_feature: MA Experiment 20000453 PARAMETER Experiment Name: At_100uM_ABA_P Parameter: Tissue Value: Aerial
  misc_feature: MA Experiment 20000453 PARAMETER Experiment Name: At_100uM_ABA_P Parameter: Treatment Value: 100uM ABA vs. No Treatment
  misc_feature: MA Experiment ID: 20000460 Result: Up-regulated in Transcription
  misc_feature: MA Experiment 20000460 PARAMETER Experiment Name: At_10percent_PEG_P Parameter: Age (day) Value: 12
  misc_feature: MA Experiment 20000460 PARAMETER Experiment Name: At_10percent_PEG_P Parameter: Organism Value: A. thaliana
  misc_feature: MA Experiment 20000460 PARAMETER Experiment Name: At_10percent_PEG_P Parameter: Plant Line Value: WS
  misc_feature: MA Experiment 20000460 PARAMETER Experiment Name: At_10percent_PEG_P Parameter: Timepoint (day) Value: 12
  misc_feature: MA Experiment 20000460 PARAMETER Experiment Name: At_10percent_PEG_P Parameter: Tissue Value: Whole Plant
  misc_feature: MA Experiment 20000460 PARAMETER Experiment Name: At_10percent_PEG_P Parameter: Treatment Value: 10percent PEG vs. No Treatment
  misc_feature: MA Experiment ID: 20000495 Result: Down-regulated in Transcription
  misc_feature: MA Experiment 20000495 PARAMETER Experiment Name: At_Guard_Cells_P Parameter: Harvest Date Value: 8/2/2002
  misc_feature: MA Experiment 20000495 PARAMETER Experiment Name: At_Guard_Cells_P Parameter: Organism Value: A. thaliana
  misc_feature: MA Experiment 20000495 PARAMETER Experiment Name: At_Guard_Cells_P Parameter: Tissue Value: Guard Cells vs. Leaves
  misc_feature: MA Experiment ID: 20000574 Result: Down-regulated in Transcription
  misc_feature: MA Experiment 20000574 PARAMETER Experiment Name: At_100uM_ABA_Mutants__P Parameter: Organism Value: A. thaliana
  misc_feature: MA Experiment 20000574 PARAMETER Experiment Name: At_100uM_ABA_Mutants__P Parameter: Plant Line Value: CS23 vs. Ler wt
  misc_feature: MA Experiment 20000574 PARAMETER Experiment Name: At_100uM_ABA_Mutants__P Parameter: Timepoint (hr) Value: N/A
  misc_feature: MA Experiment 20000574 PARAMETER Experiment Name: At_100uM_ABA_Mutants__P Parameter: Tissue Value: Whole Plant
  misc_feature: MA Experiment 20000574 PARAMETER Experiment Name: At_100uM_ABA_Mutants__P Parameter: Treatment Value: None
  misc_feature: MA Experiment ID: 20001247 Result: Up-regulated in Transcription
  misc_feature: MA Experiment 20001247 PARAMETER Experiment Name: At_Far-red-induction_P Parameter: Age (day) Value: 7
  misc_feature: MA Experiment 20001247 PARAMETER Experiment Name: At_Far-red-induction_P Parameter: Light Value: Far-red vs. White
  misc_feature: MA Experiment 20001247 PARAMETER Experiment Name: At_Far-red-induction_P Parameter: Organism Value: A. thaliana
  misc_feature: MA Experiment 20001247 PARAMETER Experiment Name: At_Far-red-induction_P Parameter: Plant Line Value: Columbia
  misc_feature: MA Experiment 20001247 PARAMETER Experiment Name: At_Far-red-induction_P Parameter: Timepoint (hr) Value: 1
  misc_feature: MA Experiment 20001247 PARAMETER Experiment Name: At_Far-red-induction_P Parameter: Tissue Value: Whole Plant
  misc_feature: MA Experiment ID: 20001557 Result: Up-regulated in Transcription
  misc_feature: MA Experiment 20001557 PARAMETER Experiment Name: At_Drought_Soil_Dry_P Parameter: Age (day) Value: 27
  misc_feature: MA Experiment 20001557 PARAMETER Experiment Name: At_Drought_Soil_Dry_P Parameter: Organism Value: A. thaliana
  misc_feature: MA Experiment 20001557 PARAMETER Experiment Name: At_Drought_Soil_Dry_P Parameter: Plant Line Value: WS
  misc_feature: MA Experiment 20001557 PARAMETER Experiment Name: At_Drought_Soil_Dry_P Parameter: Post Timepoint (hr) Value: 3
  misc_feature: MA Experiment 20001557 PARAMETER Experiment Name: At_Drought_Soil_Dry_P Parameter: Post-Treatment Value: Re-Water vs. No Drought
  misc_feature: MA Experiment 20001557 PARAMETER Experiment Name: At_Drought_Soil_Dry_P Parameter: Timepoint (day) Value: 13
  misc_feature: MA Experiment 20001557 PARAMETER Experiment Name: At_Drought_Soil_Dry_P Parameter: Treatment Value: Drought vs. No Drought
  misc_feature: MA Experiment ID: 20001757 Result: Down-regulated in Transcription
  misc_feature: MA Experiment 20001757 PARAMETER Experiment Name: At_50mM_NH4NO3_L-to-H_P Parameter: Timepoint (hr) Value: 6
  misc_feature: MA Experiment 20001757 PARAMETER Experiment Name: At_50mM_NH4NO3_L-to-H_P Parameter: Tissue Value: Leaf
  misc_feature: MA Experiment 20001757 PARAMETER Experiment Name: At_50mM_NH4NO3_L-to-H_P Parameter: Treatment Value: 50mM NH4NO3 vs 100mM Mannitol
ctcgaacttgtttttggttcatctctcaaaaccaaaatcactaaagaggagaagattgctaaagtttgataaaacattccaaaatcaatggctgataggatcaaaggtccatggagtcctgaagaagacgagcagcttcgtaggcttgttgttaaatacggtccaagaaactggacagtgattagcaaatctattcccggtagatcggggaaatcgtgtcgtttacggtggtgcaaccagctttcgccgcaagttgagcatcggccgttttcggctgaggaagacgagacgatcgcacgtgctcacgctcagttcggtaataaatgggcgacgattgctcgtcttctcaacggtcgtacggacaacgccgtgaagaatcactggaactcgacgctcaagaggaaatgcggcggttacgaccatcggggttacgatggttcggaggatcatcggccggttaagagatcggtgagtgcgggatctccacctgttgttactgggctttacatgagcccaggaagcccaactggatctgatgtcagtgattcaagtactatcccgatattaccttccgttgagcttttcaagcctgtgcctagacctggtgctgttgtgctaccgcttcctatcgaaacgtcgtcttcttccgatgatccaccgacttcgttaagcttgtcacttcctggtgccgacgtaagcgaggagtcaaaccgtagccacgagtcaacgaatatcaacaacaccacttcgagccgccacaaccacaacaatacggtgtcgtttatgccgtttagtggtgggtttagaggtgcgattgaggaaatggggaagtcttttcccggtaacggaggcgagtttatggcggtggtgcaagagatgattaaggcggaagtgaggagttacatgacggagatgcaacggaacaatggtggcggattcgtcggaggattcattgataatggcatgattccgatgagtcaaattggagttgggagaatcgagtagacaaagtgagattattaggaaactgtttaaattggagaagaagaaaaatgctctgtttttttctcctttggattaggcttaagaattttgggttttaaggaaatgtatagaggaaatcgagtgaacaaagctcgagagctggggacgtagtgacgaagacgaagatcaaatttctcttaagctattcaggaaaataaaataaatttttatttataac

SEQ ID NO: 22552 - protein, 305 aa, Arabidopsis thaliana
  peptide (1)..(305): Ceres Seq. ID no. 12324825
  misc_feature (6)..(52): Pfam Name: Myb-like DNA-binding domain Pfam Description: Myb-like DNA-binding domain
  misc_feature (1)..(305): Homolog of NCBI NO: 21593586 NR Description: putative MYB family transcription factor
  misc_feature (3)..(218): Homolog of NCBI NO: 9954112 NR Description: tuber-specific and sucrose-responsive element
  misc_feature (1)..(297): Homolog of NCBI NO: 15235484 NR Description: myb DNA-binding protein (AtMYB73)
  misc_feature (1)..(292): Homolog of NCBI NO: 15229664 NR Description: myb DNA-binding protein (MYB77)
  misc_feature (1)..(292): Homolog of NCBI NO: 2129647 NR Description: myb-related protein, 33.2K - Arabidopsis thaliana
  misc_feature (1)..(292): Homolog of NCBI NO: 2832406 NR Description: R2R3-MYB transcription factor [Arabidopsis
  misc_feature (1)..(305): Homolog of NCBI NO: 21592897 NR Description: myb-related protein, 33.3K [Arabidopsis thaliana]
  misc_feature (1)..(305): Homolog of NCBI NO: 2129648 NR Description: myb-related protein, 33.3K - Arabidopsis thaliana
  misc_feature (1)..(305): Homolog of NCBI NO: 15450393 NR Description: AT5g67300/K8K14_2 [Arabidopsis thaliana]
  misc_feature (1)..(305): Homolog of NCBI NO: 15240708 NR Description: myb family transcription factor
MADRIKGPWSPEEDEQLRRLVVKYGPRNWTVISKSIPGRSGKSCRLRWCNQLSPQVEHRPFSAEEDETIARAHAQFGNKWATIARLLNGRTDNAVKNHWNSTLKRKCGGYDHRGYDGSEDHRPVKRSVSAGSPPVVTGLYMSPGSPTGSDVSDSSTIPILPSVELFKPVPRPGAVVLPLPIETSSSSDDPPTSLSLSLPGADVSEESNRSHESTNINNTTSSRHNHNNTVSFMPFSGGFRGAIEEMGKSFPGNGGEFMAVVQEMIKAEVRSYMTEMQRNNGGGFVGGFIDNGMIPMSQIGVGRIE

SEQ ID NO: 22553 - protein, 165 aa, Arabidopsis thaliana
  peptide (1)..(165): Ceres Seq. ID no. 12324826
  misc_feature (1)..(165): Homolog of NCBI NO: 21593586 NR Description: putative MYB family transcription factor
  misc_feature (1)..(78): Homolog of NCBI NO: 9954112 NR Description: tuber-specific and sucrose-responsive element
  misc_feature (1)..(157): Homolog of NCBI NO: 15235484 NR Description: myb DNA-binding protein (AtMYB73)
  misc_feature (1)..(152): Homolog of NCBI NO: 15229664 NR Description: myb DNA-binding protein (MYB77)
  misc_feature (1)..(152): Homolog of NCBI NO: 2129647 NR Description: myb-related protein, 33.2K - Arabidopsis thaliana
  misc_feature (1)..(152): Homolog of NCBI NO: 2832406 NR Description: R2R3-MYB transcription factor [Arabidopsis
  misc_feature (1)..(165): Homolog of NCBI NO: 21592897 NR Description: myb-related protein, 33.3K [Arabidopsis thaliana]
  misc_feature (1)..(165): Homolog of NCBI NO: 2129648 NR Description: myb-related protein, 33.3K - Arabidopsis thaliana
  misc_feature (1)..(165): Homolog of NCBI NO: 15450393 NR Description: AT5g67300/K8K14_2 [Arabidopsis thaliana]
  misc_feature (1)..(165): Homolog of NCBI NO: 15240708 NR Description: myb family transcription factor
MSPGSPTGSDVSDSSTIPILPSVELFKPVPRPGAVVLPLPIETSSSSDDPPTSLSLSLPGADVSEESNRSHESTNINNTTSSRHNHNNTVSFMPFSGGFRGAIEEMGKSFPGNGGEFMAVVQEMIKAEVRSYMTEMQRNNGGGFVGGFIDNGMIPMSQIGVGRIE

SEQ ID NO: 22554 - DNA, 1488 bp, Arabidopsis thaliana
  misc_feature (1)..(1488): Ceres Seq. ID no. 12421978
  misc_feature: MA Experiment ID: 108434 Result: Up-regulated in Transcription
  misc_feature: MA Experiment 108434 PARAMETER Experiment Name: At_Root_Tips_cDNA_P Parameter: Tissue Value: Root Tips
  misc_feature: MA Experiment ID: 108461 Result: Down-regulated in Transcription
  misc_feature: MA Experiment 108461 PARAMETER Experiment Name: At_Germinating_Seeds_cDNA_P Parameter: Age (day) Value: 1 vs. 0
  misc_feature: MA Experiment 108461 PARAMETER Experiment Name: At_Germinating_Seeds_cDNA_P Parameter: Tissue Value: Germinating Seeds
  misc_feature: MA Experiment ID: 108462 Result: Down-regulated in Transcription
  misc_feature: MA Experiment 108462 PARAMETER Experiment Name: At_Germinating_Seeds_cDNA_P Parameter: Age (day) Value: 2 vs. 0
  misc_feature: MA Experiment 108462 PARAMETER Experiment Name: At_Germinating_Seeds_cDNA_P Parameter: Tissue Value: Germinating Seeds
  misc_feature: MA Experiment ID: 108463 Result: Down-regulated in Transcription
  misc_feature: MA Experiment 108463 PARAMETER Experiment Name: At_Germinating_Seeds_cDNA_P Parameter: Age (day) Value: 3 vs. 0
  misc_feature: MA Experiment 108463 PARAMETER Experiment Name: At_Germinating_Seeds_cDNA_P Parameter: Tissue Value: Germinating Seeds
  misc_feature: MA Experiment ID: 108464 Result: Down-regulated in Transcription
  misc_feature: MA Experiment 108464 PARAMETER Experiment Name: At_Germinating_Seeds_cDNA_P Parameter: Age (day) Value: 4 vs. 0
  misc_feature: MA Experiment 108464 PARAMETER Experiment Name: At_Germinating_Seeds_cDNA_P Parameter: Tissue Value: Germinating Seeds
  misc_feature: MA Experiment ID: 108595 Result: Down-regulated in Transcription
  misc_feature: MA Experiment 108595 PARAMETER Experiment Name: At_Ler-pi_Ovule_cDNA_P Parameter: Plant Line Value: null
  misc_feature: MA Experiment ID: 20000179 Result: Down-regulated in Transcription
  misc_feature: MA Experiment 20000179 PARAMETER Experiment Name: At_Germinating_Seeds_P Parameter: Age (hr) Value: 6 vs. 0
  misc_feature: MA Experiment 20000179 PARAMETER Experiment Name: At_Germinating_Seeds_P Parameter: Tissue Value: Germinating Seeds
  misc_feature: MA Experiment ID: 20000180 Result: Down-regulated in Transcription
  misc_feature: MA Experiment 20000180 PARAMETER Experiment Name: At_Germinating_Seeds_P Parameter: Age (hr) Value: 24 vs. 0
  misc_feature: MA Experiment 20000180 PARAMETER Experiment Name: At_Germinating_Seeds_P Parameter: Tissue Value: Germinating Seeds
  misc_feature: MA Experiment ID: 20000184 Result: Down-regulated in Transcription
  misc_feature: MA Experiment 20000184 PARAMETER Experiment Name: At_Shoots__P Parameter: Age (day) Value: 7
  misc_feature: MA Experiment 20000184 PARAMETER Experiment Name: At_Shoots__P Parameter: Tissue Value: Shoots vs. Whole Plant
  misc_feature: MA Experiment ID: 20001557 Result: Up-regulated in Transcription
  misc_feature: MA Experiment 20001557 PARAMETER Experiment Name: At_Drought_Soil_Dry_P Parameter: Age (day) Value: 27
  misc_feature: MA Experiment 20001557 PARAMETER Experiment Name: At_Drought_Soil_Dry_P Parameter: Organism Value: A. thaliana
  misc_feature: MA Experiment 20001557 PARAMETER Experiment Name: At_Drought_Soil_Dry_P Parameter: Plant Line Value: WS
  misc_feature: MA Experiment 20001557 PARAMETER Experiment Name: At_Drought_Soil_Dry_P Parameter: Post Timepoint (hr) Value: 3
  misc_feature: MA Experiment 20001557 PARAMETER Experiment Name: At_Drought_Soil_Dry_P Parameter: Post-Treatment Value: Re-Water vs. No Drought
  misc_feature: MA Experiment 20001557 PARAMETER Experiment Name: At_Drought_Soil_Dry_P Parameter: Timepoint (day) Value: 13
  misc_feature: MA Experiment 20001557 PARAMETER Experiment Name: At_Drought_Soil_Dry_P Parameter: Treatment Value: Drought vs. No Drought
  misc_feature: MA Experiment ID: 20001558 Result: Up-regulated in Transcription
  misc_feature: MA Experiment 20001558 PARAMETER Experiment Name: At_Drought_Soil_Dry_P Parameter: Age (day) Value: 27
  misc_feature: MA Experiment 20001558 PARAMETER Experiment Name: At_Drought_Soil_Dry_P Parameter: Organism Value: A. thaliana
  misc_feature: MA Experiment 20001558 PARAMETER Experiment Name: At_Drought_Soil_Dry_P Parameter: Plant Line Value: WS
  misc_feature: MA Experiment 20001558 PARAMETER Experiment Name: At_Drought_Soil_Dry_P Parameter: Post Timepoint (hr) Value: 6
  misc_feature: MA Experiment 20001558 PARAMETER Experiment Name: At_Drought_Soil_Dry_P Parameter: Post-Treatment Value: Re-Water vs. No Drought
  misc_feature: MA Experiment 20001558 PARAMETER Experiment Name: At_Drought_Soil_Dry_P Parameter: Timepoint (day) Value: 13
  misc_feature: MA Experiment 20001558 PARAMETER Experiment Name: At_Drought_Soil_Dry_P Parameter: Treatment Value: Drought vs. No Drought
agacttggaatcagtttctcttttcttccctctttctctgagctatggagattactgtaatcgcttcttcctcaatcgatgaaggaattggaagttgggatctcaaaaccgggacagagcagcttcaattcaagccgtgtgcttctccggcgcatggtctcaccgccgtcggcgaaaaatttctcgcctcctctcagctctcggcgagaaatacttctggctcgattttttactggtcttggactaagcctcaagctgaagtgaagagctacccagtggaaccaataaaggctcttgcagcaaacaatgaaggaacttacttagttggtggtggaatctctggagatatttacctttgggaggttgcgactgggaagttgcttaagaagtggcatggtcattatcgttcagtaacatgtttggtgttctctggagatgattctttgttggtttctggatctcaagatgggtctattagagtttggtctcttataaggctatttgatgatttccaaaggcagcaagggaacactctttatgaacacaattttaatgagcatacaatgtctgtaactgatattgttatagactatggaggctgcaatgctgtgataatttcctcttcagaagatcggacttgcaaggtttggagcttgtcaagagggaaattgttgaaaaatatcatttttccttcagtcatcaatgcactcgcattggaccctggagggtgtgtgttctatgctggtgccagagacagcaaaatctatatcggtgccattaatgccacaagtgaatacgggacacaagttcttggttcagtatctgaaaaaggcaaagctattacttgcttagcatattgtgcagacggaaaccttttgatatctggatcagaagatggtgtggtttgtgtttgggatcccaaatcacttcgccatgttcgtactctcatccatgcaaaaggttctagaaaatgtcctgtgaacaatattcaaattgttagaaaaacgattgttgctaattccaacaaaacccaagtttcctggaaaagtcgtggggctttaatcccaccgcctttggaaaaatatgaaagaccagtagaagatactatggatggtatcgttacggttgatccgccgccattttctgatgttcctgtttactcttctttcctcagtgctgaccttattgacgagcaagttaaagaacttcagcaacaaggctctgcagcaacagagatggaaatggaaagactgaaacttgaatacaaaagatctttacagatgaatgaacaatggcagaagaactatgagaatttgcttcaagtggttatggaagaagaacaaatcggtggtaccaattgaaagctttttattgttgtttctacacatttttggaattacattaagagatattgtcaagtggcatatgaagtcgtcactaaagatatgttttatcaagatcccaaatttaggtatcatagcattctgt

SEQ ID NO: 22555 - protein, 438 aa, Arabidopsis thaliana
  peptide (1)..(438): Ceres Seq. ID no. 12421979
  misc_feature (248)..(317): Homolog of NCBI NO: 7511885 NR Description: hypothetical protein 63B12.7 - fruit fly
  misc_feature (1)..(242): Homolog of NCBI NO: 7511885 NR Description: hypothetical protein 63B12.7 - fruit fly
  misc_feature (1)..(317): Homolog of NCBI NO: 34862331 NR Description: similar to WD-repeat protein 18 [Rattus
  misc_feature (1)..(318): Homolog of NCBI NO: 33859749 NR Description: WD repeat domain 18 [Homo sapiens]
  misc_feature (107)..(249): Homolog of NCBI NO: 34897604 NR Description: G-protein beta family-like protein
  misc_feature (1)..(317): Homolog of NCBI NO: 20151747 NR Description: RE49866p [Drosophila melanogaster]
  misc_feature (1)..(317): Homolog of NCBI NO: 20128895 NR Description: CG14805-PA [Drosophila melanogaster]
  misc_feature (5)..(249): Homolog of NCBI NO: 33354207 NR Description: transducin / WD-40 repeat protein family -like
  misc_feature (1)..(438): Homolog of NCBI NO: 15229101 NR Description: G-protein beta family
  misc_feature (1)..(438): Homolog of NCBI NO: 21592898 NR Description: unknown [Arabidopsis thaliana]
MEITVIASSSIDEGIGSWDLKTGTEQLQFKPCASPAHGLTAVGEKFLASSQLSARNTSGSIFYWSWTKPQAEVKSYPVEPIKALAANNEGTYLVGGGISGDIYLWEVATGKLLKKWHGHYRSVTCLVFSGDDSLLVSGSQDGSIRVWSLIRLFDDFQRQQGNTLYEHNFNEHTMSVTDIVIDYGGCNAVIISSSEDRTCKVWSLSRGKLLKNIIFPSVINALALDPGGCVFYAGARDSKIYIGAINATSEYGTQVLGSVSEKGKAITCLAYCADGNLLISGSEDGVVCVWDPKSLRHVRTLIHAKGSRKCPVNNIQIVRKTIVANSNKTQVSWKSRGALIPPPLEKYERPVEDTMDGIVTVDPPPFSDVPVYSSFLSADLIDEQVKELQQQGSAATEMEMERLKLEYKRSLQMNEQWQKNYENLLQVVMEEEQIGGTN

SEQ ID NO: 22556 - protein, 265 aa, Arabidopsis thaliana
  peptide (1)..(265): Ceres Seq. ID no. 12421980
  misc_feature (75)..(144): Homolog of NCBI NO: 7511885 NR Description: hypothetical protein 63B12.7 - fruit fly
  misc_feature (1)..(69): Homolog of NCBI NO: 7511885 NR Description: hypothetical protein 63B12.7 - fruit fly
  misc_feature (1)..(144): Homolog of NCBI NO: 34862331 NR Description: similar to WD-repeat protein 18 [Rattus
  misc_feature (1)..(145): Homolog of NCBI NO: 33859749 NR Description: WD repeat domain 18 [Homo sapiens]
  misc_feature (1)..(76): Homolog of NCBI NO: 34897604 NR Description: G-protein beta family-like protein
  misc_feature (1)..(144): Homolog of NCBI NO: 20151747 NR Description: RE49866p [Drosophila melanogaster]
  misc_feature (1)..(144): Homolog of NCBI NO: 20128895 NR Description: CG14805-PA [Drosophila melanogaster]
  misc_feature (1)..(76): Homolog of NCBI NO: 33354207 NR Description: transducin / WD-40 repeat protein family -like
  misc_feature (1)..(265): Homolog of NCBI NO: 15229101 NR Description: G-protein beta family
  misc_feature (1)..(265): Homolog of NCBI NO: 21592898 NR Description: unknown [Arabidopsis thaliana]
MSVTDIVIDYGGCNAVIISSSEDRTCKVWSLSRGKLLKNIIFPSVINALALDPGGCVFYAGARDSKIYIGAINATSEYGTQVLGSVSEKGKAITCLAYCADGNLLISGSEDGVVCVWDPKSLRHVRTLIHAKGSRKCPVNNIQIVRKTIVANSNKTQVSWKSRGALIPPPLEKYERPVEDTMDGIVTVDPPPFSDVPVYSSFLSADLIDEQVKELQQQGSAATEMEMERLKLEYKRSLQMNEQWQKNYENLLQVVMEEEQIGGTN

SEQ ID NO: 22557 - DNA, 1117 bp, Arabidopsis thaliana
  misc_feature (1)..(1117): Ceres Seq. ID no. 12334667
  misc_feature: MA Experiment ID: 108595 Result: Down-regulated in Transcription
  misc_feature: MA Experiment 108595 PARAMETER Experiment Name: At_Ler-pi_Ovule_cDNA_P Parameter: Plant Line Value: null
  misc_feature: MA Experiment ID: 20000087 Result: Down-regulated in Transcription
  misc_feature: MA Experiment 20000087 PARAMETER Experiment Name: At_100uM_ABA_Mutants_cDNA_P Parameter: Plant Line Value: WS
  misc_feature: MA Experiment 20000087 PARAMETER Experiment Name: At_100uM_ABA_Mutants_cDNA_P Parameter: Timepoint (hr) Value: 6
  misc_feature: MA Experiment 20000087 PARAMETER Experiment Name: At_100uM_ABA_Mutants_cDNA_P Parameter: Tissue Value: Aerial
  misc_feature: MA Experiment 20000087 PARAMETER Experiment Name: At_100uM_ABA_Mutants_cDNA_P Parameter: Treatment Value: 100uM ABA vs. No Treatment
  misc_feature: MA Experiment ID: 20000113 Result: Up-regulated in Transcription
  misc_feature: MA Experiment 20000113 PARAMETER Experiment Name: At_42deg_Heat_cDNA_P Parameter: Temperature (deg C) Value: 42 vs. 22
  misc_feature: MA Experiment 20000113 PARAMETER Experiment Name: At_42deg_Heat_cDNA_P Parameter: Timepoint (hr) Value: 8
  misc_feature: MA Experiment 20000113 PARAMETER Experiment Name: At_42deg_Heat_cDNA_P Parameter: Tissue Value: Aerial
  misc_feature: MA Experiment ID: 20000185 Result: Down-regulated in Transcription
  misc_feature: MA Experiment 20000185 PARAMETER Experiment Name: At_Roots__P Parameter: Age (day) Value: 7 vs. 21
  misc_feature: MA Experiment 20000185 PARAMETER Experiment Name: At_Roots__P Parameter: Organism Value: A. thaliana
  misc_feature: MA Experiment 20000185 PARAMETER Experiment Name: At_Roots__P Parameter: Tissue Value: Roots vs. Whole Plant
  misc_feature: MA Experiment ID: 20000439 Result: Down-regulated in Transcription
  misc_feature: MA Experiment 20000439 PARAMETER Experiment Name: At_Roots__P Parameter: Age (day) Value: 14 vs. 21
  misc_feature: MA Experiment 20000439 PARAMETER Experiment Name: At_Roots__P Parameter: Organism Value: A. thaliana
  misc_feature: MA Experiment 20000439 PARAMETER Experiment Name: At_Roots__P Parameter: Tissue Value: Roots vs. Whole Plant
aggatcttcgagctgataattctattttctcaattcatcttctaagacttgtggtttctccttccttggagttcacagagaattgggatttatcctcccttggccggtttctatgtggccttccacatcacctagattcaccatcaccacaccttatccacacccacgcgccgcctcttctttcttacaggtgaaagctttccaacgcggcgactttgaccgtttggctgataacgttaagtcaggtaaagcatggagagacgcgtggagaagcgctaacgatggattcgagcaattcgtttttgaggctaagaaaaccgctgagcgaattgatcgccaatacgctgtttctcgccgctttagctccgctgctagctcagccgctgaccgtgctcgtgagattgatcgtgagtttgggattactcctcgtgttaggactgtctctgccgatttcagtagaaatttccctaagtacaggaagcaattcagtgcattcttgaatacaccgcttggtggaagttttgctactattttcttcctttggtttgctctctctggatggctgttccgagttataataatcgccacttgggttcttccaattgctggccctcttctcattggtgcagtcgccaacaactttgtcatcaagggagaatgcccagcatgtaagaggcagtttatagggtacaagaaccaaatcatcagatgtgagggatgtgggaacatagtgtggcaaccacaaggcgatttcttctcaaaagatggcaacaacaacaacaacaataataatagcaagggaaactctaaaaagccacctaagtcccaaatcattgatgtcgattttgaggagaaatgattattagagacgagaatgaagcagaaggctctattggtgcactaatattcaagtgaagataaaaatatgtgtttatagctgaatcgtttactgtttttgtctgttttgagctgtagcaatcgtgttgcttgttgtgtacatgataaggtttctttgtagacgaacaaatctagtttccacaagcctagagacttgattgaaactctgaaagttcttacatgttagacaaatcatattatgaaaacaatttacatctcc

SEQ ID NO: 22558 - protein, 248 aa, Arabidopsis thaliana
  peptide (1)..(248): Ceres Seq. ID no. 12334668
  misc_feature (3)..(248): Homolog of NCBI NO: 37537000 NR Description: unknown protein [Oryza sativa (japonica
  misc_feature (83)..(248): Homolog of NCBI NO: 7486940 NR Description: hypothetical protein At2g44870 [imported] -
  misc_feature (1)..(229): Homolog of NCBI NO: 7486940 NR Description: hypothetical protein At2g44870 [imported] -
  misc_feature (1)..(248): Homolog of NCBI NO: 18406650 NR Description: expressed protein
MWPSTSPRFTITTPYPHPRAASSFLQVKAFQRGDFDRLADNVKSGKAWRDAWRSANDGFEQFVFEAKKTAERIDRQYAVSRRFSSAASSAADRAREIDREFGITPRVRTVSADFSRNFPKYRKQFSAFLNTPLGGSFATIFFLWFALSGWLFRVIIIATWVLPIAGPLLIGAVANNFVIKGECPACKRQFIGYKNQIIRCEGCGNIVWQPQGDFFSKDGNNNNNNNNSKGNSKKPPKSQIIDVDFEEK

SEQ ID NO: 22559 - DNA, 1266 bp, Arabidopsis thaliana
  misc_feature (1)..(1266): Ceres Seq. ID no. 12338255
  misc_feature: MA Experiment ID: 108434 Result: Down-regulated in Transcription
  misc_feature: MA Experiment 108434 PARAMETER Experiment Name: At_Root_Tips_cDNA_P Parameter: Tissue Value: Root Tips
  misc_feature: MA Experiment ID: 108461 Result: Up-regulated in Transcription
  misc_feature: MA Experiment 108461 PARAMETER Experiment Name: At_Germinating_Seeds_cDNA_P Parameter: Age (day) Value: 1 vs. 0
  misc_feature: MA Experiment 108461 PARAMETER Experiment Name: At_Germinating_Seeds_cDNA_P Parameter: Tissue Value: Germinating Seeds
  misc_feature: MA Experiment ID: 108462 Result: Up-regulated in Transcription
  misc_feature: MA Experiment 108462 PARAMETER Experiment Name: At_Germinating_Seeds_cDNA_P Parameter: Age (day) Value: 2 vs. 0
  misc_feature: MA Experiment 108462 PARAMETER Experiment Name: At_Germinating_Seeds_cDNA_P Parameter: Tissue Value: Germinating Seeds
  misc_feature: MA Experiment ID: 108463 Result: Up-regulated in Transcription
  misc_feature: MA Experiment 108463 PARAMETER Experiment Name: At_Germinating_Seeds_cDNA_P Parameter: Age (day) Value: 3 vs. 0
  misc_feature: MA Experiment 108463 PARAMETER Experiment Name: At_Germinating_Seeds_cDNA_P Parameter: Tissue Value: Germinating Seeds
  misc_feature: MA Experiment ID: 108464 Result: Up-regulated in Transcription
  misc_feature: MA Experiment 108464 PARAMETER Experiment Name: At_Germinating_Seeds_cDNA_P Parameter: Age (day) Value: 4 vs. 0
  misc_feature: MA Experiment 108464 PARAMETER Experiment Name: At_Germinating_Seeds_cDNA_P Parameter: Tissue Value: Germinating Seeds
  misc_feature: MA Experiment ID: 108607 Result: Up-regulated in Transcription
  misc_feature: MA Experiment 108607 PARAMETER Experiment Name: At_100uM_ABA_cDNA_P Parameter: Timepoint (hr) Value: 4
  misc_feature: MA Experiment 108607 PARAMETER Experiment Name: At_100uM_ABA_cDNA_P Parameter: Tissue Value: Aerial
  misc_feature: MA Experiment 108607 PARAMETER Experiment Name: At_100uM_ABA_cDNA_P Parameter: Treatment Value: 100uM ABA vs. No Treatment
  misc_feature: MA Experiment ID: 20000090 Result: Down-regulated in Transcription
  misc_feature: MA Experiment ID: 20000180 Result: Up-regulated in Transcription
  misc_feature: MA Experiment 20000180 PARAMETER Experiment Name: At_Germinating_Seeds_P Parameter: Age (hr) Value: 24 vs. 0
  misc_feature: MA Experiment 20000180 PARAMETER Experiment Name: At_Germinating_Seeds_P Parameter: Tissue Value: Germinating Seeds
  misc_feature: MA Experiment ID: 20000185 Result: Up-regulated in Transcription
  misc_feature: MA Experiment 20000185 PARAMETER Experiment Name: At_Roots__P Parameter: Age (day) Value: 7 vs. 21
  misc_feature: MA Experiment 20000185 PARAMETER Experiment Name: At_Roots__P Parameter: Organism Value: A. thaliana
  misc_feature: MA Experiment 20000185 PARAMETER Experiment Name: At_Roots__P Parameter: Tissue Value: Roots vs. Whole Plant
  misc_feature: MA Experiment ID: 20000224 Result: Up-regulated in Transcription
  misc_feature: MA Experiment ID: 20000234 Result: Down-regulated in Transcription
  misc_feature: MA Experiment 20000234 PARAMETER Experiment Name: At_Siliques_P Parameter: Age (day) Value: 21
  misc_feature: MA Experiment 20000234 PARAMETER Experiment Name: At_Siliques_P Parameter: Organism Value: A. thaliana
  misc_feature: MA Experiment 20000234 PARAMETER Experiment Name: At_Siliques_P Parameter: Plant Line Value: WS
  misc_feature: MA Experiment 20000234 PARAMETER Experiment Name: At_Siliques_P Parameter: Tissue Value: Less Than 5mm Siliques vs. Whole Plant
  misc_feature: MA Experiment ID: 20000439 Result: Up-regulated in Transcription
  misc_feature: MA Experiment 20000439 PARAMETER Experiment Name: At_Roots__P Parameter: Age (day) Value: 14 vs. 21
  misc_feature: MA Experiment 20000439 PARAMETER Experiment Name: At_Roots__P Parameter: Organism Value: A. thaliana
  misc_feature: MA Experiment 20000439 PARAMETER Experiment Name: At_Roots__P Parameter: Tissue Value: Roots vs. Whole Plant
  misc_feature: MA Experiment ID: 20000455 Result: Up-regulated in Transcription
  misc_feature: MA Experiment 20000455 PARAMETER Experiment Name: At_100uM_ABA_P Parameter: Age (day) Value: 16
  misc_feature: MA Experiment 20000455 PARAMETER Experiment Name: At_100uM_ABA_P Parameter: Organism Value: A. thaliana
  misc_feature: MA Experiment 20000455 PARAMETER Experiment Name: At_100uM_ABA_P Parameter: Plant Line Value: WS
  misc_feature: MA Experiment 20000455 PARAMETER Experiment Name: At_100uM_ABA_P Parameter: Timepoint (hr) Value: 48
  misc_feature: MA Experiment 20000455 PARAMETER Experiment Name: At_100uM_ABA_P Parameter: Tissue Value: Aerial
  misc_feature: MA Experiment 20000455 PARAMETER Experiment Name: At_100uM_ABA_P Parameter: Treatment Value: 100uM ABA vs. No Treatment
  misc_feature: MA Experiment ID: 20001451 Result: Down-regulated in Transcription
  misc_feature: MA Experiment 20001451 PARAMETER Experiment Name: At_Far-red-induction_P Parameter: Age (day) Value: 7
  misc_feature: MA Experiment 20001451 PARAMETER Experiment Name: At_Far-red-induction_P Parameter: Light Value: Far-red vs. White
  misc_feature: MA Experiment 20001451 PARAMETER Experiment Name: At_Far-red-induction_P Parameter: Organism Value: A. thaliana
  misc_feature: MA Experiment 20001451 PARAMETER Experiment Name: At_Far-red-induction_P Parameter: Plant Line Value: Columbia
  misc_feature: MA Experiment 20001451 PARAMETER Experiment Name: At_Far-red-induction_P Parameter: Timepoint (hr) Value: 24
  misc_feature: MA Experiment 20001451 PARAMETER Experiment Name: At_Far-red-induction_P Parameter: Tissue Value: Whole Plant
acccatcacacaatcctcaaaacagagtaacccaaaaaacagagcaatctctaaaaaatctcaagaaacctcactaaaatgggttcaacggcggagacacaattaactccggtgcaagtcaccgacgacgaagctgccctcttcgccatgcaactagccagtgcttccgttcttccgatggctttaaaatccgccttagagcttgaccttcttgagattatggccaagaatggttctcccatgtctcctaccgagatcgcttctaaacttccgaccaaaaaccctgaagctccggtcatgctcgaccgtatcctccgtcttcttacgtcttactccgtcttaacctgctccaaccgtaaactttccggtgatggcgttgaacggatttacgggcttggtccggtttgcaagtatttgaccaagaacgaagatggtgtttccattgctgctctttgtcttatgaaccaagacaaggttctcatggaaagctggtaccatttgaaggatgcaattcttgatggtgggattccattcaacaaggcttatggaatgagcgcgttcgagtaccacgggactgaccctagattcaacaaggtctttaacaatggaatgtctaaccattccacaatcaccatgaagaagattcttgagacctataagggttttgaaggattgacttctttggttgatgttggtggtggcattggtgctacactcaaaatgattgtctccaagtaccctaatcttaaaggcatcaactttgatctcccacatgtcattgaagatgctccttctcatcctggtattgagcatgttggaggagatatgtttgtaagtgtccctaaaggtgatgccatattcatgaagtggatatgtcatgactggagtgacgaacattgcgtgaaattcttgaaaaactgctacgagtcacttccagaggatggaaaagtgatattagcagagtgtatacttccagagacaccagactcaagcctctcaaccaaacaagtagtccatgtcgattgcattatgttggctcacaatcccggaggcaaagaacgaaccgagaaagagtttgaggcattagccaaagcatcaggcttcaagggcatcaaagttgtctgcgacgcttttggtgttaaccttattgagttactcaagaagctctaaaaacaaacaatgttcctatgaagatgatttatatgtaaacattatctcatatctccttccacggttccaaaactatgctgtttaataatggttttt

SEQ ID NO: 22560 - protein, 363 aa, Arabidopsis thaliana
  peptide (1)..(363): Ceres Seq. ID no. 12338256
  misc_feature (97)..(338): Pfam Name: O-methyltransferase Pfam Description: O-methyltransferase
  misc_feature (1)..(361): Homolog of NCBI NO: 38502831 NR Description: (Iso)eugenol O-methyltransferase
  misc_feature (1)..(361): Homolog of NCBI NO: 38565551 NR Description: caffeic acid O-methyltransferase [Ammi majus]
  misc_feature (1)..(358): Homolog of NCBI NO: 7528266 NR Description: caffeic acid O-3-methyltransferase [Populus
  misc_feature (1)..(361): Homolog of NCBI NO: 444327 NR Description: O-methyltransferase
  misc_feature (1)..(361): Homolog of NCBI NO: 7332271 NR Description: O-methyltransferase
  misc_feature (1)..(362): Homolog of NCBI NO: 231757 NR Description: Caffeic acid 3-O-methyltransferase
  misc_feature (1)..(362): Homolog of NCBI NO: 3913295 NR Description: Caffeic acid 3-O-methyltransferase
  misc_feature (1)..(363): Homolog of NCBI NO: 6760443 NR Description: O-methyltransferase [Fragaria x ananassa]
  misc_feature (1)..(363): Homolog of NCBI NO: 2781394 NR Description: O-methyltransferase 1 [Arabidopsis thaliana]
  misc_feature (1)..(363): Homolog of NCBI NO: 15239571 NR Description: O-methyltransferase 1
MGSTAETQLTPVQVTDDEAALFAMQLASASVLPMALKSALELDLLEIMAKNGSPMSPTEIASKLPTKNPEAPVMLDRILRLLTSYSVLTCSNRKLSGDGVERIYGLGPVCKYLTKNEDGVSIAALCLMNQDKVLMESWYHLKDAILDGGIPFNKAYGMSAFEYHGTDPRFNKVFNNGMSNHSTITMKKILETYKGFEGLTSLVDVGGGIGATLKMIVSKYPNLKGINFDLPHVIEDAPSHPGIEHVGGDMFVSVPKGDAIFMKWICHDWSDEHCVKFLKNCYESLPEDGKVILAECILPETPDSSLSTKQVVHVDCIMLAHNPGGKERTEKEFEALAKASGFKGIKVVCDAFGVNLIELLKKL

SEQ ID NO: 22561 - protein, 340 aa, Arabidopsis thaliana
  peptide (1)..(340): Ceres Seq. ID no. 12338257
  misc_feature (74)..(315): Pfam Name: O-methyltransferase Pfam Description: O-methyltransferase
  misc_feature (1)..(338): Homolog of NCBI NO: 38502831 NR Description: (Iso)eugenol O-methyltransferase
  misc_feature (1)..(338): Homolog of NCBI NO: 38565551 NR Description: caffeic acid O-methyltransferase [Ammi majus]
  misc_feature (1)..(335): Homolog of NCBI NO: 7528266 NR Description: caffeic acid O-3-methyltransferase [Populus
  misc_feature (1)..(338): Homolog of NCBI NO: 444327 NR Description: O-methyltransferase
  misc_feature (1)..(338): Homolog of NCBI NO: 7332271 NR Description: O-methyltransferase
  misc_feature (1)..(339): Homolog of NCBI NO: 231757 NR Description: Caffeic acid 3-O-methyltransferase
  misc_feature (1)..(339): Homolog of NCBI NO: 3913295 NR Description: Caffeic acid 3-O-methyltransferase
  misc_feature (1)..(340): Homolog of NCBI NO: 6760443 NR Description: O-methyltransferase [Fragaria x ananassa]
  misc_feature (1)..(340): Homolog of NCBI NO: 2781394 NR Description: O-methyltransferase 1 [Arabidopsis thaliana]
  misc_feature (1)..(340): Homolog of NCBI NO: 15239571 NR Description: O-methyltransferase 1
MQLASASVLPMALKSALELDLLEIMAKNGSPMSPTEIASKLPTKNPEAPVMLDRILRLLTSYSVLTCSNRKLSGDGVERIYGLGPVCKYLTKNEDGVSIAALCLMNQDKVLMESWYHLKDAILDGGIPFNKAYGMSAFEYHGTDPRFNKVFNNGMSNHSTITMKKILETYKGFEGLTSLVDVGGGIGATLKMIVSKYPNLKGINFDLPHVIEDAPSHPGIEHVGGDMFVSVPKGDAIFMKWICHDWSDEHCVKFLKNCYESLPEDGKVILAECILPETPDSSLSTKQVVHVDCIMLAHNPGGKERTEKEFEALAKASGFKGIKVVCDAFGVNLIELLKKL

SEQ ID NO: 22562 - protein, 330 aa, Arabidopsis thaliana
  peptide (1)..(330): Ceres Seq. ID no. 12338258
  misc_feature (64)..(305): Pfam Name: O-methyltransferase Pfam Description: O-methyltransferase
  misc_feature (1)..(328): Homolog of NCBI NO: 38502831 NR Description: (Iso)eugenol O-methyltransferase
  misc_feature (1)..(328): Homolog of NCBI NO: 38565551 NR Description: caffeic acid O-methyltransferase [Ammi majus]
  misc_feature (1)..(325): Homolog of NCBI NO: 7528266 NR Description: caffeic acid O-3-methyltransferase [Populus
  misc_feature (1)..(328): Homolog of NCBI NO: 444327 NR Description: O-methyltransferase
  misc_feature (1)..(328): Homolog of NCBI NO: 7332271 NR Description: O-methyltransferase
  misc_feature (1)..(329): Homolog of NCBI NO: 231757 NR Description: Caffeic acid 3-O-methyltransferase
  misc_feature (1)..(329): Homolog of NCBI NO: 3913295 NR Description: Caffeic acid 3-O-methyltransferase
  misc_feature (1)..(330): Homolog of NCBI NO: 6760443 NR Description: O-methyltransferase [Fragaria x ananassa]
  misc_feature (1)..(330): Homolog of NCBI NO: 2781394 NR Description: O-methyltransferase 1 [Arabidopsis thaliana]
  misc_feature (1)..(330): Homolog of NCBI NO: 15239571 NR Description: O-methyltransferase 1
MALKSALELDLLEIMAKNGSPMSPTEIASKLPTKNPEAPVMLDRILRLLTSYSVLTCSNRKLSGDGVERIYGLGPVCKYLTKNEDGVSIAALCLMNQDKVLMESWYHLKDAILDGGIPFNKAYGMSAFEYHGTDPRFNKVFNNGMSNHSTITMKKILETYKGFEGLTSLVDVGGGIGATLKMIVSKYPNLKGINFDLPHVIEDAPSHPGIEHVGGDMFVSVPKGDAIFMKWICHDWSDEHCVKFLKNCYESLPEDGKVILAECILPETPDSSLSTKQVVHVDCIMLAHNPGGKERTEKEFEALAKASGFKGIKVVCDAFGVNLIELLKKL

SEQ ID NO: 22563 - DNA, 1149 bp, Arabidopsis thaliana
  misc_feature (1)..(1149): Ceres Seq. ID no. 12334999
  misc_feature: MA Experiment ID: 108462 Result: Down-regulated in Transcription
  misc_feature: MA Experiment 108462 PARAMETER Experiment Name: At_Germinating_Seeds_cDNA_P Parameter: Age (day) Value: 2 vs. 0
  misc_feature: MA Experiment 108462 PARAMETER Experiment Name: At_Germinating_Seeds_cDNA_P Parameter: Tissue Value: Germinating Seeds
  misc_feature: MA Experiment ID: 108463 Result: Down-regulated in Transcription
  misc_feature: MA Experiment 108463 PARAMETER Experiment Name: At_Germinating_Seeds_cDNA_P Parameter: Age (day) Value: 3 vs. 0
  misc_feature: MA Experiment 108463 PARAMETER Experiment Name: At_Germinating_Seeds_cDNA_P Parameter: Tissue Value: Germinating Seeds
  misc_feature: MA Experiment ID: 108464 Result: Down-regulated in Transcription
  misc_feature: MA Experiment 108464 PARAMETER Experiment Name: At_Germinating_Seeds_cDNA_P Parameter: Age (day) Value: 4 vs. 0
  misc_feature: MA Experiment 108464 PARAMETER Experiment Name: At_Germinating_Seeds_cDNA_P Parameter: Tissue Value: Germinating Seeds
  misc_feature: MA Experiment ID: 20000087 Result: Down-regulated in Transcription
  misc_feature: MA Experiment 20000087 PARAMETER Experiment Name: At_100uM_ABA_Mutants_cDNA_P Parameter: Plant Line Value: WS
  misc_feature: MA Experiment 20000087 PARAMETER Experiment Name: At_100uM_ABA_Mutants_cDNA_P Parameter: Timepoint (hr) Value: 6
  misc_feature: MA Experiment 20000087 PARAMETER Experiment Name: At_100uM_ABA_Mutants_cDNA_P Parameter: Tissue Value: Aerial
  misc_feature: MA Experiment 20000087 PARAMETER Experiment Name: At_100uM_ABA_Mutants_cDNA_P Parameter: Treatment Value: 100uM ABA vs. No Treatment
  misc_feature: MA Experiment ID: 20000573 Result: Down-regulated in Transcription
  misc_feature: MA Experiment 20000573 PARAMETER Experiment Name: At_100uM_ABA_Mutants__P Parameter: Organism Value: A. thaliana
  misc_feature: MA Experiment 20000573 PARAMETER Experiment Name: At_100uM_ABA_Mutants__P Parameter: Plant Line Value: CS22 vs. Ler wt
  misc_feature: MA Experiment 20000573 PARAMETER Experiment Name: At_100uM_ABA_Mutants__P Parameter: Timepoint (hr) Value: N/A
  misc_feature: MA Experiment 20000573 PARAMETER Experiment Name: At_100uM_ABA_Mutants__P Parameter: Tissue Value: Whole Plant
  misc_feature: MA Experiment 20000573 PARAMETER Experiment Name: At_100uM_ABA_Mutants__P Parameter: Treatment Value: None
  misc_feature: MA Experiment ID: 20001248 Result: Down-regulated in Transcription
  misc_feature: MA Experiment 20001248 PARAMETER Experiment Name: At_Far-red-induction_P Parameter: Age (day) Value: 7
  misc_feature: MA Experiment 20001248 PARAMETER Experiment Name: At_Far-red-induction_P Parameter: Light Value: Far-red vs. White
  misc_feature: MA Experiment 20001248 PARAMETER Experiment Name: At_Far-red-induction_P Parameter: Organism Value: A. thaliana
  misc_feature: MA Experiment 20001248 PARAMETER Experiment Name: At_Far-red-induction_P Parameter: Plant Line Value: Columbia
  misc_feature: MA Experiment 20001248 PARAMETER Experiment Name: At_Far-red-induction_P Parameter: Timepoint (hr) Value: 4
  misc_feature: MA Experiment 20001248 PARAMETER Experiment Name: At_Far-red-induction_P Parameter: Tissue Value: Whole Plant
aacaattaaagtgagaattttcctgaagaagaagaacttttgctttttttctgggtttgcttttttgttgtgtcaatgaaatgggagaaatggagatcgaagaaatcgaagctgttcttgagaaaatctgggatctacatgacaagcttagcgatgagattcacttgatttcgaagtctcactttctcaaatcggttaaaccttcaaatagatcggagaagagaaagaatcctcacggaaattccggcgaagataagcgacctggttatgttttcatcaaaggattcgccgtcgatgataacgactccacgattcaggaggcgaagagtcttaacgcaattcgaaccgctcttgagaaccttgaagaccagctcgagtttttccatactatacatacacagcagcgaacagagaaagatgttgcgattgctcggcttgaacagagcagaatattactagcaatgagattagctgaacaccacggcaagaactatggagtcctagaggaagctcttgcatttgttgggagcattaaatccacctcgcattacgtttcacctgatcacctctacgattcctctcgaaacccagacggagcaaactctactccatatggaataaagtcaaactttgtaatcaactcatttgcctcgactttcgggtttgctaaaagagcacttggattcaaccatgtgaaaggcgtacttggaaacgctgctatatttaccataagcgtggtcgctatgctacatcttcaccaagtggctactagtgaacatcatctacagaagaaagaagacagattctacagaagccaacagaggaaaacatacggaagagataagtcttcaggtgacagaagtttggatcacttggacgtaatgatggctcgtggttaagaccagagatcgaacttgtctacacgtgagaaaactaaagaagagaagagatattgttgctctcaaaaggtttcgatattatcagcaaaaggataagaatttggaggcaaagtgttggaattttctgagctcgtctgatgcaaatattgttcctttcttctaattttgattttcaatcactgtggttaatgttttgtttgttttgtttggttttgttgatttcaagtgtggttaggctttcttgtaaacc

SEQ ID NO: 22564 - protein, 272 aa, Arabidopsis thaliana
  peptide (1)..(272): Ceres Seq. ID no. 12335000
  misc_feature (4)..(272): Homolog of NCBI NO: 34904152 NR Description: P0417G05.19 [Oryza sativa (japonica
  misc_feature (1)..(272): Homolog of NCBI NO: 15238704 NR Description: putative protein
  misc_feature (4)..(272): Homolog of NCBI NO: 21592900 NR Description: unknown [Arabidopsis thaliana]
MGEMEIEEIEAVLEKIWDLHDKLSDEIHLISKSHFLKSVKPSNRSEKRKNPHGNSGEDKRPGYVFIKGFAVDDNDSTIQEAKSLNAIRTALENLEDQLEFFHTIHTQQRTEKDVAIARLEQSRILLAMRLAEHHGKNYGVLEEALAFVGSIKSTSHYVSPDHLYDSSRNPDGANSTPYGIKSNFVINSFASTFGFAKRALGFNHVKGVLGNAAIFTISVVAMLHLHQVATSEHHLQKKEDRFYRSQQRKTYGRDKSSGDRSLDHLDVMMARG

SEQ ID NO: 22565 - protein, 269 aa, Arabidopsis thaliana
  peptide (1)..(269): Ceres Seq. ID no. 12335001
  misc_feature (1)..(269): Homolog of NCBI NO: 34904152 NR Description: P0417G05.19 [Oryza sativa (japonica
  misc_feature (1)..(269): Homolog of NCBI NO: 15238704 NR Description: putative protein
  misc_feature (1)..(269): Homolog of NCBI NO: 21592900 NR Description: unknown [Arabidopsis thaliana]
MEIEEIEAVLEKIWDLHDKLSDEIHLISKSHFLKSVKPSNRSEKRKNPHGNSGEDKRPGYVFIKGFAVDDNDSTIQEAKSLNAIRTALENLEDQLEFFHTIHTQQRTEKDVAIARLEQSRILLAMRLAEHHGKNYGVLEEALAFVGSIKSTSHYVSPDHLYDSSRNPDGANSTPYGIKSNFVINSFASTFGFAKRALGFNHVKGVLGNAAIFTISVVAMLHLHQVATSEHHLQKKEDRFYRSQQRKTYGRDKSSGDRSLDHLDVMMARG

SEQ ID NO: 22566 - protein, 145 aa, Arabidopsis thaliana
  peptide (1)..(145): Ceres Seq. ID no. 12335002
  misc_feature (1)..(145): Homolog of NCBI NO: 34904152 NR Description: P0417G05.19 [Oryza sativa (japonica
  misc_feature (1)..(145): Homolog of NCBI NO: 15238704 NR Description: putative protein
  misc_feature (1)..(145): Homolog of NCBI NO: 21592900 NR Description: unknown [Arabidopsis thaliana]
MRLAEHHGKNYGVLEEALAFVGSIKSTSHYVSPDHLYDSSRNPDGANSTPYGIKSNFVINSFASTFGFAKRALGFNHVKGVLGNAAIFTISVVAMLHLHQVATSEHHLQKKEDRFYRSQQRKTYGRDKSSGDRSLDHLDVMMARG

SEQ ID NO: 22567 - DNA, 1784 bp, Arabidopsis thaliana
  misc_feature (1)..(1784): Ceres Seq. ID no. 13580587
  misc_feature: MA Experiment ID: 108434 Result: Down-regulated in Transcription
  misc_feature: MA Experiment 108434 PARAMETER Experiment Name: At_Root_Tips_cDNA_P Parameter: Tissue Value: Root Tips
  misc_feature: MA Experiment ID: 108435 Result: Down-regulated in Transcription
  misc_feature: MA Experiment 108435 PARAMETER Experiment Name: At_stm_Mutants_cDNA_P Parameter: Plant Line Value: wt Landsburg vs stm
  misc_feature: MA Experiment 108435 PARAMETER Experiment Name: At_stm_Mutants_cDNA_P Parameter: Tissue Value: Shoot Apical Meristem Region
  misc_feature: MA Experiment ID: 108461 Result: Up-regulated in Transcription
  misc_feature: MA Experiment 108461 PARAMETER Experiment Name: At_Germinating_Seeds_cDNA_P Parameter: Age (day) Value: 1 vs. 0
  misc_feature: MA Experiment 108461 PARAMETER Experiment Name: At_Germinating_Seeds_cDNA_P Parameter: Tissue Value: Germinating Seeds
  misc_feature: MA Experiment ID: 108462 Result: Up-regulated in Transcription
  misc_feature: MA Experiment 108462 PARAMETER Experiment Name: At_Germinating_Seeds_cDNA_P Parameter: Age (day) Value: 2 vs. 0
  misc_feature: MA Experiment 108462 PARAMETER Experiment Name: At_Germinating_Seeds_cDNA_P Parameter: Tissue Value: Germinating Seeds
  misc_feature: MA Experiment ID: 108463 Result: Up-regulated in Transcription
  misc_feature: MA Experiment 108463 PARAMETER Experiment Name: At_Germinating_Seeds_cDNA_P Parameter: Age (day) Value: 3 vs. 0
  misc_feature: MA Experiment 108463 PARAMETER Experiment Name: At_Germinating_Seeds_cDNA_P Parameter: Tissue Value: Germinating Seeds
  misc_feature: MA Experiment ID: 108464 Result: Up-regulated in Transcription
  misc_feature: MA Experiment 108464 PARAMETER Experiment Name: At_Germinating_Seeds_cDNA_P Parameter: Age (day) Value: 4 vs. 0
  misc_feature: MA Experiment 108464 PARAMETER Experiment Name: At_Germinating_Seeds_cDNA_P Parameter: Tissue Value: Germinating Seeds
  misc_feature: MA Experiment ID: 108488 Result: Up-regulated in Transcription
  misc_feature: MA Experiment ID: 108595 Result: Down-regulated in Transcription
  misc_feature: MA Experiment 108595 PARAMETER Experiment Name: At_Ler-pi_Ovule_cDNA_P Parameter: Plant Line Value: null
  misc_feature: MA Experiment ID: 20000087 Result: Down-regulated in Transcription
  misc_feature: MA Experiment 20000087 PARAMETER Experiment Name: At_100uM_ABA_Mutants_cDNA_P Parameter: Plant Line Value: WS
  misc_feature: MA Experiment 20000087 PARAMETER Experiment Name: At_100uM_ABA_Mutants_cDNA_P Parameter: Timepoint (hr) Value: 6
  misc_feature: MA Experiment 20000087 PARAMETER Experiment Name: At_100uM_ABA_Mutants_cDNA_P Parameter: Tissue Value: Aerial
  misc_feature: MA Experiment 20000087 PARAMETER Experiment Name: At_100uM_ABA_Mutants_cDNA_P Parameter: Treatment Value: 100uM ABA vs. No Treatment
  misc_feature: MA Experiment ID: 20000117 Result: Down-regulated in Transcription
  misc_feature: MA Experiment 20000117 PARAMETER Experiment Name: At_100uM_ABA_Mutants_cDNA_P Parameter: Plant Line Value: Columbia
  misc_feature: MA Experiment 20000117 PARAMETER Experiment Name: At_100uM_ABA_Mutants_cDNA_P Parameter: Timepoint (hr) Value: 6
  misc_feature: MA Experiment 20000117 PARAMETER Experiment Name: At_100uM_ABA_Mutants_cDNA_P Parameter: Tissue Value: Aerial
  misc_feature: MA Experiment 20000117 PARAMETER Experiment Name: At_100uM_ABA_Mutants_cDNA_P Parameter: Treatment Value: 100uM ABA vs. No Treatment
  misc_feature: MA Experiment ID: 20000180 Result: Up-regulated in Transcription
  misc_feature: MA Experiment 20000180 PARAMETER Experiment Name: At_Germinating_Seeds_P Parameter: Age (hr) Value: 24 vs. 0
  misc_feature: MA Experiment 20000180 PARAMETER Experiment Name: At_Germinating_Seeds_P Parameter: Tissue Value: Germinating Seeds
  misc_feature: MA Experiment ID: 20000185 Result: Down-regulated in Transcription
  misc_feature: MA Experiment 20000185 PARAMETER Experiment Name: At_Roots__P Parameter: Age (day) Value: 7 vs. 21
  misc_feature: MA Experiment 20000185 PARAMETER Experiment Name: At_Roots__P Parameter: Organism Value: A. thaliana
  misc_feature: MA Experiment 20000185 PARAMETER Experiment Name: At_Roots__P Parameter: Tissue Value: Roots vs. Whole Plant
  misc_feature: MA Experiment ID: 20000214 Result: Up-regulated in Transcription
  misc_feature: MA Experiment 20000214 PARAMETER Experiment Name: At_4deg_Cold_P Parameter: Timepoint (hr) Value: 6
  misc_feature: MA Experiment ID: 20000437 Result: Down-regulated in Transcription
  misc_feature: MA Experiment 20000437 PARAMETER Experiment Name: At_Drought_P Parameter: Age (day) Value: 8
  misc_feature: MA Experiment 20000437 PARAMETER Experiment Name: At_Drought_P Parameter: Organism Value: A. thaliana
  misc_feature: MA Experiment 20000437 PARAMETER Experiment Name: At_Drought_P Parameter: Plant Line Value: WS
  misc_feature: MA Experiment 20000437 PARAMETER Experiment Name: At_Drought_P Parameter: Timepoint (hr) Value: 24
  misc_feature: MA Experiment 20000437 PARAMETER Experiment Name: At_Drought_P Parameter: Tissue Value: Whole Plant
  misc_feature: MA Experiment 20000437 PARAMETER Experiment Name: At_Drought_P Parameter: Treatment Value: Drought vs. No Drought
  misc_feature: MA Experiment ID: 20000438 Result: Up-regulated in Transcription
  misc_feature: MA Experiment 20000438 PARAMETER Experiment Name: At_Shoots__P Parameter: Age (day) Value: 14
  misc_feature: MA Experiment 20000438 PARAMETER Experiment Name: At_Shoots__P Parameter: Tissue Value: Shoots vs. Whole Plant
  misc_feature: MA Experiment ID: 20000439 Result: Down-regulated in Transcription
  misc_feature: MA Experiment 20000439 PARAMETER Experiment Name: At_Roots__P Parameter: Age (day) Value: 14 vs. 21
  misc_feature: MA Experiment 20000439 PARAMETER Experiment Name: At_Roots__P Parameter: Organism Value: A. thaliana
  misc_feature: MA Experiment 20000439 PARAMETER Experiment Name: At_Roots__P Parameter: Tissue Value: Roots vs. Whole Plant
  misc_feature: MA Experiment ID: 20000495 Result: Down-regulated in Transcription
  misc_feature: MA Experiment 20000495 PARAMETER Experiment Name: At_Guard_Cells_P Parameter: Harvest Date Value: 8/2/2002
  misc_feature: MA Experiment 20000495 PARAMETER Experiment Name: At_Guard_Cells_P Parameter: Organism Value: A. thaliana
  misc_feature: MA Experiment 20000495 PARAMETER Experiment Name: At_Guard_Cells_P Parameter: Tissue Value: Guard Cells vs. Leaves
  misc_feature: MA Experiment ID: 20001450 Result: Down-regulated in Transcription
  misc_feature: MA Experiment 20001450 PARAMETER Experiment Name: At_Far-red-induction_P Parameter: Age (day) Value: 7
  misc_feature: MA Experiment 20001450 PARAMETER Experiment Name: At_Far-red-induction_P Parameter: Light Value: Far-red vs. White
  misc_feature: MA Experiment 20001450 PARAMETER Experiment Name: At_Far-red-induction_P Parameter: Organism Value: A. thaliana
  misc_feature: MA Experiment 20001450 PARAMETER Experiment Name: At_Far-red-induction_P Parameter: Plant Line Value: Columbia
  misc_feature: MA Experiment 20001450 PARAMETER Experiment Name: At_Far-red-induction_P Parameter: Timepoint (hr) Value: 8
  misc_feature: MA Experiment 20001450 PARAMETER Experiment Name: At_Far-red-induction_P Parameter: Tissue Value: Whole Plant
  misc_feature: MA Experiment ID: 20001451 Result: Down-regulated in Transcription
  misc_feature: MA Experiment 20001451 PARAMETER Experiment Name: At_Far-red-induction_P Parameter: Age (day) Value: 7
  misc_feature: MA Experiment 20001451 PARAMETER Experiment Name: At_Far-red-induction_P Parameter: Light Value: Far-red vs. White
  misc_feature: MA Experiment 20001451 PARAMETER Experiment Name: At_Far-red-induction_P Parameter: Organism Value: A. thaliana
  misc_feature: MA Experiment 20001451 PARAMETER Experiment Name: At_Far-red-induction_P Parameter: Plant Line Value: Columbia
  misc_feature: MA Experiment 20001451 PARAMETER Experiment Name: At_Far-red-induction_P Parameter: Timepoint (hr) Value: 24
  misc_feature: MA Experiment 20001451 PARAMETER Experiment Name: At_Far-red-induction_P Parameter: Tissue Value: Whole Plant
  misc_feature: MA Experiment ID: 20001557 Result: Down-regulated in Transcription
  misc_feature: MA Experiment 20001557 PARAMETER Experiment Name: At_Drought_Soil_Dry_P Parameter: Age (day) Value: 27
  misc_feature: MA Experiment 20001557 PARAMETER Experiment Name: At_Drought_Soil_Dry_P Parameter: Organism Value: A. thaliana
  misc_feature: MA Experiment 20001557 PARAMETER Experiment Name: At_Drought_Soil_Dry_P Parameter: Plant Line Value: WS
  misc_feature: MA Experiment 20001557 PARAMETER Experiment Name: At_Drought_Soil_Dry_P Parameter: Post Timepoint (hr) Value: 3
  misc_feature: MA Experiment 20001557 PARAMETER Experiment Name: At_Drought_Soil_Dry_P Parameter: Post-Treatment Value: Re-Water vs. No Drought
  misc_feature: MA Experiment 20001557 PARAMETER Experiment Name: At_Drought_Soil_Dry_P Parameter: Timepoint (day) Value: 13
  misc_feature: MA Experiment 20001557 PARAMETER Experiment Name: At_Drought_Soil_Dry_P Parameter: Treatment Value: Drought vs. No Drought
  misc_feature: MA Experiment ID: 20001560 Result: Down-regulated in Transcription
  misc_feature: MA Experiment 20001560 PARAMETER Experiment Name: At_Drought_Soil_Dry_P Parameter: Age (day) Value: 28
  misc_feature: MA Experiment 20001560 PARAMETER Experiment Name: At_Drought_Soil_Dry_P Parameter: Organism Value: A. thaliana
  misc_feature: MA Experiment 20001560 PARAMETER Experiment Name: At_Drought_Soil_Dry_P Parameter: Plant Line Value: WS
  misc_feature: MA Experiment 20001560 PARAMETER Experiment Name: At_Drought_Soil_Dry_P Parameter: Post Timepoint (hr) Value: None
  misc_feature: MA Experiment 20001560 PARAMETER Experiment Name: At_Drought_Soil_Dry_P Parameter: Post-Treatment Value: None
  misc_feature: MA Experiment 20001560 PARAMETER Experiment Name: At_Drought_Soil_Dry_P Parameter: Timepoint (day) Value: 14
  misc_feature: MA Experiment 20001560 PARAMETER Experiment Name: At_Drought_Soil_Dry_P Parameter: Treatment Value: Drought vs. No Drought
  misc_feature: MA Experiment ID: 20001905 Result: Down-regulated in Transcription
  misc_feature: MA Experiment 20001905 PARAMETER Experiment Name: At_Drought_Reproduction_P Parameter: Age (day) Value: 40
  misc_feature: MA Experiment 20001905 PARAMETER Experiment Name: At_Drought_Reproduction_P Parameter: Organism Value: A. thaliana
  misc_feature: MA Experiment 20001905 PARAMETER Experiment Name: At_Drought_Reproduction_P Parameter: Plant Line Value: WS
  misc_feature: MA Experiment 20001905 PARAMETER Experiment Name: At_Drought_Reproduction_P Parameter: Timepoint (day) Value: 10
  misc_feature: MA Experiment 20001905 PARAMETER Experiment Name: At_Drought_Reproduction_P Parameter: Tissue Value: Rosettes
  misc_feature: MA Experiment 20001905 PARAMETER Experiment Name: At_Drought_Reproduction_P Parameter: Treatment Value: Drought vs. No Drought
  misc_feature: MA Experiment ID: 20001906 Result: Down-regulated in Transcription
  misc_feature: MA Experiment 20001906 PARAMETER Experiment Name: At_Drought_Reproduction_P Parameter: Age (day) Value: 35
  misc_feature: MA Experiment 20001906 PARAMETER Experiment Name: At_Drought_Reproduction_P Parameter: Organism Value: A. thaliana
  misc_feature: MA Experiment 20001906 PARAMETER Experiment Name: At_Drought_Reproduction_P Parameter: Plant Line Value: WS
  misc_feature: MA Experiment 20001906 PARAMETER Experiment Name: At_Drought_Reproduction_P Parameter: Timepoint (day) Value: 5
  misc_feature: MA Experiment 20001906 PARAMETER Experiment Name: At_Drought_Reproduction_P Parameter: Tissue Value: Siliques
  misc_feature: MA Experiment 20001906 PARAMETER Experiment Name: At_Drought_Reproduction_P Parameter: Treatment Value: Drought vs. No Drought
  misc_feature: MA Experiment ID: 20001908 Result: Down-regulated in Transcription
  misc_feature: MA Experiment 20001908 PARAMETER Experiment Name: At_Drought_Reproduction_P Parameter: Age (day) Value: 40
  misc_feature: MA Experiment 20001908 PARAMETER Experiment Name: At_Drought_Reproduction_P Parameter: Organism Value: A. thaliana
  misc_feature: MA Experiment 20001908 PARAMETER Experiment Name: At_Drought_Reproduction_P Parameter: Plant Line Value: WS
  misc_feature: MA Experiment 20001908 PARAMETER Experiment Name: At_Drought_Reproduction_P Parameter: Timepoint (day) Value: 10
  misc_feature: MA Experiment 20001908 PARAMETER Experiment Name: At_Drought_Reproduction_P Parameter: Tissue Value: Siliques
  misc_feature: MA Experiment 20001908 PARAMETER Experiment Name: At_Drought_Reproduction_P Parameter: Treatment Value: Drought vs. No Drought
aagataaacccaattttgttatttttgttctctcttctctctcgttcatgtttcaaatctgtttctagggtttcacaaaccagagatagagagaggtttagcgaaaaatggcgatggccatggctcttcgaaggctttcttcttcaattgacaaacccattcgtcctcttattcgatccacttcatgttacatgtcttctttgcccagtgaagctgttgatgagaaggaaagatctcgtgtcacttggccaaaacagcttaacgcacctttagaggaggttgatcctgagattgctgacattattgagcatgagaaagctagacaatggaagggacttgaacttattccatctgagaacttcacatctgtgtcggtgatgcaagctgttgggtctgtcatgactaacaaatacagtgaaggctatcctggtgccagatactatggaggaaatgagtatatagacatggcagaaaccttatgccagaagcgcgctcttgaagctttccggttagatcctgaaaagtggggagtgaatgttcaacctttgtctggatctcctgccaacttccatgtgtacactgcattgttaaagcctcatgaaagaatcatggcacttgatcttcctcatggtggtcatctttctcatggttatcagactgacaccaagaagatatcagctgtgtctatcttctttgaaacaatgccctatagattggacgagagcactggctacatcgactacgatcagatggagaaaagtgctactcttttcaggccaaaaattgattgttgctggtgcaagtgcttatgctagattgtatgactatgcccgcatcagaaaggtctgtaacaagcaaaaagctgtaatgctagcagatatggcacacatcagtggtttggttgctgctaatgtaatcccttcaccgttcgactatgctgatgttgtaaccaccacaactcacaagtcacttcgtggaccccgtggagccatgattttcttcagaaagggtgttaaggaaattaacaagcaagggaaagaggttttgtatgattttgaagacaagatcaaccaagctgtcttccctggtcttcaaggtggtccacacaaccacactatcacaggactagctgttgctttgaaacaggcaactacttcagagtacaaagcataccaagaacaagtcctgagtaacagtgcaaagtttgctcagactctaatggagagaggatatgaacttgtttctggtggaactgacaaccatctggttctagtgaatctaaagcccaagggaattgatggatctagagttgagaaagtgttggaagctgttcacattgcatccaacaaaaacactgttcctggagatgtttctgccatggttcctggtggaatcagaatgggtactcctgctctcacttccagaggctttgttgaggaagactttgccaaagtagctgaatacttcgacaaagctgtgacaatagctctcaaagtcaaatctgaagctcaaggaaccaagttgaaggatttcgtgtcagcaatggaatcctcttcaaccatccaatccgagattgcgaaactgcgccatgaagtcgaggaattcgctaagcagttcccaacaattgggtttgagaaagaaaccatgaagtacaagaactaaactgtttcaccccacaagtgttttctgttatgctttgaattcccatggaatgtatagatgatacatgtaaaactctattttcacgctatgcgaaaaataatgatctgttaaattttctctct

SEQ ID NO: 22568 - protein, 354 aa, Arabidopsis thaliana
  peptide (1)..(354): Ceres Seq. ID no. 13580588
  misc_feature (62)..(290): Pfam Name: Serine hydroxymethyltransferase Pfam Description: Serine hydroxymethyltransferase
  misc_feature (62)..(354): Homolog of NCBI NO: 1707998 NR Description: SERINE HYDROXYMETHYLTRANSFERASE, MITOCHONDRIAL
  misc_feature (62)..(354): Homolog of NCBI NO: 15809972 NR Description: AT4g37930/F20D10_50 [Arabidopsis thaliana]
  misc_feature (53)..(353): Homolog of NCBI NO: 14334888 NR Description: putative glycine hydroxymethyltransferase
  misc_feature (53)..(354): Homolog of NCBI NO: 31126793 NR Description: putative glycine hydroxymethyltransferase
  misc_feature (62)..(352): Homolog of NCBI NO: 462187 NR Description: SERINE HYDROXYMETHYLTRANSFERASE, MITOCHONDRIAL
  misc_feature (62)..(354): Homolog of NCBI NO: 1346155 NR Description: Serine hydroxymethyltransferase 1, mitochondrial
  misc_feature (62)..(354): Homolog of NCBI NO: 1346156 NR Description: Serine hydroxymethyltransferase 2, mitochondrial
  misc_feature (53)..(353): Homolog of NCBI NO: 30690394 NR Description: glycine hydroxymethyltransferase - like protein
  misc_feature (53)..(353): Homolog of NCBI NO: 30690400 NR Description: glycine hydroxymethyltransferase - like protein
  misc_feature (62)..(354): Homolog of NCBI NO: 15235745 NR Description: glycine hydroxymethyltransferase like protein
MKESWHLIFLMVVIFLMVIRLTPRRYQLCLSSLKQCPIDWTRALATSTTIRWRKVLLFSGQKLIVAGASAYARLYDYARIRKVCNKQKAVMLADMAHISGLVAANVIPSPFDYADVVTTTTHKSLRGPRGAMIFFRKGVKEINKQGKEVLYDFEDKINQAVFPGLQGGPHNHTITGLAVALKQATTSEYKAYQEQVLSNSAKFAQTLMERGYELVSGGTDNHLVLVNLKPKGIDGSRVEKVLEAVHIASNKNTVPGDVSAMVPGGIRMGTPALTSRGFVEEDFAKVAEYFDKAVTIALKVKSEAQGTKLKDFVSAMESSSTIQSEIAKLRHEVEEFAKQFPTIGFEKETMKYKN

SEQ ID NO: 22569 - protein, 344 aa, Arabidopsis thaliana
  peptide (1)..(344): Ceres Seq. ID no. 13580589
  misc_feature (52)..(280): Pfam Name: Serine hydroxymethyltransferase Pfam Description: Serine hydroxymethyltransferase
  misc_feature (43)..(343): Homolog of NCBI NO: 30690400 NR Description: glycine hydroxymethyltransferase - like protein
  misc_feature (43)..(343): Homolog of NCBI NO: 14334888 NR Description: putative glycine hydroxymethyltransferase
  misc_feature (43)..(343): Homolog of NCBI NO: 30690394 NR Description: glycine hydroxymethyltransferase - like protein
  misc_feature (43)..(344): Homolog of NCBI NO: 31126793 NR Description: putative glycine hydroxymethyltransferase
  misc_feature (52)..(344): Homolog of NCBI NO: 1346156 NR Description: Serine hydroxymethyltransferase 2, mitochondrial
  misc_feature (52)..(342): Homolog of NCBI NO: 462187 NR Description: SERINE HYDROXYMETHYLTRANSFERASE, MITOCHONDRIAL
  misc_feature (52)..(344): Homolog of NCBI NO: 1346155 NR Description: Serine hydroxymethyltransferase 1, mitochondrial
  misc_feature (52)..(344): Homolog of NCBI NO: 1707998 NR Description: SERINE HYDROXYMETHYLTRANSFERASE, MITOCHONDRIAL
  misc_feature (52)..(344): Homolog of NCBI NO: 15809972 NR Description: AT4g37930/F20D10_50 [Arabidopsis thaliana]
  misc_feature (52)..(344): Homolog of NCBI NO: 15235745 NR Description: glycine hydroxymethyltransferase like protein
MVVIFLMVIRLTPRRYQLCLSSLKQCPIDWTRALATSTTIRWRKVLLFSGQKLIVAGASAYARLYDYARIRKVCNKQKAVMLADMAHISGLVAANVIPSPFDYADVVTTTTHKSLRGPRGAMIFFRKGVKEINKQGKEVLYDFEDKINQAVFPGLQGGPHNHTITGLAVALKQATTSEYKAYQEQVLSNSAKFAQTLMERGYELVSGGTDNHLVLVNLKPKGIDGSRVEKVLEAVHIASNKNTVPGDVSAMVPGGIRMGTPALTSRGFVEEDFAKVAEYFDKAVTIALKVKSEAQGTKLKDFVSAMESSSTIQSEIAKLRHEVEEFAKQFPTIGFEKETMKYKN

SEQ ID NO: 22570 - protein, 338 aa, Arabidopsis thaliana
  peptide (1)..(338): Ceres Seq. ID no. 13580590
  misc_feature (46)..(274): Pfam Name: Serine hydroxymethyltransferase Pfam Description: Serine hydroxymethyltransferase
  misc_feature (37)..(337): Homolog of NCBI NO: 30690400 NR Description: glycine hydroxymethyltransferase - like protein
  misc_feature (37)..(337): Homolog of NCBI NO: 14334888 NR Description: putative glycine hydroxymethyltransferase
  misc_feature (37)..(337): Homolog of NCBI NO: 30690394 NR Description: glycine hydroxymethyltransferase - like protein
  misc_feature (37)..(338): Homolog of NCBI NO: 31126793 NR Description: putative glycine hydroxymethyltransferase
  misc_feature (46)..(338): Homolog of NCBI NO: 1346156 NR Description: Serine hydroxymethyltransferase 2, mitochondrial
  misc_feature (46)..(336): Homolog of NCBI NO: 462187 NR Description: SERINE HYDROXYMETHYLTRANSFERASE, MITOCHONDRIAL
  misc_feature (46)..(338): Homolog of NCBI NO: 1346155 NR Description: Serine hydroxymethyltransferase 1, mitochondrial
  misc_feature (46)..(338): Homolog of NCBI NO: 1707998 NR Description: SERINE HYDROXYMETHYLTRANSFERASE, MITOCHONDRIAL
  misc_feature (46)..(338): Homolog of NCBI NO: 15809972 NR Description: AT4g37930/F20D10_50 [Arabidopsis thaliana]
  misc_feature (46)..(338): Homolog of NCBI NO: 15235745 NR Description: glycine hydroxymethyltransferase like protein
MVIRLTPRRYQLCLSSLKQCPIDWTRALATSTTIRWRKVLLFSGQKLIVAGASAYARLYDYARIRKVCNKQKAVMLADMAHISGLVAANVIPSPFDYADVVTTTTHKSLRGPRGAMIFFRKGVKEINKQGKEVLYDFEDKINQAVFPGLQGGPHNHTITGLAVALKQATTSEYKAYQEQVLSNSAKFAQTLMERGYELVSGGTDNHLVLVNLKPKGIDGSRVEKVLEAVHIASNKNTVPGDVSAMVPGGIRMGTPALTSRGFVEEDFAKVAEYFDKAVTIALKVKSEAQGTKLKDFVSAMESSSTIQSEIAKLRHEVEEFAKQFPTIGFEKETMKYKN

SEQ ID NO: 22571 - DNA, 1075 bp, Arabidopsis thaliana
  misc_feature (1)..(1075): Ceres Seq. ID no. 13593739
  misc_feature: MA Experiment ID: 108461 Result: Up-regulated in Transcription
  misc_feature: MA Experiment 108461 PARAMETER Experiment Name: At_Germinating_Seeds_cDNA_P Parameter: Age (day) Value: 1 vs. 0
  misc_feature: MA Experiment 108461 PARAMETER Experiment Name: At_Germinating_Seeds_cDNA_P Parameter: Tissue Value: Germinating Seeds
  misc_feature: MA Experiment ID: 108462 Result: Up-regulated in Transcription
  misc_feature: MA Experiment 108462 PARAMETER Experiment Name: At_Germinating_Seeds_cDNA_P Parameter: Age (day) Value: 2 vs. 0
  misc_feature: MA Experiment 108462 PARAMETER Experiment Name: At_Germinating_Seeds_cDNA_P Parameter: Tissue Value: Germinating Seeds
  misc_feature: MA Experiment ID: 108574 Result: Up-regulated in Transcription
  misc_feature: MA Experiment 108574 PARAMETER Experiment Name: At_Wounding__cDNA_P Parameter: Timepoint (hr) Value: 1
  misc_feature: MA Experiment 108574 PARAMETER Experiment Name: At_Wounding__cDNA_P Parameter: Tissue Value: Aerial
  misc_feature: MA Experiment 108574 PARAMETER Experiment Name: At_Wounding__cDNA_P Parameter: Treatment Value: Wounding vs. No Wounding
  misc_feature: MA Experiment ID: 108577 Result: Up-regulated in Transcription
  misc_feature: MA Experiment 108577 PARAMETER Experiment Name: At_42deg_Heat_cDNA_P Parameter: Temperature (deg C) Value: 42 vs. 22
  misc_feature: MA Experiment 108577 PARAMETER Experiment Name: At_42deg_Heat_cDNA_P Parameter: Timepoint (hr) Value: 6
  misc_feature: MA Experiment 108577 PARAMETER Experiment Name: At_42deg_Heat_cDNA_P Parameter: Tissue Value: Aerial
  misc_feature: MA Experiment ID: 108579 Result: Up-regulated in Transcription
  misc_feature: MA Experiment 108579 PARAMETER Experiment Name: At_4deg_Cold_cDNA_P Parameter: Temperature (deg C) Value: 4 vs. 22
  misc_feature: MA Experiment 108579 PARAMETER Experiment Name: At_4deg_Cold_cDNA_P Parameter: Timepoint (hr) Value: 6
  misc_feature: MA Experiment 108579 PARAMETER Experiment Name: At_4deg_Cold_cDNA_P Parameter: Tissue Value: Aerial
  misc_feature: MA Experiment ID: 108594 Result: Down-regulated in Transcription
  misc_feature: MA Experiment 108594 PARAMETER Experiment Name: At_Ler-rhl_Root_cDNA_P Parameter: Plant Line Value: null
  misc_feature: MA Experiment ID: 108595 Result: Down-regulated in Transcription
  misc_feature: MA Experiment 108595 PARAMETER Experiment Name: At_Ler-pi_Ovule_cDNA_P Parameter: Plant Line Value: null
  misc_feature: MA Experiment ID: 108608 Result: Up-regulated in Transcription
  misc_feature: MA Experiment 108608 PARAMETER Experiment Name: At_100uM_ABA_cDNA_P Parameter: Timepoint (hr) Value: 1
  misc_feature: MA Experiment 108608 PARAMETER Experiment Name: At_100uM_ABA_cDNA_P Parameter: Tissue Value: Aerial
  misc_feature: MA Experiment 108608 PARAMETER Experiment Name: At_100uM_ABA_cDNA_P Parameter: Treatment Value: 100uM ABA vs. No Treatment
  misc_feature: MA Experiment ID: 20000166 Result: Up-regulated in Transcription
  misc_feature: MA Experiment 20000166 PARAMETER Experiment Name: At_100uM_ABA_P Parameter: Age (day) Value: 14
  misc_feature: MA Experiment 20000166 PARAMETER Experiment Name: At_100uM_ABA_P Parameter: Organism Value: A. thaliana
  misc_feature: MA Experiment 20000166 PARAMETER Experiment Name: At_100uM_ABA_P Parameter: Plant Line Value: WS
  misc_feature: MA Experiment 20000166 PARAMETER Experiment Name: At_100uM_ABA_P Parameter: Timepoint (hr) Value: 1
  misc_feature: MA Experiment 20000166 PARAMETER Experiment Name: At_100uM_ABA_P Parameter: Tissue Value: Aerial
  misc_feature: MA Experiment 20000166 PARAMETER Experiment Name: At_100uM_ABA_P Parameter: Treatment Value: 100uM ABA vs. No Treatment
  misc_feature: MA Experiment ID: 20000179 Result: Up-regulated in Transcription
  misc_feature: MA Experiment 20000179 PARAMETER Experiment Name: At_Germinating_Seeds_P Parameter: Age (hr) Value: 6 vs. 0
  misc_feature: MA Experiment 20000179 PARAMETER Experiment Name: At_Germinating_Seeds_P Parameter: Tissue Value: Germinating Seeds
  misc_feature: MA Experiment ID: 20000180 Result: Up-regulated in Transcription
  misc_feature: MA Experiment 20000180 PARAMETER Experiment Name: At_Germinating_Seeds_P Parameter: Age (hr) Value: 24 vs. 0
  misc_feature: MA Experiment 20000180 PARAMETER Experiment Name: At_Germinating_Seeds_P Parameter: Tissue Value: Germinating Seeds
  misc_feature: MA Experiment ID: 20000184 Result: Up-regulated in Transcription
  misc_feature: MA Experiment 20000184 PARAMETER Experiment Name: At_Shoots__P Parameter: Age (day) Value: 7
  misc_feature: MA Experiment 20000184 PARAMETER Experiment Name: At_Shoots__P Parameter: Tissue Value: Shoots vs. Whole Plant
  misc_feature: MA Experiment ID: 20000227 Result: Up-regulated in Transcription
  misc_feature: MA Experiment 20000227 PARAMETER Experiment Name: At_Root-Tips-vs-Tops_P Parameter: Tissue Value: Root Tips vs. Root Tops
  misc_feature: MA Experiment ID: 20000234 Result: Up-regulated in Transcription
  misc_feature: MA Experiment 20000234 PARAMETER Experiment Name: At_Siliques_P Parameter: Age (day) Value: 21
  misc_feature: MA Experiment 20000234 PARAMETER Experiment Name: At_Siliques_P Parameter: Organism Value: A. thaliana
  misc_feature: MA Experiment 20000234 PARAMETER Experiment Name: At_Siliques_P Parameter: Plant Line Value: WS
  misc_feature: MA Experiment 20000234 PARAMETER Experiment Name: At_Siliques_P Parameter: Tissue Value: Less Than 5mm Siliques vs. Whole Plant
  misc_feature: MA Experiment ID: 20000235 Result: Up-regulated in Transcription
  misc_feature: MA Experiment 20000235 PARAMETER Experiment Name: At_Siliques_P Parameter: Age (day) Value: 21
  misc_feature: MA Experiment 20000235 PARAMETER Experiment Name: At_Siliques_P Parameter: Organism Value: A. thaliana
  misc_feature: MA Experiment 20000235 PARAMETER Experiment Name: At_Siliques_P Parameter: Plant Line Value: WS
  misc_feature: MA Experiment 20000235 PARAMETER Experiment Name: At_Siliques_P Parameter: Tissue Value: 5-10mm Siliques vs. Whole Plant
  misc_feature: MA Experiment ID: 20000264 Result: Up-regulated in Transcription
  misc_feature: MA Experiment 20000264 PARAMETER Experiment Name: At_Open_Flower_P Parameter: Age (day) Value: 21
  misc_feature: MA Experiment 20000264 PARAMETER Experiment Name: At_Open_Flower_P Parameter: Plant Line Value: WS
  misc_feature: MA Experiment 20000264 PARAMETER Experiment Name: At_Open_Flower_P Parameter: Tissue Value: Open Flower vs. Whole Plant
  misc_feature: MA Experiment ID: 20000265 Result: Up-regulated in Transcription
  misc_feature: MA Experiment 20000265 PARAMETER Experiment Name: At_Open_Flower_P Parameter: Age (day) Value: 21
  misc_feature: MA Experiment 20000265 PARAMETER Experiment Name: At_Open_Flower_P Parameter: Plant Line Value: WS
  misc_feature: MA Experiment 20000265 PARAMETER Experiment Name: At_Open_Flower_P Parameter: Tissue Value: Closed Flower vs. Whole Plant
  misc_feature: MA Experiment ID: 20000286 Result: Up-regulated in Transcription
  misc_feature: MA Experiment 20000286 PARAMETER Experiment Name: At_Open_Flower_P Parameter: Age (day) Value: 21
  misc_feature: MA Experiment 20000286 PARAMETER Experiment Name: At_Open_Flower_P Parameter: Plant Line Value: WS
  misc_feature: MA Experiment 20000286 PARAMETER Experiment Name: At_Open_Flower_P Parameter: Tissue Value: Half Open vs. Whole Plant
  misc_feature: MA Experiment ID: 20000438 Result: Up-regulated in Transcription
  misc_feature: MA Experiment 20000438 PARAMETER Experiment Name: At_Shoots__P Parameter: Age (day) Value: 14
  misc_feature: MA Experiment 20000438 PARAMETER Experiment Name: At_Shoots__P Parameter: Tissue Value: Shoots vs. Whole Plant
  misc_feature: MA Experiment ID: 20000439 Result: Up-regulated in Transcription
  misc_feature: MA Experiment 20000439 PARAMETER Experiment Name: At_Roots__P Parameter: Age (day) Value: 14 vs. 21
  misc_feature: MA Experiment 20000439 PARAMETER Experiment Name: At_Roots__P Parameter: Organism Value: A. thaliana
  misc_feature: MA Experiment 20000439 PARAMETER Experiment Name: At_Roots__P Parameter: Tissue Value: Roots vs. Whole Plant
  misc_feature: MA Experiment ID: 20000445 Result: Up-regulated in Transcription
  misc_feature: MA Experiment 20000445 PARAMETER Experiment Name: At_100uM_NAA__P Parameter: Age (day) Value: 14
  misc_feature: MA Experiment 20000445 PARAMETER Experiment Name: At_100uM_NAA__P Parameter: Organism Value: A. thaliana
  misc_feature: MA Experiment 20000445 PARAMETER Experiment Name: At_100uM_NAA__P Parameter: Plant Line Value: WS
  misc_feature: MA Experiment 20000445 PARAMETER Experiment Name: At_100uM_NAA__P Parameter: Timepoint (hr) Value: 6
  misc_feature: MA Experiment 20000445 PARAMETER Experiment Name: At_100uM_NAA__P Parameter: Tissue Value: Aerial
  misc_feature: MA Experiment 20000445 PARAMETER Experiment Name: At_100uM_NAA__P Parameter: Treatment Value: 100uM NAA vs. No Treatment
  misc_feature: MA Experiment ID: 20001450 Result: Down-regulated in Transcription
  misc_feature: MA Experiment 20001450 PARAMETER Experiment Name: At_Far-red-induction_P Parameter: Age (day) Value: 7
  misc_feature: MA Experiment 20001450 PARAMETER Experiment Name: At_Far-red-induction_P Parameter: Light Value: Far-red vs. White
  misc_feature: MA Experiment 20001450 PARAMETER Experiment Name: At_Far-red-induction_P Parameter: Organism Value: A. thaliana
  misc_feature: MA Experiment 20001450 PARAMETER Experiment Name: At_Far-red-induction_P Parameter: Plant Line Value: Columbia
  misc_feature: MA Experiment 20001450 PARAMETER Experiment Name: At_Far-red-induction_P Parameter: Timepoint (hr) Value: 8
  misc_feature: MA Experiment 20001450 PARAMETER Experiment Name: At_Far-red-induction_P Parameter: Tissue Value: Whole Plant
  misc_feature: MA Experiment ID: 20001451 Result: Down-regulated in Transcription
  misc_feature: MA Experiment 20001451 PARAMETER Experiment Name: At_Far-red-induction_P Parameter: Age (day) Value: 7
  misc_feature: MA Experiment 20001451 PARAMETER Experiment Name: At_Far-red-induction_P Parameter: Light Value: Far-red vs. White
  misc_feature: MA Experiment 20001451 PARAMETER Experiment Name: At_Far-red-induction_P Parameter: Organism Value: A. thaliana
  misc_feature: MA Experiment 20001451 PARAMETER Experiment Name: At_Far-red-induction_P Parameter: Plant Line Value: Columbia
  misc_feature: MA Experiment 20001451 PARAMETER Experiment Name: At_Far-red-induction_P Parameter: Timepoint (hr) Value: 24
  misc_feature: MA Experiment 20001451 PARAMETER Experiment Name: At_Far-red-induction_P Parameter: Tissue Value: Whole Plant
  misc_feature: MA Experiment ID: 20001557 Result: Up-regulated in Transcription
  misc_feature: MA Experiment 20001557 PARAMETER Experiment Name: At_Drought_Soil_Dry_P Parameter: Age (day) Value: 27
  misc_feature: MA Experiment 20001557 PARAMETER Experiment Name: At_Drought_Soil_Dry_P Parameter: Organism Value: A. thaliana
  misc_feature: MA Experiment 20001557 PARAMETER Experiment Name: At_Drought_Soil_Dry_P Parameter: Plant Line Value: WS
  misc_feature: MA Experiment 20001557 PARAMETER Experiment Name: At_Drought_Soil_Dry_P Parameter: Post Timepoint (hr) Value: 3
  misc_feature: MA Experiment 20001557 PARAMETER Experiment Name: At_Drought_Soil_Dry_P Parameter: Post-Treatment Value: Re-Water vs. No Drought
  misc_feature: MA Experiment 20001557 PARAMETER Experiment Name: At_Drought_Soil_Dry_P Parameter: Timepoint (day) Value: 13
  misc_feature: MA Experiment 20001557 PARAMETER Experiment Name: At_Drought_Soil_Dry_P Parameter: Treatment Value: Drought vs. No Drought
  misc_feature: MA Experiment ID: 20001560 Result: Up-regulated in Transcription
  misc_feature: MA Experiment 20001560 PARAMETER Experiment Name: At_Drought_Soil_Dry_P Parameter: Age (day) Value: 28
  misc_feature: MA Experiment 20001560 PARAMETER Experiment Name: At_Drought_Soil_Dry_P Parameter: Organism Value: A. thaliana
  misc_feature: MA Experiment 20001560 PARAMETER Experiment Name: At_Drought_Soil_Dry_P Parameter: Plant Line Value: WS
  misc_feature: MA Experiment 20001560 PARAMETER Experiment Name: At_Drought_Soil_Dry_P Parameter: Post Timepoint (hr) Value: None
  misc_feature: MA Experiment 20001560 PARAMETER Experiment Name: At_Drought_Soil_Dry_P Parameter: Post-Treatment Value: None
  misc_feature: MA Experiment 20001560 PARAMETER Experiment Name: At_Drought_Soil_Dry_P Parameter: Timepoint (day) Value: 14
  misc_feature: MA Experiment 20001560 PARAMETER Experiment Name: At_Drought_Soil_Dry_P Parameter: Treatment Value: Drought vs. No Drought
  misc_feature: MA Experiment ID: 20001911 Result: Down-regulated in Transcription
  misc_feature: MA Experiment 20001911 PARAMETER Experiment Name: At_Drought_Reproduction_P Parameter: Age (day) Value: 40
  misc_feature: MA Experiment 20001911 PARAMETER Experiment Name: At_Drought_Reproduction_P Parameter: Organism Value: A. thaliana
  misc_feature: MA Experiment 20001911 PARAMETER Experiment Name: At_Drought_Reproduction_P Parameter: Plant Line Value: WS
  misc_feature: MA Experiment 20001911 PARAMETER Experiment Name: At_Drought_Reproduction_P Parameter: Timepoint (day) Value: 10
  misc_feature: MA Experiment 20001911 PARAMETER Experiment Name: At_Drought_Reproduction_P Parameter: Tissue Value: Flowers
  misc_feature: MA Experiment 20001911 PARAMETER Experiment Name: At_Drought_Reproduction_P Parameter: Treatment Value: Drought vs. No Drought
  misc_feature: Phenotype: FERTILITY Fertility-Reduced
  misc_feature: Phenotype: WHOLE PLANT Size-Small
  misc_feature: Phenotype: FERTILITY Fertility-Reduced
  misc_feature: Phenotype: WHOLE PLANT Size-Small
  misc_feature: Phenotype: FERTILITY Fertility-Reduced
  misc_feature: Phenotype: FERTILITY Fertility-Sterile
aagcagaggagttatactttactacttactaatctctccctctctctatctgactctttgatcggaaaaaatggcggagaaaaatgcgagcgcggtggacggtgcaattagggttagtggaatgcagttttcttacgatgttcaagatcctattttcttcgattttaatctcgatcttcccgctggatctcgttgcctcttggttggtgccaatggatctgggaaaactacgttattgaagattcttgctggaaaacatatggttggaggaaagaatgttgtacaagtgcttgatcgctcagcatttcatgatacagagcttgtttgtagtggtgatttgtcttacctaggaggatcatggagtaaaactgctggttctgctggtgatattccactccaaggagacttctcagcagaacatatgatatttggagttgaagggattgatcctttcagaagagagaagttgattgatcttcttgatatcaatcttcaatggcgtatgcataaggtttctgatgggcagagacgtcgagtgcaaatatgtatgggtctattacatccgttcaaggtattactactggatgaagttactgttgacctcgacgttgttgctaggatggatttgttggagttctttaaagaagaatgtgaacagagaggagctacaattgtatatgcaactcatattttcgacgggctcgagacatgggctagtcatttggcttacattaatggaggagagctgaaactctcggccaagttagatgagatcaaggatctcaaaacctcaccaaatctgctatctgttgttgaagcttggctccggtctgaaaccaaagttgagaaaaagacgaagaagaaacctgttgttacctctccatttatgtcgtctagacaaatggcatattaccgatgaatcttaacttgtttatgagatcagtaagaataagagcactgcttctacagatgcctttgttttctatggtacttcattgtttagaatccgataatttttatcacacatgaaagaatttctgtaaaaccacgtttttaattaaattactattttgcc

SEQ ID NO: 22572 - protein, 282 aa, Arabidopsis thaliana
  peptide (1)..(282): Ceres Seq. ID no. 15221238
  misc_feature (39)..(224): Pfam Name: ABC transporter Pfam Description: ABC transporter
  misc_feature (39)..(224): Pfam Name: ABC transporter Pfam Description: ABC transporter
  misc_feature (12)..(231): Homolog of NCBI NO: 21911381 NR Description: putative ABC transporter (ATP-binding protein)
  misc_feature (31)..(235): Homolog of NCBI NO: 23483625 NR Description: NBD-like protein [Plasmodium yoelii yoelii]
  misc_feature (90)..(255): Homolog of NCBI NO: 40738662 NR Description: hypothetical protein AN6512.2 [Aspergillus
  misc_feature (12)..(279): Homolog of NCBI NO: 14318491 NR Description: CCR4 associated factor; Caf16p [Saccharomyces
  misc_feature (35)..(265): Homolog of NCBI NO: 19115648 NR Description: probable ATP-dependent transporter
  misc_feature (12)..(231): Homolog of NCBI NO: 21911381 NR Description: putative ABC transporter (ATP-binding protein)
  misc_feature (90)..(255): Homolog of NCBI NO: 40738662 NR Description: hypothetical protein AN6512.2 [Aspergillus
  misc_feature (35)..(265): Homolog of NCBI NO: 19115648 NR Description: probable ATP-dependent transporter
  misc_feature (1)..(282): Homolog of NCBI NO: 15240093 NR Description: ABC transporter family protein [Arabidopsis
  misc_feature (1)..(282): Homolog of NCBI NO: 21592901 NR Description: NBD-like protein [Arabidopsis thaliana]
  misc_feature (1)..(282): Homolog of NCBI NO: 18379174 NR Description: ABC transporter family protein [Arabidopsis
  misc_feature (1)..(282): Homolog of NCBI NO: 25406749 NR Description: hypothetical protein [imported] - Arabidopsis
  misc_feature (10)..(265): Homolog of NCBI NO: 15241744 NR Description: ABC transporter family protein [Arabidopsis
  misc_feature (12)..(279): Homolog of NCBI NO: 14318491 NR Description: CCR4 associated factor; Caf16p [Saccharomyces
  misc_feature (31)..(235): Homolog of NCBI NO: 23483625 NR Description: NBD-like protein [Plasmodium yoelii yoelii]
  misc_feature (10)..(265): Homolog of NCBI NO: 15241744 NR Description: ABC transporter family protein [Arabidopsis
  misc_feature (1)..(282): Homolog of NCBI NO: 25406749 NR Description: hypothetical protein [imported] - Arabidopsis
  misc_feature (1)..(282): Homolog of NCBI NO: 18379174 NR Description: ABC transporter family protein [Arabidopsis
  misc_feature (1)..(282): Homolog of NCBI NO: 21592901 NR Description: NBD-like protein [Arabidopsis thaliana]
  misc_feature (1)..(282): Homolog of NCBI NO: 15240093 NR Description: ABC transporter family protein [Arabidopsis
MAEKNASAVDGAIRVSGMQFSYDVQDPIFFDFNLDLPAGSRCLLVGANGSGKTTLLKILAGKHMVGGKNVVQVLDRSAFHDTELVCSGDLSYLGGSWSKTAGSAGDIPLQGDFSAEHMIFGVEGIDPFRREKLIDLLDINLQWRMHKVSDGQRRRVQICMGLLHPFKVLLLDEVTVDLDVVARMDLLEFFKEECEQRGATIVYATHIFDGLETWASHLAYINGGELKLSAKLDEIKDLKTSPNLLSVVEAWLRSETKVEKKTKKKPVVTSPFMSSRQMAYYR

SEQ ID NO: 22573 - protein, 265 aa, Arabidopsis thaliana
  peptide (1)..(265): Ceres Seq. ID no. 15221239
  misc_feature (22)..(207): Pfam Name: ABC transporter Pfam Description: ABC transporter
  misc_feature (22)..(207): Pfam Name: ABC transporter Pfam Description: ABC transporter
  misc_feature (1)..(214): Homolog of NCBI NO: 21911381 NR Description: putative ABC transporter (ATP-binding protein)
  misc_feature (14)..(218): Homolog of NCBI NO: 23483625 NR Description: NBD-like protein [Plasmodium yoelii yoelii]
  misc_feature (73)..(238): Homolog of NCBI NO: 40738662 NR Description: hypothetical protein AN6512.2 [Aspergillus
  misc_feature (1)..(262): Homolog of NCBI NO: 14318491 NR Description: CCR4 associated factor; Caf16p [Saccharomyces
  misc_feature (18)..(248): Homolog of NCBI NO: 19115648 NR Description: probable ATP-dependent transporter
  misc_feature (1)..(214): Homolog of NCBI NO: 21911381 NR Description: putative ABC transporter (ATP-binding protein)
  misc_feature (73)..(238): Homolog of NCBI NO: 40738662 NR Description: hypothetical protein AN6512.2 [Aspergillus
  misc_feature (18)..(248): Homolog of NCBI NO: 19115648 NR Description: probable ATP-dependent transporter
  misc_feature (1)..(265): Homolog of NCBI NO: 15240093 NR Description: ABC transporter family protein [Arabidopsis
  misc_feature (1)..(265): Homolog of NCBI NO: 21592901 NR Description: NBD-like protein [Arabidopsis thaliana]
  misc_feature (1)..(265): Homolog of NCBI NO: 18379174 NR Description: ABC transporter family protein [Arabidopsis
  misc_feature (1)..(265): Homolog of NCBI NO: 25406749 NR Description: hypothetical protein [imported] - Arabidopsis
  misc_feature (1)..(248): Homolog of NCBI NO: 15241744 NR Description: ABC transporter family protein [Arabidopsis
  misc_feature (1)..(262): Homolog of NCBI NO: 14318491 NR Description: CCR4 associated factor; Caf16p [Saccharomyces
  misc_feature (14)..(218): Homolog of NCBI NO: 23483625 NR Description: NBD-like protein [Plasmodium yoelii yoelii]
  misc_feature (1)..(248): Homolog of NCBI NO: 15241744 NR Description: ABC transporter family protein [Arabidopsis
  misc_feature (1)..(265): Homolog of NCBI NO: 25406749 NR Description: hypothetical protein [imported] - Arabidopsis
  misc_feature (1)..(265): Homolog of NCBI NO: 18379174 NR Description: ABC transporter family protein [Arabidopsis
  misc_feature (1)..(265): Homolog of NCBI NO: 21592901 NR Description: NBD-like protein [Arabidopsis thaliana]
  misc_feature (1)..(265): Homolog of NCBI NO: 15240093 NR Description: ABC transporter family protein [Arabidopsis
MQFSYDVQDPIFFDFNLDLPAGSRCLLVGANGSGKTTLLKILAGKHMVGGKNVVQVLDRSAFHDTELVCSGDLSYLGGSWSKTAGSAGDIPLQGDFSAEHMIFGVEGIDPFRREKLIDLLDINLQWRMHKVSDGQRRRVQICMGLLHPFKVLLLDEVTVDLDVVARMDLLEFFKEECEQRGATIVYATHIFDGLETWASHLAYINGGELKLSAKLDEIKDLKTSPNLLSVVEAWLRSETKVEKKTKKKPVVTSPFMSSRQMAYYR

SEQ ID NO: 22574 - protein, 219 aa, Arabidopsis thaliana
  peptide (1)..(219): Ceres Seq. ID no. 15221240
  misc_feature (1)..(161): Pfam Name: ABC transporter Pfam Description: ABC transporter
  misc_feature (1)..(161): Pfam Name: ABC transporter Pfam Description: ABC transporter
  misc_feature (1)..(168): Homolog of NCBI NO: 21911381 NR Description: putative ABC transporter (ATP-binding protein)
  misc_feature (1)..(172): Homolog of NCBI NO: 23483625 NR Description: NBD-like protein [Plasmodium yoelii yoelii]
  misc_feature (27)..(192): Homolog of NCBI NO: 40738662 NR Description: hypothetical protein AN6512.2 [Aspergillus
  misc_feature (1)..(216): Homolog of NCBI NO: 14318491 NR Description: CCR4 associated factor; Caf16p [Saccharomyces
  misc_feature (1)..(202): Homolog of NCBI NO: 19115648 NR Description: probable ATP-dependent transporter
  misc_feature (1)..(168): Homolog of NCBI NO: 21911381 NR Description: putative ABC transporter (ATP-binding protein)
  misc_feature (27)..(192): Homolog of NCBI NO: 40738662 NR Description: hypothetical protein AN6512.2 [Aspergillus
  misc_feature (1)..(202): Homolog of NCBI NO: 19115648 NR Description: probable ATP-dependent transporter
  misc_feature (1)..(219): Homolog of NCBI NO: 15240093 NR Description: ABC transporter family protein [Arabidopsis
  misc_feature (1)..(219): Homolog of NCBI NO: 21592901 NR Description: NBD-like protein [Arabidopsis thaliana]
  misc_feature (1)..(219): Homolog of NCBI NO: 18379174 NR Description: ABC transporter family protein [Arabidopsis
  misc_feature (1)..(219): Homolog of NCBI NO: 25406749 NR Description: hypothetical protein [imported] - Arabidopsis
  misc_feature (1)..(202): Homolog of NCBI NO: 15241744 NR Description: ABC transporter family protein [Arabidopsis
  misc_feature (1)..(216): Homolog of NCBI NO: 14318491 NR Description: CCR4 associated factor; Caf16p [Saccharomyces
  misc_feature (1)..(172): Homolog of NCBI NO: 23483625 NR Description: NBD-like protein [Plasmodium yoelii yoelii]
  misc_feature (1)..(202): Homolog of NCBI NO: 15241744 NR Description: ABC transporter family protein [Arabidopsis
  misc_feature (1)..(219): Homolog of NCBI NO: 25406749 NR Description: hypothetical protein [imported] - Arabidopsis
  misc_feature (1)..(219): Homolog of NCBI NO: 18379174 NR Description: ABC transporter family protein [Arabidopsis
  misc_feature (1)..(219): Homolog of NCBI NO: 21592901 NR Description: NBD-like protein [Arabidopsis thaliana]
  misc_feature (1)..(219): Homolog of NCBI NO: 15240093 NR Description: ABC transporter family protein [Arabidopsis
MVGGKNVVQVLDRSAFHDTELVCSGDLSYLGGSWSKTAGSAGDIPLQGDFSAEHMIFGVEGIDPFRREKLIDLLDINLQWRMHKVSDGQRRRVQICMGLLHPFKVLLLDEVTVDLDVVARMDLLEFFKEECEQRGATIVYATHIFDGLETWASHLAYINGGELKLSAKLDEIKDLKTSPNLLSVVEAWLRSETKVEKKTKKKPVVTSPFMSSRQMAYYR

SEQ ID NO: 22575 - DNA, 747 bp, Arabidopsis thaliana
  misc_feature (1)..(747): Ceres Seq. ID no. 13491892
  misc_feature: MA Experiment ID: 20000179 Result: Down-regulated in Transcription
  misc_feature: MA Experiment 20000179 PARAMETER Experiment Name: At_Germinating_Seeds_P Parameter: Age (hr) Value: 6 vs. 0
  misc_feature: MA Experiment 20000179 PARAMETER Experiment Name: At_Germinating_Seeds_P Parameter: Tissue Value: Germinating Seeds
  misc_feature: MA Experiment ID: 20000180 Result: Down-regulated in Transcription
  misc_feature: MA Experiment 20000180 PARAMETER Experiment Name: At_Germinating_Seeds_P Parameter: Age (hr) Value: 24 vs. 0
  misc_feature: MA Experiment 20000180 PARAMETER Experiment Name: At_Germinating_Seeds_P Parameter: Tissue Value: Germinating Seeds
  misc_feature: MA Experiment ID: 20000184 Result: Up-regulated in Transcription
  misc_feature: MA Experiment 20000184 PARAMETER Experiment Name: At_Shoots__P Parameter: Age (day) Value: 7
  misc_feature: MA Experiment 20000184 PARAMETER Experiment Name: At_Shoots__P Parameter: Tissue Value: Shoots vs. Whole Plant
  misc_feature: MA Experiment ID: 20000437 Result: Up-regulated in Transcription
  misc_feature: MA Experiment 20000437 PARAMETER Experiment Name: At_Drought_P Parameter: Age (day) Value: 8
  misc_feature: MA Experiment 20000437 PARAMETER Experiment Name: At_Drought_P Parameter: Organism Value: A. thaliana
  misc_feature: MA Experiment 20000437 PARAMETER Experiment Name: At_Drought_P Parameter: Plant Line Value: WS
  misc_feature: MA Experiment 20000437 PARAMETER Experiment Name: At_Drought_P Parameter: Timepoint (hr) Value: 24
  misc_feature: MA Experiment 20000437 PARAMETER Experiment Name: At_Drought_P Parameter: Tissue Value: Whole Plant
  misc_feature: MA Experiment 20000437 PARAMETER Experiment Name: At_Drought_P Parameter: Treatment Value: Drought vs. No Drought
acaaaaacaacatagaacattaaatccatactctcttagaaaaagaaaaaaagaaatggcggatcatcaacaacatcagcaacaacaacaaccaataatgaggagtctccatgaatcatcaccatcgactcggcagatagtgagattcgtaacggcagctacgatcggcctatcactcctcgtgctctcaggactaacactaaccggaacggtgatcggtttgatcgtagcgacgccgttgatggttctgttcagcccggtgttggtaccggcagtgataacgatagggcttttgacgatgggattcctattctccggtggttgtggggtggcagcagctacggcgttaacgtggatttataagtacgttaccggaaaacacccgatgggagcggataaggtggattacgcgaggatgaggatagcggagaaagccaaagagttgggacattatacgcactcgcagccacaacaaacacaccaaaccacaacaactactcattagagtttaataattatatggatctatatgttgtattaagttttatgattatcctacgtatgtttttttaatactgttcttacctttttgaaaagatctatctaaaattttattttctattttccatacaattttttgtgtgtttaattgctgatcggtattttctgttttatgattgtgaaatagctagtgtaaggaaagatgataacgaattaagtaaattaatagatgccaattacttggcc

SEQ ID NO: 22576 - protein, 167 aa, Arabidopsis thaliana
  peptide (1)..(167): Ceres Seq. ID no. 13491893
  misc_feature (42)..(152): Pfam Name: Oleosin Pfam Description: Oleosin
  misc_feature (43)..(148): Homolog of NCBI NO: 15234945 NR Description: oleosin [Arabidopsis thaliana]
  misc_feature (43)..(148): Homolog of NCBI NO: 129082 NR Description: Oleosin Bn-III (BnIII)
  misc_feature (19)..(158): Homolog of NCBI NO: 5381321 NR Description: 15 kDa oleosin [Sesamum indicum]
  misc_feature (19)..(148): Homolog of NCBI NO: 7442009 NR Description: oleosin-like protein, salt stress-induced - sweet
  misc_feature (19)..(148): Homolog of NCBI NO: 3914199 NR Description: OLEOSIN 1
  misc_feature (19)..(148): Homolog of NCBI NO: 2119749 NR Description: oleosin - almond
  misc_feature (19)..(162): Homolog of NCBI NO: 29170509 NR Description: oleosin [Corylus avellana]
  misc_feature (28)..(161): Homolog of NCBI NO: 21311555 NR Description: 15.8 kDa oleosin [Theobroma cacao]
  misc_feature (1)..(167): Homolog of NCBI NO: 27754701 NR Description: putative oleosin protein [Arabidopsis thaliana]
  misc_feature (1)..(167): Homolog of NCBI NO: 15225211 NR Description: oleosin [Arabidopsis thaliana]
QKQHRTLNPYSLRKRKKEMADHQQHQQQQQPIMRSLHESSPSTRQIVRFVTAATIGLSLLVLSGLTLTGTVIGLIVATPLMVLFSPVLVPAVITIGLLTMGFLFSGGCGVAAATALTWIYKYVTGKHPMGADKVDYARMRIAEKAKELGHYTHSQPQQTHQTTTTTH

SEQ ID NO: 22577 - protein, 149 aa, Arabidopsis thaliana
  peptide (1)..(149): Ceres Seq. ID no. 13491894
  misc_feature (24)..(134): Pfam Name: Oleosin Pfam Description: Oleosin
  misc_feature (25)..(130): Homolog of NCBI NO: 15234945 NR Description: oleosin [Arabidopsis thaliana]
  misc_feature (25)..(130): Homolog of NCBI NO: 129082 NR Description: Oleosin Bn-III (BnIII)
  misc_feature (1)..(140): Homolog of NCBI NO: 5381321 NR Description: 15 kDa oleosin [Sesamum indicum]
  misc_feature (1)..(130): Homolog of NCBI NO: 7442009 NR Description: oleosin-like protein, salt stress-induced - sweet
  misc_feature (1)..(130): Homolog of NCBI NO: 3914199 NR Description: OLEOSIN 1
  misc_feature (1)..(130): Homolog of NCBI NO: 2119749 NR Description: oleosin - almond
  misc_feature (1)..(144): Homolog of NCBI NO: 29170509 NR Description: oleosin [Corylus avellana]
  misc_feature (10)..(143): Homolog of NCBI NO: 21311555 NR Description: 15.8 kDa oleosin [Theobroma cacao]
  misc_feature (1)..(149): Homolog of NCBI NO: 27754701 NR Description: putative oleosin protein [Arabidopsis thaliana]
  misc_feature (1)..(149): Homolog of NCBI NO: 15225211 NR Description: oleosin [Arabidopsis thaliana]
MADHQQHQQQQQPIMRSLHESSPSTRQIVRFVTAATIGLSLLVLSGLTLTGTVIGLIVATPLMVLFSPVLVPAVITIGLLTMGFLFSGGCGVAAATALTWIYKYVTGKHPMGADKVDYARMRIAEKAKELGHYTHSQPQQTHQTTTTTH

SEQ ID NO: 22578 - protein, 135 aa, Arabidopsis thaliana
  peptide (1)..(135): Ceres Seq. ID no. 13491895
  misc_feature (10)..(120): Pfam Name: Oleosin Pfam Description: Oleosin
  misc_feature (1)..(116): Homolog of NCBI NO: 3914199 NR Description: OLEOSIN 1
  misc_feature (1)..(116): Homolog of NCBI NO: 2119749 NR Description: oleosin - almond
  misc_feature (1)..(130): Homolog of NCBI NO: 29170509 NR Description: oleosin [Corylus avellana]
  misc_feature (11)..(116): Homolog of NCBI NO: 15234945 NR Description: oleosin [Arabidopsis thaliana]
  misc_feature (1)..(126): Homolog of NCBI NO: 5381321 NR Description: 15 kDa oleosin [Sesamum indicum]
  misc_feature (1)..(116): Homolog of NCBI NO: 7442009 NR Description: oleosin-like protein, salt stress-induced - sweet
  misc_feature (11)..(116): Homolog of NCBI NO: 129082 NR Description: Oleosin Bn-III (BnIII)
  misc_feature (1)..(129): Homolog of NCBI NO: 21311555 NR Description: 15.8 kDa oleosin [Theobroma cacao]
  misc_feature (1)..(135): Homolog of NCBI NO: 27754701 NR Description: putative oleosin protein [Arabidopsis thaliana]
  misc_feature (1)..(135): Homolog of NCBI NO: 15225211 NR Description: oleosin [Arabidopsis thaliana]
MRSLHESSPSTRQIVRFVTAATIGLSLLVLSGLTLTGTVIGLIVATPLMVLFSPVLVPAVITIGLLTMGFLFSGGCGVAAATALTWIYKYVTGKHPMGADKVDYARMRIAEKAKELGHYTHSQPQQTHQTTTTTH

SEQ ID NO: 22579 - DNA, 1508 bp, Arabidopsis thaliana
  misc_feature (1)..(1508): Ceres Seq. ID no. 13609863
  misc_feature: MA Experiment ID: 108577 Result: Down-regulated in Transcription
  misc_feature: MA Experiment 108577 PARAMETER Experiment Name: At_42deg_Heat_cDNA_P Parameter: Temperature (deg C) Value: 42 vs. 22
  misc_feature: MA Experiment 108577 PARAMETER Experiment Name: At_42deg_Heat_cDNA_P Parameter: Timepoint (hr) Value: 6
  misc_feature: MA Experiment 108577 PARAMETER Experiment Name: At_42deg_Heat_cDNA_P Parameter: Tissue Value: Aerial
  misc_feature: MA Experiment ID: 108595 Result: Down-regulated in Transcription
  misc_feature: MA Experiment 108595 PARAMETER Experiment Name: At_Ler-pi_Ovule_cDNA_P Parameter: Plant Line Value: null
  misc_feature: MA Experiment ID: 20000173 Result: Down-regulated in Transcription
  misc_feature: MA Experiment 20000173 PARAMETER Experiment Name: At_42deg_Heat_P Parameter: Age (day) Value: 14
  misc_feature: MA Experiment 20000173 PARAMETER Experiment Name: At_42deg_Heat_P Parameter: Organism Value: A. thaliana
  misc_feature: MA Experiment 20000173 PARAMETER Experiment Name: At_42deg_Heat_P Parameter: Plant Line Value: WS
  misc_feature: MA Experiment 20000173 PARAMETER Experiment Name: At_42deg_Heat_P Parameter: Temperature (deg C) Value: 42 vs. 22
  misc_feature: MA Experiment 20000173 PARAMETER Experiment Name: At_42deg_Heat_P Parameter: Timepoint (hr) Value: 6
  misc_feature: MA Experiment 20000173 PARAMETER Experiment Name: At_42deg_Heat_P Parameter: Tissue Value: Aerial
  misc_feature: MA Experiment ID: 20000179 Result: Up-regulated in Transcription
  misc_feature: MA Experiment 20000179 PARAMETER Experiment Name: At_Germinating_Seeds_P Parameter: Age (hr) Value: 6 vs. 0
  misc_feature: MA Experiment 20000179 PARAMETER Experiment Name: At_Germinating_Seeds_P Parameter: Tissue Value: Germinating Seeds
  misc_feature: MA Experiment ID: 20000180 Result: Up-regulated in Transcription
  misc_feature: MA Experiment 20000180 PARAMETER Experiment Name: At_Germinating_Seeds_P Parameter: Age (hr) Value: 24 vs. 0
  misc_feature: MA Experiment 20000180 PARAMETER Experiment Name: At_Germinating_Seeds_P Parameter: Tissue Value: Germinating Seeds
  misc_feature: MA Experiment ID: 20000185 Result: Down-regulated in Transcription
  misc_feature: MA Experiment 20000185 PARAMETER Experiment Name: At_Roots__P Parameter: Age (day) Value: 7 vs. 21
  misc_feature: MA Experiment 20000185 PARAMETER Experiment Name: At_Roots__P Parameter: Organism Value: A. thaliana
  misc_feature: MA Experiment 20000185 PARAMETER Experiment Name: At_Roots__P Parameter: Tissue Value: Roots vs. Whole Plant
  misc_feature: MA Experiment ID: 20000227 Result: Down-regulated in Transcription
  misc_feature: MA Experiment 20000227 PARAMETER Experiment Name: At_Root-Tips-vs-Tops_P Parameter: Tissue Value: Root Tips vs. Root Tops
  misc_feature: MA Experiment ID: 20000234 Result: Up-regulated in Transcription
  misc_feature: MA Experiment 20000234 PARAMETER Experiment Name: At_Siliques_P Parameter: Age (day) Value: 21
  misc_feature: MA Experiment 20000234 PARAMETER Experiment Name: At_Siliques_P Parameter: Organism Value: A. thaliana
  misc_feature: MA Experiment 20000234 PARAMETER Experiment Name: At_Siliques_P Parameter: Plant Line Value: WS
  misc_feature: MA Experiment 20000234 PARAMETER Experiment Name: At_Siliques_P Parameter: Tissue Value: Less Than 5mm Siliques vs. Whole Plant
  misc_feature: MA Experiment ID: 20000235 Result: Up-regulated in Transcription
  misc_feature: MA Experiment 20000235 PARAMETER Experiment Name: At_Siliques_P Parameter: Age (day) Value: 21
  misc_feature: MA Experiment 20000235 PARAMETER Experiment Name: At_Siliques_P Parameter: Organism Value: A. thaliana
  misc_feature: MA Experiment 20000235 PARAMETER Experiment Name: At_Siliques_P Parameter: Plant Line Value: WS
  misc_feature: MA Experiment 20000235 PARAMETER Experiment Name: At_Siliques_P Parameter: Tissue Value: 5-10mm Siliques vs. Whole Plant
  misc_feature: MA Experiment ID: 20000437 Result: Down-regulated in Transcription
  misc_feature: MA Experiment 20000437 PARAMETER Experiment Name: At_Drought_P Parameter: Age (day) Value: 8
  misc_feature: MA Experiment 20000437 PARAMETER Experiment Name: At_Drought_P Parameter: Organism Value: A. thaliana
  misc_feature: MA Experiment 20000437 PARAMETER Experiment Name: At_Drought_P Parameter: Plant Line Value: WS
  misc_feature: MA Experiment 20000437 PARAMETER Experiment Name: At_Drought_P Parameter: Timepoint (hr) Value: 24
  misc_feature: MA Experiment 20000437 PARAMETER Experiment Name: At_Drought_P Parameter: Tissue Value: Whole Plant
  misc_feature: MA Experiment 20000437 PARAMETER Experiment Name: At_Drought_P Parameter: Treatment Value: Drought vs. No Drought
  misc_feature: MA Experiment ID: 20000439 Result: Down-regulated in Transcription
  misc_feature: MA Experiment 20000439 PARAMETER Experiment Name: At_Roots__P Parameter: Age (day) Value: 14 vs. 21
  misc_feature: MA Experiment 20000439 PARAMETER Experiment Name: At_Roots__P Parameter: Organism Value: A. thaliana
  misc_feature: MA Experiment 20000439 PARAMETER Experiment Name: At_Roots__P Parameter: Tissue Value: Roots vs. Whole Plant
  misc_feature: MA Experiment ID: 20001248 Result: Down-regulated in Transcription
  misc_feature: MA Experiment 20001248 PARAMETER Experiment Name: At_Far-red-induction_P Parameter: Age (day) Value: 7
  misc_feature: MA Experiment 20001248 PARAMETER Experiment Name: At_Far-red-induction_P Parameter: Light Value: Far-red vs. White
  misc_feature: MA Experiment 20001248 PARAMETER Experiment Name: At_Far-red-induction_P Parameter: Organism Value: A. thaliana
  misc_feature: MA Experiment 20001248 PARAMETER Experiment Name: At_Far-red-induction_P Parameter: Plant Line Value: Columbia
  misc_feature: MA Experiment 20001248 PARAMETER Experiment Name: At_Far-red-induction_P Parameter: Timepoint (hr) Value: 4
  misc_feature: MA Experiment 20001248 PARAMETER Experiment Name: At_Far-red-induction_P Parameter: Tissue Value: Whole Plant
  misc_feature: MA Experiment ID: 20001450 Result: Down-regulated in Transcription
  misc_feature: MA Experiment 20001450 PARAMETER Experiment Name: At_Far-red-induction_P Parameter: Age (day) Value: 7
  misc_feature: MA Experiment 20001450 PARAMETER Experiment Name: At_Far-red-induction_P Parameter: Light Value: Far-red vs. White
  misc_feature: MA Experiment 20001450 PARAMETER Experiment Name: At_Far-red-induction_P Parameter: Organism Value: A. thaliana
  misc_feature: MA Experiment 20001450 PARAMETER Experiment Name: At_Far-red-induction_P Parameter: Plant Line Value: Columbia
  misc_feature: MA Experiment 20001450 PARAMETER Experiment Name: At_Far-red-induction_P Parameter: Timepoint (hr) Value: 8
  misc_feature: MA Experiment 20001450 PARAMETER Experiment Name: At_Far-red-induction_P Parameter: Tissue Value: Whole Plant
  misc_feature: MA Experiment ID: 20001757 Result: Up-regulated in Transcription
  misc_feature: MA Experiment 20001757 PARAMETER Experiment Name: At_50mM_NH4NO3_L-to-H_P Parameter: Timepoint (hr) Value: 6
  misc_feature: MA Experiment 20001757 PARAMETER Experiment Name: At_50mM_NH4NO3_L-to-H_P Parameter: Tissue Value: Leaf
  misc_feature: MA Experiment 20001757 PARAMETER Experiment Name: At_50mM_NH4NO3_L-to-H_P Parameter: Treatment Value: 50mM NH4NO3 vs 100mM Mannitol
  misc_feature: MA Experiment ID: 20001905 Result: Down-regulated in Transcription
  misc_feature: MA Experiment 20001905 PARAMETER Experiment Name: At_Drought_Reproduction_P Parameter: Age (day) Value: 40
  misc_feature: MA Experiment 20001905 PARAMETER Experiment Name: At_Drought_Reproduction_P Parameter: Organism Value: A. thaliana
  misc_feature: MA Experiment 20001905 PARAMETER Experiment Name: At_Drought_Reproduction_P Parameter: Plant Line Value: WS
  misc_feature: MA Experiment 20001905 PARAMETER Experiment Name: At_Drought_Reproduction_P Parameter: Timepoint (day) Value: 10
  misc_feature: MA Experiment 20001905 PARAMETER Experiment Name: At_Drought_Reproduction_P Parameter: Tissue Value: Rosettes
  misc_feature: MA Experiment 20001905 PARAMETER Experiment Name: At_Drought_Reproduction_P Parameter: Treatment Value: Drought vs. No Drought
  misc_feature: MA Experiment ID: 20001911 Result: Down-regulated in Transcription
  misc_feature: MA Experiment 20001911 PARAMETER Experiment Name: At_Drought_Reproduction_P Parameter: Age (day) Value: 40
  misc_feature: MA Experiment 20001911 PARAMETER Experiment Name: At_Drought_Reproduction_P Parameter: Organism Value: A. thaliana
  misc_feature: MA Experiment 20001911 PARAMETER Experiment Name: At_Drought_Reproduction_P Parameter: Plant Line Value: WS
  misc_feature: MA Experiment 20001911 PARAMETER Experiment Name: At_Drought_Reproduction_P Parameter: Timepoint (day) Value: 10
  misc_feature: MA Experiment 20001911 PARAMETER Experiment Name: At_Drought_Reproduction_P Parameter: Tissue Value: Flowers
  misc_feature: MA Experiment 20001911 PARAMETER Experiment Name: At_Drought_Reproduction_P Parameter: Treatment Value: Drought vs. No Drought
tcctcctcatttggagatgtcactaactcatcttctctgattcaccaacatcctaaaacccttttgatcaaaacatggcttccatttccagaatcttaccaacagatggcagattaagtcaatgcagaatcaacacctcgtgggttccttctacaaccagaactcaaactcacttagattttcccaagttagtttctgttagtaactctgggataagtttgaggattcagaatagtaaacctattagccctgtctttgctcttgaagcaacttcctccaggagggttgtttgcaaagctgctgctggtgtgtcaggtgacttacctgagagtactcctaaggaacttagtcagtatgagaagattattgagcttttgacaaccctttttccactttgggttattttgggaacacttgttggcatcttcaagccatccttggttacatggttggaaacagatctctttactctaggtcttggatttcttatgctttccatgggtttgactcttacgtttgaagatttcagaagatgtttacgtaatccatggacggtgggtgttggttttcttgctcaatatatgatcaagccaattctaggttttctcattgcaatgactcttaagctttcggcacctcttgcgactggccttatcctagtctcatgctgccctggaggacaggcgtcaaacgttgctacttacatttccaaggggaatgtagcgctctctgtactcatgacaacgtgttcaaccattggggctattataatgactcctcttcttactaagcttcttgctggtcagcttgttcccgttgacgctgctggacttgctcttagtacgttccaagtagtgttggttcctaccataattggagttctggcaaatgagttctttcctaaatttacgtctaagatcataacagtgacgcctctaatcggagtcattctgactactctgctctgtgccagccctattggacaagttgcagatgttttgaaaacccaaggagctcaacttatactcccggtggcactccttcatgctgcagcctttgctattggctattggatttcaaagttttctttcggcgagtccacttcgcgtaccatttctatagaatgtggaatgcaaagttcagcgctcgggttcttgcttgcacaaaagcatttcacaaaccctctagttgctgttccttctgcagtcagtgttgtctgtatggcgcttggcgggagcggcctggccgtgttctggagaaacctaccgattccggcagatgacaaggatgacttcaaagagtaaatgaagtaggaaaggcggtttgcatcttctccaaacgatgtgattgttttgttgtaatgttagtaaacattacaaaatttgtgttgaaaaacatgaaacaaaatgtgtttaagagacatagaaacaagggcgtgcatgatgacaactttgtggtcaaccttttttttatttctcaattaatggacaaatcttttttggcacacc

SEQ ID NO: 22580 - protein, 409 aa, Arabidopsis thaliana
  peptide (1)..(409): Ceres Seq. ID no. 13609864
  misc_feature (132)..(309): Pfam Name: Sodium Bile acid symporter family Pfam Description: Sodium Bile acid symporter family
  misc_feature (98)..(395): Homolog of NCBI NO: 33865169 NR Description: Sodium/bile acid cotransporter family
  misc_feature (47)..(402): Homolog of NCBI NO: 38346633 NR Description: OSJNBa0072D21.3 [Oryza sativa (japonica
  misc_feature (92)..(397): Homolog of NCBI NO: 24217327 NR Description: conserved hypothetical protein
  misc_feature (41)..(403): Homolog of NCBI NO: 18412023 NR Description: bile acid:sodium symporter family [Arabidopsis
  misc_feature (139)..(409): Homolog of NCBI NO: 28393076 NR Description: putative Na+ dependent ileal bile acid
  misc_feature (62)..(409): Homolog of NCBI NO: 34911708 NR Description: P0707D10.18 [Oryza sativa (japonica
  misc_feature (1)..(38): Homolog of NCBI NO: 7485401 NR Description: hypothetical protein At2g26900 [imported] -
  misc_feature (67)..(385): Homolog of NCBI NO: 7485401 NR Description: hypothetical protein At2g26900 [imported] -
  misc_feature (1)..(409): Homolog of NCBI NO: 20269901 NR Description: putative sodium-dependent bile acid symporter
  misc_feature (1)..(409): Homolog of NCBI NO: 30683305 NR Description: bile acid:sodium symporter family [Arabidopsis
MASISRILPTDGRLSQCRINTSWVPSTTRTQTHLDFPKLVSVSNSGISLRIQNSKPISPVFALEATSSRRVVCKAAAGVSGDLPESTPKELSQYEKIIELLTTLFPLWVILGTLVGIFKPSLVTWLETDLFTLGLGFLMLSMGLTLTFEDFRRCLRNPWTVGVGFLAQYMIKPILGFLIAMTLKLSAPLATGLILVSCCPGGQASNVATYISKGNVALSVLMTTCSTIGAIIMTPLLTKLLAGQLVPVDAAGLALSTFQVVLVPTIIGVLANEFFPKFTSKIITVTPLIGVILTTLLCASPIGQVADVLKTQGAQLILPVALLHAAAFAIGYWISKFSFGESTSRTISIECGMQSSALGFLLAQKHFTNPLVAVPSAVSVVCMALGGSGLAVFWRNLPIPADDKDDFKE

SEQ ID NO: 22581 - protein, 271 aa, Arabidopsis thaliana
  peptide (1)..(271): Ceres Seq. ID no. 13609865
  misc_feature (1)..(171): Pfam Name: Sodium Bile acid symporter family Pfam Description: Sodium Bile acid symporter family
  misc_feature (1)..(257): Homolog of NCBI NO: 22298669 NR Description: ORF_ID:tll1126~probable sodium-dependent
  misc_feature (1)..(257): Homolog of NCBI NO: 33865169 NR Description: Sodium/bile acid cotransporter family
  misc_feature (1)..(264): Homolog of NCBI NO: 38346633 NR Description: OSJNBa0072D21.3 [Oryza sativa (japonica
  misc_feature (1)..(259): Homolog of NCBI NO: 24217327 NR Description: conserved hypothetical protein
  misc_feature (1)..(265): Homolog of NCBI NO: 18412023 NR Description: bile acid:sodium symporter family [Arabidopsis
  misc_feature (1)..(271): Homolog of NCBI NO: 28393076 NR Description: putative Na+ dependent ileal bile acid
  misc_feature (1)..(271): Homolog of NCBI NO: 34911708 NR Description: P0707D10.18 [Oryza sativa (japonica
  misc_feature (1)..(247): Homolog of NCBI NO: 7485401 NR Description: hypothetical protein At2g26900 [imported] -
  misc_feature (1)..(271): Homolog of NCBI NO: 20269901 NR Description: putative sodium-dependent bile acid symporter
  misc_feature (1)..(271): Homolog of NCBI NO: 30683305 NR Description: bile acid:sodium symporter family [Arabidopsis
MLSMGLTLTFEDFRRCLRNPWTVGVGFLAQYMIKPILGFLIAMTLKLSAPLATGLILVSCCPGGQASNVATYISKGNVALSVLMTTCSTIGAIIMTPLLTKLLAGQLVPVDAAGLALSTFQVVLVPTIIGVLANEFFPKFTSKIITVTPLIGVILTTLLCASPIGQVADVLKTQGAQLILPVALLHAAAFAIGYWISKFSFGESTSRTISIECGMQSSALGFLLAQKHFTNPLVAVPSAVSVVCMALGGSGLAVFWRNLPIPADDKDDFKE

SEQ ID NO: 22582 - protein, 268 aa, Arabidopsis thaliana
  peptide (1)..(268): Ceres Seq. ID no. 13609866
  misc_feature (1)..(168): Pfam Name: Sodium Bile acid symporter family Pfam Description: Sodium Bile acid symporter family
  misc_feature (1)..(254): Homolog of NCBI NO: 22298669 NR Description: ORF_ID:tll1126~probable sodium-dependent
  misc_feature (1)..(254): Homolog of NCBI NO: 33865169 NR Description: Sodium/bile acid cotransporter family
  misc_feature (1)..(261): Homolog of NCBI NO: 38346633 NR Description: OSJNBa0072D21.3 [Oryza sativa (japonica
  misc_feature (1)..(256): Homolog of NCBI NO: 24217327 NR Description: conserved hypothetical protein
  misc_feature (1)..(262): Homolog of NCBI NO: 18412023 NR Description: bile acid:sodium symporter family [Arabidopsis
  misc_feature (1)..(268): Homolog of NCBI NO: 28393076 NR Description: putative Na+ dependent ileal bile acid
  misc_feature (1)..(268): Homolog of NCBI NO: 34911708 NR Description: P0707D10.18 [Oryza sativa (japonica
  misc_feature (1)..(244): Homolog of NCBI NO: 7485401 NR Description: hypothetical protein At2g26900 [imported] -
  misc_feature (1)..(268): Homolog of NCBI NO: 20269901 NR Description: putative sodium-dependent bile acid symporter
  misc_feature (1)..(268): Homolog of NCBI NO: 30683305 NR Description: bile acid:sodium symporter family [Arabidopsis
MGLTLTFEDFRRCLRNPWTVGVGFLAQYMIKPILGFLIAMTLKLSAPLATGLILVSCCPGGQASNVATYISKGNVALSVLMTTCSTIGAIIMTPLLTKLLAGQLVPVDAAGLALSTFQVVLVPTIIGVLANEFFPKFTSKIITVTPLIGVILTTLLCASPIGQVADVLKTQGAQLILPVALLHAAAFAIGYWISKFSFGESTSRTISIECGMQSSALGFLLAQKHFTNPLVAVPSAVSVVCMALGGSGLAVFWRNLPIPADDKDDFKE

SEQ ID NO: 22583 - DNA, 1776 bp, Arabidopsis thaliana
  misc_feature (1)..(1776): Ceres Seq. ID no. 12687631
  misc_feature: MA Experiment ID: 108434 Result: Down-regulated in Transcription
  misc_feature: MA Experiment 108434 PARAMETER Experiment Name: At_Root_Tips_cDNA_P Parameter: Tissue Value: Root Tips
  misc_feature: MA Experiment ID: 108572 Result: Up-regulated in Transcription
  misc_feature: MA Experiment 108572 PARAMETER Experiment Name: At_Drought_cDNA_P Parameter: Timepoint (hr) Value: 1
  misc_feature: MA Experiment 108572 PARAMETER Experiment Name: At_Drought_cDNA_P Parameter: Tissue Value: Aerial
  misc_feature: MA Experiment 108572 PARAMETER Experiment Name: At_Drought_cDNA_P Parameter: Treatment Value: Drought vs. No Drought
  misc_feature: MA Experiment ID: 108573 Result: Up-regulated in Transcription
  misc_feature: MA Experiment 108573 PARAMETER Experiment Name: At_Drought_cDNA_P Parameter: Timepoint (hr) Value: 6
  misc_feature: MA Experiment 108573 PARAMETER Experiment Name: At_Drought_cDNA_P Parameter: Tissue Value: Aerial
  misc_feature: MA Experiment 108573 PARAMETER Experiment Name: At_Drought_cDNA_P Parameter: Treatment Value: Drought vs. No Drought
  misc_feature: MA Experiment ID: 20000113 Result: Down-regulated in Transcription
  misc_feature: MA Experiment 20000113 PARAMETER Experiment Name: At_42deg_Heat_cDNA_P Parameter: Temperature (deg C) Value: 42 vs. 22
  misc_feature: MA Experiment 20000113 PARAMETER Experiment Name: At_42deg_Heat_cDNA_P Parameter: Timepoint (hr) Value: 8
  misc_feature: MA Experiment 20000113 PARAMETER Experiment Name: At_42deg_Heat_cDNA_P Parameter: Tissue Value: Aerial
  misc_feature: MA Experiment ID: 20000144 Result: Down-regulated in Transcription
  misc_feature: MA Experiment 20000144 PARAMETER Experiment Name: At_42deg_Heat_cDNA_P Parameter: Temperature (deg C) Value: 42 vs. 22
  misc_feature: MA Experiment 20000144 PARAMETER Experiment Name: At_42deg_Heat_cDNA_P Parameter: Timepoint (hr) Value: 1
  misc_feature: MA Experiment 20000144 PARAMETER Experiment Name: At_42deg_Heat_cDNA_P Parameter: Tissue Value: Aerial
  misc_feature: MA Experiment ID: 20000171 Result: Down-regulated in Transcription
  misc_feature: MA Experiment 20000171 PARAMETER Experiment Name: At_42deg_Heat_P Parameter: Age (day) Value: 14
  misc_feature: MA Experiment 20000171 PARAMETER Experiment Name: At_42deg_Heat_P Parameter: Organism Value: A. thaliana
  misc_feature: MA Experiment 20000171 PARAMETER Experiment Name: At_42deg_Heat_P Parameter: Plant Line Value: WS
  misc_feature: MA Experiment 20000171 PARAMETER Experiment Name: At_42deg_Heat_P Parameter: Temperature (deg C) Value: 42 vs. 22
  misc_feature: MA Experiment 20000171 PARAMETER Experiment Name: At_42deg_Heat_P Parameter: Timepoint (hr) Value: 1
  misc_feature: MA Experiment 20000171 PARAMETER Experiment Name: At_42deg_Heat_P Parameter: Tissue Value: Aerial
  misc_feature: MA Experiment ID: 20000173 Result: Down-regulated in Transcription
  misc_feature: MA Experiment 20000173 PARAMETER Experiment Name: At_42deg_Heat_P Parameter: Age (day) Value: 14
  misc_feature: MA Experiment 20000173 PARAMETER Experiment Name: At_42deg_Heat_P Parameter: Organism Value: A. thaliana
  misc_feature: MA Experiment 20000173 PARAMETER Experiment Name: At_42deg_Heat_P Parameter: Plant Line Value: WS
  misc_feature: MA Experiment 20000173 PARAMETER Experiment Name: At_42deg_Heat_P Parameter: Temperature (deg C) Value: 42 vs. 22
  misc_feature: MA Experiment 20000173 PARAMETER Experiment Name: At_42deg_Heat_P Parameter: Timepoint (hr) Value: 6
  misc_feature: MA Experiment 20000173 PARAMETER Experiment Name: At_42deg_Heat_P Parameter: Tissue Value: Aerial
  misc_feature: MA Experiment ID: 20000437 Result: Up-regulated in Transcription
  misc_feature: MA Experiment 20000437 PARAMETER Experiment Name: At_Drought_P Parameter: Age (day) Value: 8
  misc_feature: MA Experiment 20000437 PARAMETER Experiment Name: At_Drought_P Parameter: Organism Value: A. thaliana
  misc_feature: MA Experiment 20000437 PARAMETER Experiment Name: At_Drought_P Parameter: Plant Line Value: WS
  misc_feature: MA Experiment 20000437 PARAMETER Experiment Name: At_Drought_P Parameter: Timepoint (hr) Value: 24
  misc_feature: MA Experiment 20000437 PARAMETER Experiment Name: At_Drought_P Parameter: Tissue Value: Whole Plant
  misc_feature: MA Experiment 20000437 PARAMETER Experiment Name: At_Drought_P Parameter: Treatment Value: Drought vs. No Drought
  misc_feature: MA Experiment ID: 20000794 Result: Up-regulated in Transcription
  misc_feature: MA Experiment 20000794 PARAMETER Experiment Name: At_Petals_P Parameter: Age (day) Value: 23-25 days
  misc_feature: MA Experiment 20000794 PARAMETER Experiment Name: At_Petals_P Parameter: Plant Line Value: WS
  misc_feature: MA Experiment 20000794 PARAMETER Experiment Name: At_Petals_P Parameter: Tissue Value: Petals vs. Whole plant
  misc_feature: MA Experiment ID: 20001248 Result: Up-regulated in Transcription
  misc_feature: MA Experiment 20001248 PARAMETER Experiment Name: At_Far-red-induction_P Parameter: Age (day) Value: 7
  misc_feature: MA Experiment 20001248 PARAMETER Experiment Name: At_Far-red-induction_P Parameter: Light Value: Far-red vs. White
  misc_feature: MA Experiment 20001248 PARAMETER Experiment Name: At_Far-red-induction_P Parameter: Organism Value: A. thaliana
  misc_feature: MA Experiment 20001248 PARAMETER Experiment Name: At_Far-red-induction_P Parameter: Plant Line Value: Columbia
  misc_feature: MA Experiment 20001248 PARAMETER Experiment Name: At_Far-red-induction_P Parameter: Timepoint (hr) Value: 4
  misc_feature: MA Experiment 20001248 PARAMETER Experiment Name: At_Far-red-induction_P Parameter: Tissue Value: Whole Plant
  misc_feature: MA Experiment ID: 20001911 Result: Up-regulated in Transcription
  misc_feature: MA Experiment 20001911 PARAMETER Experiment Name: At_Drought_Reproduction_P Parameter: Age (day) Value: 40
  misc_feature: MA Experiment 20001911 PARAMETER Experiment Name: At_Drought_Reproduction_P Parameter: Organism Value: A. thaliana
  misc_feature: MA Experiment 20001911 PARAMETER Experiment Name: At_Drought_Reproduction_P Parameter: Plant Line Value: WS
  misc_feature: MA Experiment 20001911 PARAMETER Experiment Name: At_Drought_Reproduction_P Parameter: Timepoint (day) Value: 10
  misc_feature: MA Experiment 20001911 PARAMETER Experiment Name: At_Drought_Reproduction_P Parameter: Tissue Value: Flowers
  misc_feature: MA Experiment 20001911 PARAMETER Experiment Name: At_Drought_Reproduction_P Parameter: Treatment Value: Drought vs. No Drought
atgacggggaagcgatcaaagactaattgcagatctgcttctcacaagctcttcaaggataaggctaagaaccgtgttgatgatttgcaaggcatgcttttggatcttcagtttgcgaggaaagagagtaggcctactgatgttactcttcttgaggagcaagtgaatcagatgcttcgtgagtggaaatctgagctcaatgagccttctccagcttcatccttgcaacaaggtggtactctggggtctttctcatcagatatttgtcggctgctgcagctctgtgatgaggaagatgatgctaccagcaaattagctgcccccaagcccgagcctgctgatcagaatctcgaagctggcaaagctgctgtcttccaaaggggatacaatttggttcaggggaagtcagaacatggattaccattggttgataattgcaaagatttgtccttagcagctggtaacaatttcgatggaacggctcctttggagtatcatcagcagtatgatctgcaacaagagtttgaaccaaacttcaatggtggtttcaacaattgtcccagttatggtgtagtagagggtcctatacatatctctaattttatcccgactatttgtcctccaccctctgcattcttgggtccaaaatgtgctctttgggattgccctaggccagctcagggatttgattggttccaggattactgcagcagcttccacgctgcactggctttcaatgaagggccaccaggtatgaatccggtggtgcgtcctggaggtatcggcctaaaagacggtctgctttttgctgctcttagtgcaaaggctggagggaaagatgttggtattcccgaatgtgaaggagctgcaactgctaaatctccatggaatgctccagagctctttgatctcacggttctggagagtgagacactaagggagtggctattctttgacaagccaaggagggcctttgagagcgggaacagaaagcaaagatctttaccagactacaatggtcgtggttggcacgagtcacgtaaacagatcatggtcgagtttggagggctgaagagatcttactacatggatccacagcctctgcaccatttcgaatggcatctttacgaatatgagatcaacaagtgtgatgcttgtgccttgtacaggctcgagctcaagcttgttgacgggaagaagacttcaaaaggcaaagtctcaaacgactcagtggctgatctgcagaagcagatgggaagactcacagctgagttccctccagaaaacaataccactaacaccaccaacaacaacaaacgctgcatcaaaggaagaccaaaagtgagcacaaaagtcgccaccgggaatgttcagaacacagtagagcaggcaaatgactatggagtaggtgaagagtttaactatctggtcggaaatctaagcgactattatatcccctgagacgaatgtggaaaaactcagttctctgtctatctatggagattatgtatatataacaagaagtggatgctgaagactgtcctggagttaggaatagtaaatgtgacgaaggagactgctttttaagattcagtctatggaggtgaagacatatttactgacattccggtttatatattttgatgcattttcgactctcttctgcgatataatgcagatgacaaattatgtaaccgatggggaaatacggttttgagtatcagtgttgttcttatagaatcaggaccttgttcaatgagatcattgctcttactt

SEQ ID NO: 22584 - protein, 486 aa, Arabidopsis thaliana
  peptide (1)..(486): Ceres Seq. ID no. 12687632
  misc_feature (23)..(75): Homolog of NCBI NO: 25370817 NR Description: hypothetical protein At2g42400 [imported] -
  misc_feature (160)..(420): Homolog of NCBI NO: 25370817 NR Description: hypothetical protein At2g42400 [imported] -
  misc_feature (300)..(486): Homolog of NCBI NO: 6691215 NR Description: F1K23.24 [Arabidopsis thaliana]
  misc_feature (23)..(112): Homolog of NCBI NO: 18405962 NR Description: expressed protein
  misc_feature (160)..(420): Homolog of NCBI NO: 18405962 NR Description: expressed protein
  misc_feature (4)..(120): Homolog of NCBI NO: 34909602 NR Description: P0435B05.21 [Oryza sativa (japonica
  misc_feature (155)..(486): Homolog of NCBI NO: 34909602 NR Description: P0435B05.21 [Oryza sativa (japonica
  misc_feature (1)..(486): Homolog of NCBI NO: 15218694 NR Description: unknown protein; protein id: At1g28520.1
MTGKRSKTNCRSASHKLFKDKAKNRVDDLQGMLLDLQFARKESRPTDVTLLEEQVNQMLREWKSELNEPSPASSLQQGGTLGSFSSDICRLLQLCDEEDDATSKLAAPKPEPADQNLEAGKAAVFQRGYNLVQGKSEHGLPLVDNCKDLSLAAGNNFDGTAPLEYHQQYDLQQEFEPNFNGGFNNCPSYGVVEGPIHISNFIPTICPPPSAFLGPKCALWDCPRPAQGFDWFQDYCSSFHAALAFNEGPPGMNPVVRPGGIGLKDGLLFAALSAKAGGKDVGIPECEGAATAKSPWNAPELFDLTVLESETLREWLFFDKPRRAFESGNRKQRSLPDYNGRGWHESRKQIMVEFGGLKRSYYMDPQPLHHFEWHLYEYEINKCDACALYRLELKLVDGKKTSKGKVSNDSVADLQKQMGRLTAEFPPENNTTNTTNNNKRCIKGRPKVSTKVATGNVQNTVEQANDYGVGEEFNYLVGNLSDYYIP

SEQ ID NO: 22585 - protein, 455 aa, Arabidopsis thaliana
  peptide (1)..(455): Ceres Seq. ID no. 12687633
  misc_feature (1)..(44): Homolog of NCBI NO: 25370817 NR Description: hypothetical protein At2g42400 [imported] -
  misc_feature (129)..(389): Homolog of NCBI NO: 25370817 NR Description: hypothetical protein At2g42400 [imported] -
  misc_feature (269)..(455): Homolog of NCBI NO: 6691215 NR Description: F1K23.24 [Arabidopsis thaliana]
  misc_feature (1)..(81): Homolog of NCBI NO: 18405962 NR Description: expressed protein
  misc_feature (129)..(389): Homolog of NCBI NO: 18405962 NR Description: expressed protein
  misc_feature (1)..(89): Homolog of NCBI NO: 34909602 NR Description: P0435B05.21 [Oryza sativa (japonica
  misc_feature (124)..(455): Homolog of NCBI NO: 34909602 NR Description: P0435B05.21 [Oryza sativa (japonica
  misc_feature (1)..(455): Homolog of NCBI NO: 15218694 NR Description: unknown protein; protein id: At1g28520.1
MLLDLQFARKESRPTDVTLLEEQVNQMLREWKSELNEPSPASSLQQGGTLGSFSSDICRLLQLCDEEDDATSKLAAPKPEPADQNLEAGKAAVFQRGYNLVQGKSEHGLPLVDNCKDLSLAAGNNFDGTAPLEYHQQYDLQQEFEPNFNGGFNNCPSYGVVEGPIHISNFIPTICPPPSAFLGPKCALWDCPRPAQGFDWFQDYCSSFHAALAFNEGPPGMNPVVRPGGIGLKDGLLFAALSAKAGGKDVGIPECEGAATAKSPWNAPELFDLTVLESETLREWLFFDKPRRAFESGNRKQRSLPDYNGRGWHESRKQIMVEFGGLKRSYYMDPQPLHHFEWHLYEYEINKCDACALYRLELKLVDGKKTSKGKVSNDSVADLQKQMGRLTAEFPPENNTTNTTNNNKRCIKGRPKVSTKVATGNVQNTVEQANDYGVGEEFNYLVGNLSDYYIP

SEQ ID NO: 22586 - protein, 429 aa, Arabidopsis thaliana
  peptide (1)..(429): Ceres Seq. ID no. 12687634
  misc_feature (1)..(18): Homolog of NCBI NO: 25370817 NR Description: hypothetical protein At2g42400 [imported] -
  misc_feature (103)..(363): Homolog of NCBI NO: 25370817 NR Description: hypothetical protein At2g42400 [imported] -
  misc_feature (243)..(429): Homolog of NCBI NO: 6691215 NR Description: F1K23.24 [Arabidopsis thaliana]
  misc_feature (1)..(55): Homolog of NCBI NO: 18405962 NR Description: expressed protein
  misc_feature (103)..(363): Homolog of NCBI NO: 18405962 NR Description: expressed protein
  misc_feature (1)..(63): Homolog of NCBI NO: 34909602 NR Description: P0435B05.21 [Oryza sativa (japonica
  misc_feature (98)..(429): Homolog of NCBI NO: 34909602 NR Description: P0435B05.21 [Oryza sativa (japonica
  misc_feature (1)..(429): Homolog of NCBI NO: 15218694 NR Description: unknown protein; protein id: At1g28520.1
MLREWKSELNEPSPASSLQQGGTLGSFSSDICRLLQLCDEEDDATSKLAAPKPEPADQNLEAGKAAVFQRGYNLVQGKSEHGLPLVDNCKDLSLAAGNNFDGTAPLEYHQQYDLQQEFEPNFNGGFNNCPSYGVVEGPIHISNFIPTICPPPSAFLGPKCALWDCPRPAQGFDWFQDYCSSFHAALAFNEGPPGMNPVVRPGGIGLKDGLLFAALSAKAGGKDVGIPECEGAATAKSPWNAPELFDLTVLESETLREWLFFDKPRRAFESGNRKQRSLPDYNGRGWHESRKQIMVEFGGLKRSYYMDPQPLHHFEWHLYEYEINKCDACALYRLELKLVDGKKTSKGKVSNDSVADLQKQMGRLTAEFPPENNTTNTTNNNKRCIKGRPKVSTKVATGNVQNTVEQANDYGVGEEFNYLVGNLSDYYIP

SEQ ID NO: 22587 - DNA, 803 bp, Arabidopsis thaliana
  misc_feature (1)..(803): Ceres Seq. ID no. 12339062
  misc_feature: MA Experiment ID: 108461 Result: Up-regulated in Transcription
  misc_feature: MA Experiment 108461 PARAMETER Experiment Name: At_Germinating_Seeds_cDNA_P Parameter: Age (day) Value: 1 vs. 0
  misc_feature: MA Experiment 108461 PARAMETER Experiment Name: At_Germinating_Seeds_cDNA_P Parameter: Tissue Value: Germinating Seeds
  misc_feature: MA Experiment ID: 108462 Result: Up-regulated in Transcription
  misc_feature: MA Experiment 108462 PARAMETER Experiment Name: At_Germinating_Seeds_cDNA_P Parameter: Age (day) Value: 2 vs. 0
  misc_feature: MA Experiment 108462 PARAMETER Experiment Name: At_Germinating_Seeds_cDNA_P Parameter: Tissue Value: Germinating Seeds
  misc_feature: MA Experiment ID: 108595 Result: Down-regulated in Transcription
  misc_feature: MA Experiment 108595 PARAMETER Experiment Name: At_Ler-pi_Ovule_cDNA_P Parameter: Plant Line Value: null
  misc_feature: MA Experiment ID: 108667 Result: Down-regulated in Transcription
  misc_feature: MA Experiment 108667 PARAMETER Experiment Name: At_2mM_SA_cDNA_P Parameter: Plant Line Value: WS
  misc_feature: MA Experiment 108667 PARAMETER Experiment Name: At_2mM_SA_cDNA_P Parameter: Timepoint (hr) Value: 1
  misc_feature: MA Experiment 108667 PARAMETER Experiment Name: At_2mM_SA_cDNA_P Parameter: Treatment Value: 2mM SA vs. No Treatment
  misc_feature: MA Experiment ID: 108668 Result: Down-regulated in Transcription
  misc_feature: MA Experiment 108668 PARAMETER Experiment Name: At_2mM_SA_cDNA_P Parameter: Plant Line Value: WS
  misc_feature: MA Experiment 108668 PARAMETER Experiment Name: At_2mM_SA_cDNA_P Parameter: Timepoint (hr) Value: 6
  misc_feature: MA Experiment 108668 PARAMETER Experiment Name: At_2mM_SA_cDNA_P Parameter: Treatment Value: 2mM SA vs. No Treatment
  misc_feature: MA Experiment ID: 20000070 Result: Down-regulated in Transcription
  misc_feature: MA Experiment 20000070 PARAMETER Experiment Name: At_100uM_ABA_Mutants_cDNA_P Parameter: Plant Line Value: CS24
  misc_feature: MA Experiment 20000070 PARAMETER Experiment Name: At_100uM_ABA_Mutants_cDNA_P Parameter: Timepoint (hr) Value: 6
  misc_feature: MA Experiment 20000070 PARAMETER Experiment Name: At_100uM_ABA_Mutants_cDNA_P Parameter: Tissue Value: Aerial
  misc_feature: MA Experiment 20000070 PARAMETER Experiment Name: At_100uM_ABA_Mutants_cDNA_P Parameter: Treatment Value: 100uM ABA vs. No Treatment
  misc_feature: MA Experiment ID: 20000071 Result: Down-regulated in Transcription
  misc_feature: MA Experiment 20000071 PARAMETER Experiment Name: At_100uM_ABA_Mutants_cDNA_P Parameter: Plant Line Value: CS8104
  misc_feature: MA Experiment 20000071 PARAMETER Experiment Name: At_100uM_ABA_Mutants_cDNA_P Parameter: Timepoint (hr) Value: 6
  misc_feature: MA Experiment 20000071 PARAMETER Experiment Name: At_100uM_ABA_Mutants_cDNA_P Parameter: Tissue Value: Aerial
  misc_feature: MA Experiment 20000071 PARAMETER Experiment Name: At_100uM_ABA_Mutants_cDNA_P Parameter: Treatment Value: 100uM ABA vs. No Treatment
  misc_feature: MA Experiment ID: 20000087 Result: Down-regulated in Transcription
  misc_feature: MA Experiment 20000087 PARAMETER Experiment Name: At_100uM_ABA_Mutants_cDNA_P Parameter: Plant Line Value: WS
  misc_feature: MA Experiment 20000087 PARAMETER Experiment Name: At_100uM_ABA_Mutants_cDNA_P Parameter: Timepoint (hr) Value: 6
  misc_feature: MA Experiment 20000087 PARAMETER Experiment Name: At_100uM_ABA_Mutants_cDNA_P Parameter: Tissue Value: Aerial
  misc_feature: MA Experiment 20000087 PARAMETER Experiment Name: At_100uM_ABA_Mutants_cDNA_P Parameter: Treatment Value: 100uM ABA vs. No Treatment
  misc_feature: MA Experiment ID: 20000117 Result: Down-regulated in Transcription
  misc_feature: MA Experiment 20000117 PARAMETER Experiment Name: At_100uM_ABA_Mutants_cDNA_P Parameter: Plant Line Value: Columbia
  misc_feature: MA Experiment 20000117 PARAMETER Experiment Name: At_100uM_ABA_Mutants_cDNA_P Parameter: Timepoint (hr) Value: 6
  misc_feature: MA Experiment 20000117 PARAMETER Experiment Name: At_100uM_ABA_Mutants_cDNA_P Parameter: Tissue Value: Aerial
  misc_feature: MA Experiment 20000117 PARAMETER Experiment Name: At_100uM_ABA_Mutants_cDNA_P Parameter: Treatment Value: 100uM ABA vs. No Treatment
  misc_feature: MA Experiment ID: 20000180 Result: Up-regulated in Transcription
  misc_feature: MA Experiment 20000180 PARAMETER Experiment Name: At_Germinating_Seeds_P Parameter: Age (hr) Value: 24 vs. 0
  misc_feature: MA Experiment 20000180 PARAMETER Experiment Name: At_Germinating_Seeds_P Parameter: Tissue Value: Germinating Seeds
  misc_feature: MA Experiment ID: 20000444 Result: Up-regulated in Transcription
  misc_feature: MA Experiment 20000444 PARAMETER Experiment Name: At_100uM_NAA__P Parameter: Age (day) Value: 14
  misc_feature: MA Experiment 20000444 PARAMETER Experiment Name: At_100uM_NAA__P Parameter: Organism Value: A. thaliana
  misc_feature: MA Experiment 20000444 PARAMETER Experiment Name: At_100uM_NAA__P Parameter: Plant Line Value: WS
  misc_feature: MA Experiment 20000444 PARAMETER Experiment Name: At_100uM_NAA__P Parameter: Timepoint (hr) Value: 1
  misc_feature: MA Experiment 20000444 PARAMETER Experiment Name: At_100uM_NAA__P Parameter: Tissue Value: Aerial
  misc_feature: MA Experiment 20000444 PARAMETER Experiment Name: At_100uM_NAA__P Parameter: Treatment Value: 100uM NAA vs. No Treatment
  misc_feature: MA Experiment ID: 20000445 Result: Up-regulated in Transcription
  misc_feature: MA Experiment 20000445 PARAMETER Experiment Name: At_100uM_NAA__P Parameter: Age (day) Value: 14
  misc_feature: MA Experiment 20000445 PARAMETER Experiment Name: At_100uM_NAA__P Parameter: Organism Value: A. thaliana
  misc_feature: MA Experiment 20000445 PARAMETER Experiment Name: At_100uM_NAA__P Parameter: Plant Line Value: WS
  misc_feature: MA Experiment 20000445 PARAMETER Experiment Name: At_100uM_NAA__P Parameter: Timepoint (hr) Value: 6
  misc_feature: MA Experiment 20000445 PARAMETER Experiment Name: At_100uM_NAA__P Parameter: Tissue Value: Aerial
  misc_feature: MA Experiment 20000445 PARAMETER Experiment Name: At_100uM_NAA__P Parameter: Treatment Value: 100uM NAA vs. No Treatment
  misc_feature: MA Experiment ID: 20000573 Result: Down-regulated in Transcription
  misc_feature: MA Experiment 20000573 PARAMETER Experiment Name: At_100uM_ABA_Mutants__P Parameter: Organism Value: A. thaliana
  misc_feature: MA Experiment 20000573 PARAMETER Experiment Name: At_100uM_ABA_Mutants__P Parameter: Plant Line Value: CS22 vs. Ler wt
  misc_feature: MA Experiment 20000573 PARAMETER Experiment Name: At_100uM_ABA_Mutants__P Parameter: Timepoint (hr) Value: N/A
  misc_feature: MA Experiment 20000573 PARAMETER Experiment Name: At_100uM_ABA_Mutants__P Parameter: Tissue Value: Whole Plant
  misc_feature: MA Experiment 20000573 PARAMETER Experiment Name: At_100uM_ABA_Mutants__P Parameter: Treatment Value: None
  misc_feature: MA Experiment ID: 20001247 Result: Up-regulated in Transcription
  misc_feature: MA Experiment 20001247 PARAMETER Experiment Name: At_Far-red-induction_P Parameter: Age (day) Value: 7
  misc_feature: MA Experiment 20001247 PARAMETER Experiment Name: At_Far-red-induction_P Parameter: Light Value: Far-red vs. White
  misc_feature: MA Experiment 20001247 PARAMETER Experiment Name: At_Far-red-induction_P Parameter: Organism Value: A. thaliana
  misc_feature: MA Experiment 20001247 PARAMETER Experiment Name: At_Far-red-induction_P Parameter: Plant Line Value: Columbia
  misc_feature: MA Experiment 20001247 PARAMETER Experiment Name: At_Far-red-induction_P Parameter: Timepoint (hr) Value: 1
  misc_feature: MA Experiment 20001247 PARAMETER Experiment Name: At_Far-red-induction_P Parameter: Tissue Value: Whole Plant
  misc_feature: MA Experiment ID: 20001248 Result: Up-regulated in Transcription
  misc_feature: MA Experiment 20001248 PARAMETER Experiment Name: At_Far-red-induction_P Parameter: Age (day) Value: 7
  misc_feature: MA Experiment 20001248 PARAMETER Experiment Name: At_Far-red-induction_P Parameter: Light Value: Far-red vs. White
  misc_feature: MA Experiment 20001248 PARAMETER Experiment Name: At_Far-red-induction_P Parameter: Organism Value: A. thaliana
  misc_feature: MA Experiment 20001248 PARAMETER Experiment Name: At_Far-red-induction_P Parameter: Plant Line Value: Columbia
  misc_feature: MA Experiment 20001248 PARAMETER Experiment Name: At_Far-red-induction_P Parameter: Timepoint (hr) Value: 4
  misc_feature: MA Experiment 20001248 PARAMETER Experiment Name: At_Far-red-induction_P Parameter: Tissue Value: Whole Plant
  misc_feature: MA Experiment ID: 20001757 Result: Up-regulated in Transcription
  misc_feature: MA Experiment 20001757 PARAMETER Experiment Name: At_50mM_NH4NO3_L-to-H_P Parameter: Timepoint (hr) Value: 6
  misc_feature: MA Experiment 20001757 PARAMETER Experiment Name: At_50mM_NH4NO3_L-to-H_P Parameter: Tissue Value: Leaf
  misc_feature: MA Experiment 20001757 PARAMETER Experiment Name: At_50mM_NH4NO3_L-to-H_P Parameter: Treatment Value: 50mM NH4NO3 vs 100mM Mannitol
  misc_feature: MA Experiment ID: 20001768 Result: Up-regulated in Transcription
  misc_feature: MA Experiment 20001768 PARAMETER Experiment Name: At_Far-red-enriched-adult_P Parameter: Age (day) Value: 28
  misc_feature: MA Experiment 20001768 PARAMETER Experiment Name: At_Far-red-enriched-adult_P Parameter: Light Value: Far-red enriched vs. White
  misc_feature: MA Experiment 20001768 PARAMETER Experiment Name: At_Far-red-enriched-adult_P Parameter: Organism Value: A. thaliana
  misc_feature: MA Experiment 20001768 PARAMETER Experiment Name: At_Far-red-enriched-adult_P Parameter: Plant Line Value: Columbia
  misc_feature: MA Experiment 20001768 PARAMETER Experiment Name: At_Far-red-enriched-adult_P Parameter: Timepoint (hr) Value: 1
  misc_feature: MA Experiment 20001768 PARAMETER Experiment Name: At_Far-red-enriched-adult_P Parameter: Tissue Value: Aerial
acacaagcattttcaaggatatcaaatcacaatcccaagaagagcaataacaagagaagaagaagtagttcaagaattaaggaagagagcttctccgttaaagtatagtgagagaatatggaagtcaccaatgggcttaaccttaaggacacagagcttcgtttgggattacccggagcacaagaagaacaacaactagaactttcttgcgtcagaagcaacaacaagcgcaagaacaacgactcaacagaagaatctgctcctcctcctgcaaaaacacaaatcgttggatggcctccagtgagatctaaccgtaagaacaacaacaacaaaaacgtgagttatgtgaaagtgagtatggacggagctccatatctccgtaagatagatctcaagatgtacaaaaactatccagagcttctcaaagcactagagaacatgttcaagttcacagtaggtgaatattccgagagagaaggctacaaaggatctggatttgtacctacttatgaagacaaagatggagattggatgttggtcggtgatgttccatgggacatgttctcttcatcttgtcaaaaactcagaatcatgaaaggatccgaagctcctactgccttatgatccattgtctcaaaacaccttttggtcgaggcaaaaacaaattctactttgtttagataaaaaaaagtttggtgtaaagaaaagaaaaagcaatagggttacaaatacgttatatagatgtaaactagctttggttaattctgtaaaagatgagttttgattatacaaagtttatatgt

SEQ ID NO: 22588 - protein, 168 aa, Arabidopsis thaliana
  peptide (1)..(168): Ceres Seq. ID no. 12339063
  misc_feature (7)..(167): Pfam Name: AUX/IAA family Pfam Description: AUX/IAA family
  misc_feature (10)..(160): Homolog of NCBI NO: 18071490 NR Description: auxin-induced AUX/IAA1 [Antirrhinum majus]
  misc_feature (4)..(164): Homolog of NCBI NO: 20269063 NR Description: aux/IAA protein [Populus tremula x Populus
  misc_feature (7)..(164): Homolog of NCBI NO: 4887012 NR Description: Nt-iaa2.3 deduced protein [Nicotiana tabacum]
  misc_feature (1)..(163): Homolog of NCBI NO: 99663 NR Description: auxin-induced protein AUX2-11 - Arabidopsis
  misc_feature (1)..(163): Homolog of NCBI NO: 15239950 NR Description: auxin-induced protein AUX2-11 (sp P33077)
  misc_feature (5)..(164): Homolog of NCBI NO: 34550779 NR Description: Gbiaa-Re [Gossypium barbadense]
  misc_feature (2)..(165): Homolog of NCBI NO: 2598932 NR Description: auxin-responsive protein IAA2 [Arabidopsis
  misc_feature (2)..(165): Homolog of NCBI NO: 15228939 NR Description: auxin-inducible gene (IAA2)
  misc_feature (1)..(168): Homolog of NCBI NO: 454281 NR Description: auxin-responsive protein
  misc_feature (1)..(168): Homolog of NCBI NO: 15233496 NR Description: auxin-responsive protein IAA1
MEVTNGLNLKDTELRLGLPGAQEEQQLELSCVRSNNKRKNNDSTEESAPPPAKTQIVGWPPVRSNRKNNNNKNVSYVKVSMDGAPYLRKIDLKMYKNYPELLKALENMFKFTVGEYSEREGYKGSGFVPTYEDKDGDWMLVGDVPWDMFSSSCQKLRIMKGSEAPTAL

SEQ ID NO: 22589 - protein, 88 aa, Arabidopsis thaliana
  peptide (1)..(88): Ceres Seq. ID no. 12339064
  misc_feature (1)..(87): Pfam Name: AUX/IAA family Pfam Description: AUX/IAA family
  misc_feature (1)..(80): Homolog of NCBI NO: 18071490 NR Description: auxin-induced AUX/IAA1 [Antirrhinum majus]
  misc_feature (1)..(84): Homolog of NCBI NO: 20269063 NR Description: aux/IAA protein [Populus tremula x Populus
  misc_feature (1)..(84): Homolog of NCBI NO: 4887012 NR Description: Nt-iaa2.3 deduced protein [Nicotiana tabacum]
  misc_feature (1)..(83): Homolog of NCBI NO: 99663 NR Description: auxin-induced protein AUX2-11 - Arabidopsis
  misc_feature (1)..(83): Homolog of NCBI NO: 15239950 NR Description: auxin-induced protein AUX2-11 (sp P33077)
  misc_feature (1)..(84): Homolog of NCBI NO: 34550779 NR Description: Gbiaa-Re [Gossypium barbadense]
  misc_feature (1)..(85): Homolog of NCBI NO: 2598932 NR Description: auxin-responsive protein IAA2 [Arabidopsis
  misc_feature (1)..(85): Homolog of NCBI NO: 15228939 NR Description: auxin-inducible gene (IAA2)
  misc_feature (1)..(88): Homolog of NCBI NO: 454281 NR Description: auxin-responsive protein
  misc_feature (1)..(88): Homolog of NCBI NO: 15233496 NR Description: auxin-responsive protein IAA1
MDGAPYLRKIDLKMYKNYPELLKALENMFKFTVGEYSEREGYKGSGFVPTYEDKDGDWMLVGDVPWDMFSSSCQKLRIMKGSEAPTAL

SEQ ID NO: 22590 - DNA, 1528 bp, Arabidopsis thaliana
  misc_feature (1)..(1528): Ceres Seq. ID no. 13493893
  misc_feature: MA Experiment ID: 108462 Result: Down-regulated in Transcription
  misc_feature: MA Experiment 108462 PARAMETER Experiment Name: At_Germinating_Seeds_cDNA_P Parameter: Age (day) Value: 2 vs. 0
  misc_feature: MA Experiment 108462 PARAMETER Experiment Name: At_Germinating_Seeds_cDNA_P Parameter: Tissue Value: Germinating Seeds
  misc_feature: MA Experiment ID: 108464 Result: Down-regulated in Transcription
  misc_feature: MA Experiment 108464 PARAMETER Experiment Name: At_Germinating_Seeds_cDNA_P Parameter: Age (day) Value: 4 vs. 0
  misc_feature: MA Experiment 108464 PARAMETER Experiment Name: At_Germinating_Seeds_cDNA_P Parameter: Tissue Value: Germinating Seeds
  misc_feature: MA Experiment ID: 108573 Result: Up-regulated in Transcription
  misc_feature: MA Experiment 108573 PARAMETER Experiment Name: At_Drought_cDNA_P Parameter: Timepoint (hr) Value: 6
  misc_feature: MA Experiment 108573 PARAMETER Experiment Name: At_Drought_cDNA_P Parameter: Tissue Value: Aerial
  misc_feature: MA Experiment 108573 PARAMETER Experiment Name: At_Drought_cDNA_P Parameter: Treatment Value: Drought vs. No Drought
  misc_feature: MA Experiment ID: 20000069 Result: Up-regulated in Transcription
  misc_feature: MA Experiment 20000069 PARAMETER Experiment Name: At_100uM_ABA_Mutants_cDNA_P Parameter: Plant Line Value: CS23
  misc_feature: MA Experiment 20000069 PARAMETER Experiment Name: At_100uM_ABA_Mutants_cDNA_P Parameter: Timepoint (hr) Value: 6
  misc_feature: MA Experiment 20000069 PARAMETER Experiment Name: At_100uM_ABA_Mutants_cDNA_P Parameter: Tissue Value: Aerial
  misc_feature: MA Experiment 20000069 PARAMETER Experiment Name: At_100uM_ABA_Mutants_cDNA_P Parameter: Treatment Value: 100uM ABA vs. No Treatment
  misc_feature: MA Experiment ID: 20000070 Result: Up-regulated in Transcription
  misc_feature: MA Experiment 20000070 PARAMETER Experiment Name: At_100uM_ABA_Mutants_cDNA_P Parameter: Plant Line Value: CS24
  misc_feature: MA Experiment 20000070 PARAMETER Experiment Name: At_100uM_ABA_Mutants_cDNA_P Parameter: Timepoint (hr) Value: 6
  misc_feature: MA Experiment 20000070 PARAMETER Experiment Name: At_100uM_ABA_Mutants_cDNA_P Parameter: Tissue Value: Aerial
  misc_feature: MA Experiment 20000070 PARAMETER Experiment Name: At_100uM_ABA_Mutants_cDNA_P Parameter: Treatment Value: 100uM ABA vs. No Treatment
  misc_feature: MA Experiment ID: 20000071 Result: Up-regulated in Transcription
  misc_feature: MA Experiment 20000071 PARAMETER Experiment Name: At_100uM_ABA_Mutants_cDNA_P Parameter: Plant Line Value: CS8104
  misc_feature: MA Experiment 20000071 PARAMETER Experiment Name: At_100uM_ABA_Mutants_cDNA_P Parameter: Timepoint (hr) Value: 6
  misc_feature: MA Experiment 20000071 PARAMETER Experiment Name: At_100uM_ABA_Mutants_cDNA_P Parameter: Tissue Value: Aerial
  misc_feature: MA Experiment 20000071 PARAMETER Experiment Name: At_100uM_ABA_Mutants_cDNA_P Parameter: Treatment Value: 100uM ABA vs. No Treatment
  misc_feature: MA Experiment ID: 20000072 Result: Up-regulated in Transcription
  misc_feature: MA Experiment 20000072 PARAMETER Experiment Name: At_100uM_ABA_Mutants_cDNA_P Parameter: Plant Line Value: CS8105
  misc_feature: MA Experiment 20000072 PARAMETER Experiment Name: At_100uM_ABA_Mutants_cDNA_P Parameter: Timepoint (hr) Value: 6
  misc_feature: MA Experiment 20000072 PARAMETER Experiment Name: At_100uM_ABA_Mutants_cDNA_P Parameter: Tissue Value: Aerial
  misc_feature: MA Experiment 20000072 PARAMETER Experiment Name: At_100uM_ABA_Mutants_cDNA_P Parameter: Treatment Value: 100uM ABA vs. No Treatment
  misc_feature: MA Experiment ID: 20000086 Result: Up-regulated in Transcription
  misc_feature: MA Experiment 20000086 PARAMETER Experiment Name: At_100uM_ABA_Mutants_cDNA_P Parameter: Plant Line Value: CS22
  misc_feature: MA Experiment 20000086 PARAMETER Experiment Name: At_100uM_ABA_Mutants_cDNA_P Parameter: Timepoint (hr) Value: 6
  misc_feature: MA Experiment 20000086 PARAMETER Experiment Name: At_100uM_ABA_Mutants_cDNA_P Parameter: Tissue Value: Aerial
  misc_feature: MA Experiment 20000086 PARAMETER Experiment Name: At_100uM_ABA_Mutants_cDNA_P Parameter: Treatment Value: 100uM ABA vs. No Treatment
  misc_feature: MA Experiment ID: 20000087 Result: Up-regulated in Transcription
  misc_feature: MA Experiment 20000087 PARAMETER Experiment Name: At_100uM_ABA_Mutants_cDNA_P Parameter: Plant Line Value: WS
  misc_feature: MA Experiment 20000087 PARAMETER Experiment Name: At_100uM_ABA_Mutants_cDNA_P Parameter: Timepoint (hr) Value: 6
  misc_feature: MA Experiment 20000087 PARAMETER Experiment Name: At_100uM_ABA_Mutants_cDNA_P Parameter: Tissue Value: Aerial
  misc_feature: MA Experiment 20000087 PARAMETER Experiment Name: At_100uM_ABA_Mutants_cDNA_P Parameter: Treatment Value: 100uM ABA vs. No Treatment
  misc_feature: MA Experiment ID: 20000088 Result: Up-regulated in Transcription
  misc_feature: MA Experiment 20000088 PARAMETER Experiment Name: At_100uM_ABA_Mutants_cDNA_P Parameter: Plant Line Value: Landsberg
  misc_feature: MA Experiment 20000088 PARAMETER Experiment Name: At_100uM_ABA_Mutants_cDNA_P Parameter: Timepoint (hr) Value: 6
  misc_feature: MA Experiment 20000088 PARAMETER Experiment Name: At_100uM_ABA_Mutants_cDNA_P Parameter: Tissue Value: Aerial
  misc_feature: MA Experiment 20000088 PARAMETER Experiment Name: At_100uM_ABA_Mutants_cDNA_P Parameter: Treatment Value: 100uM ABA vs. No Treatment
  misc_feature: MA Experiment ID: 20000089 Result: Up-regulated in Transcription
  misc_feature: MA Experiment ID: 20000090 Result: Up-regulated in Transcription
  misc_feature: MA Experiment ID: 20000184 Result: Down-regulated in Transcription
  misc_feature: MA Experiment 20000184 PARAMETER Experiment Name: At_Shoots__P Parameter: Age (day) Value: 7
  misc_feature: MA Experiment 20000184 PARAMETER Experiment Name: At_Shoots__P Parameter: Tissue Value: Shoots vs. Whole Plant
  misc_feature: MA Experiment ID: 20000224 Result: Down-regulated in Transcription
  misc_feature: MA Experiment ID: 20000437 Result: Up-regulated in Transcription
  misc_feature: MA Experiment 20000437 PARAMETER Experiment Name: At_Drought_P Parameter: Age (day) Value: 8
  misc_feature: MA Experiment 20000437 PARAMETER Experiment Name: At_Drought_P Parameter: Organism Value: A. thaliana
  misc_feature: MA Experiment 20000437 PARAMETER Experiment Name: At_Drought_P Parameter: Plant Line Value: WS
  misc_feature: MA Experiment 20000437 PARAMETER Experiment Name: At_Drought_P Parameter: Timepoint (hr) Value: 24
  misc_feature: MA Experiment 20000437 PARAMETER Experiment Name: At_Drought_P Parameter: Tissue Value: Whole Plant
  misc_feature: MA Experiment 20000437 PARAMETER Experiment Name: At_Drought_P Parameter: Treatment Value: Drought vs. No Drought
  misc_feature: MA Experiment ID: 20000495 Result: Up-regulated in Transcription
  misc_feature: MA Experiment 20000495 PARAMETER Experiment Name: At_Guard_Cells_P Parameter: Harvest Date Value: 8/2/2002
  misc_feature: MA Experiment 20000495 PARAMETER Experiment Name: At_Guard_Cells_P Parameter: Organism Value: A. thaliana
  misc_feature: MA Experiment 20000495 PARAMETER Experiment Name: At_Guard_Cells_P Parameter: Tissue Value: Guard Cells vs. Leaves
  misc_feature: MA Experiment ID: 20000794 Result: Up-regulated in Transcription
  misc_feature: MA Experiment 20000794 PARAMETER Experiment Name: At_Petals_P Parameter: Age (day) Value: 23-25 days
  misc_feature: MA Experiment 20000794 PARAMETER Experiment Name: At_Petals_P Parameter: Plant Line Value: WS
  misc_feature: MA Experiment 20000794 PARAMETER Experiment Name: At_Petals_P Parameter: Tissue Value: Petals vs. Whole plant
  misc_feature: MA Experiment ID: 20001247 Result: Down-regulated in Transcription
  misc_feature: MA Experiment 20001247 PARAMETER Experiment Name: At_Far-red-induction_P Parameter: Age (day) Value: 7
  misc_feature: MA Experiment 20001247 PARAMETER Experiment Name: At_Far-red-induction_P Parameter: Light Value: Far-red vs. White
  misc_feature: MA Experiment 20001247 PARAMETER Experiment Name: At_Far-red-induction_P Parameter: Organism Value: A. thaliana
  misc_feature: MA Experiment 20001247 PARAMETER Experiment Name: At_Far-red-induction_P Parameter: Plant Line Value: Columbia
  misc_feature: MA Experiment 20001247 PARAMETER Experiment Name: At_Far-red-induction_P Parameter: Timepoint (hr) Value: 1
  misc_feature: MA Experiment 20001247 PARAMETER Experiment Name: At_Far-red-induction_P Parameter: Tissue Value: Whole Plant
  misc_feature: MA Experiment ID: 20001248 Result: Up-regulated in Transcription
  misc_feature: MA Experiment 20001248 PARAMETER Experiment Name: At_Far-red-induction_P Parameter: Age (day) Value: 7
  misc_feature: MA Experiment 20001248 PARAMETER Experiment Name: At_Far-red-induction_P Parameter: Light Value: Far-red vs. White
  misc_feature: MA Experiment 20001248 PARAMETER Experiment Name: At_Far-red-induction_P Parameter: Organism Value: A. thaliana
  misc_feature: MA Experiment 20001248 PARAMETER Experiment Name: At_Far-red-induction_P Parameter: Plant Line Value: Columbia
  misc_feature: MA Experiment 20001248 PARAMETER Experiment Name: At_Far-red-induction_P Parameter: Timepoint (hr) Value: 4
  misc_feature: MA Experiment 20001248 PARAMETER Experiment Name: At_Far-red-induction_P Parameter: Tissue Value: Whole Plant
  misc_feature: MA Experiment ID: 20001451 Result: Down-regulated in Transcription
  misc_feature: MA Experiment 20001451 PARAMETER Experiment Name: At_Far-red-induction_P Parameter: Age (day) Value: 7
  misc_feature: MA Experiment 20001451 PARAMETER Experiment Name: At_Far-red-induction_P Parameter: Light Value: Far-red vs. White
  misc_feature: MA Experiment 20001451 PARAMETER Experiment Name: At_Far-red-induction_P Parameter: Organism Value: A. thaliana
  misc_feature: MA Experiment 20001451 PARAMETER Experiment Name: At_Far-red-induction_P Parameter: Plant Line Value: Columbia
  misc_feature: MA Experiment 20001451 PARAMETER Experiment Name: At_Far-red-induction_P Parameter: Timepoint (hr) Value: 24
  misc_feature: MA Experiment 20001451 PARAMETER Experiment Name: At_Far-red-induction_P Parameter: Tissue Value: Whole Plant
agttcgcaacaccgcaatagatcttttccccaagtttcagacaaacataaagcagcagagaaaattttcaagtttcaaagagcttttccctcaccaagcaaaatttggatatttgtcagcgaaatctgcagctaaattgggacttgtcttgttagttcaaagattgaaacttttttggttaattgtttggcggaagaagatttacaatgggagaggagcatccgagaaagcggtctagacaacattttgaagcggaggcgagaaacgtatcgttgtttgaatcccctcaatgcgaaacctccaagtggtatttcagcagggaagagattgagcgtttctctccatccagaaaagatgggattgatcttgtgaaggagtcgtttttacggtcttcgtattgcaccttcctgcaaagacttggcatgaagcttcatgtgtcccaggttacaatatcatgtgcaatggtgatgtgccacaggttttacatgcgccaatctcatgcaaaaaatgactggcagacaatagcgacttccagtctgttcctcgcttgcaaagctgaagatgagccatgtcaactgtccagtgtcgttgtagcgtcttatgaaataatttatgagtgggatccttctgcctcaattagaatccatcaaactgagtgttatcatgaatttaaagaaattattttgtccggggaaagtcttctgctgagcacaagtgctttccatttagacattgaacttccctacaaacctctggctgcggctttgaatagactgaacgcttggcctgaccttgcaacagctgcatggaattttgtgcatgactggattcgaaccacactatgcttgcagtacaaaccccatgttattgcaacagccactgtgcacctagctgctacgtttcagaatgcgaaagtaggcagcaggagagattggtggttggagtttggagttacaactaagctattaaaagaggtaatccaggagatgtgcacactgatagaagtggacagaaggaggaatatgccacctccacctccacctccaagaagagagttaagttgggcaatacctgcagccgtaaagccggtccatatggctagagcttatccgtttcacagctaccctttgcagtcctatagacaggctggcatctggtgagccattgttgagcagcatgaagatgtaatctctcttagagtcttgagttggtttagcaataaaagatttccgtagagactcatgagagaggcagtgtagcattatatagagatccgagtgaggtgcttctgtctaagttaagcgtctcatgtatgaccaaagtggattctctcgagattcttggtctctgttctcgatagagagagattatgtatagaagtgtcccattcacatgttataatactagctgactttatatcgtttgtatatctggaatctatgtttttggtttctttaaaaagtttaaagttgttttgattttgactaattctctcattgttaagtaatttggtttttgatgaagtgcc

SEQ ID NO: 22591 - protein, 317 aa, Arabidopsis thaliana
  peptide (1)..(317): Ceres Seq. ID no. 13493894
  misc_feature (31)..(175): Pfam Name: Cyclin, N-terminal domain Pfam Description: Cyclin, N-terminal domain
  misc_feature (30)..(258): Homolog of NCBI NO: 15235087 NR Description: cyclin family [Arabidopsis thaliana]
  misc_feature (30)..(268): Homolog of NCBI NO: 15219592 NR Description: cyclin family [Arabidopsis thaliana]
  misc_feature (28)..(269): Homolog of NCBI NO: 7486085 NR Description: hypothetical protein F24J7.161 - Arabidopsis
  misc_feature (28)..(269): Homolog of NCBI NO: 9759604 NR Description: contains similarity to cyclin~gene_id:K18C1.7
  misc_feature (28)..(269): Homolog of NCBI NO: 30684822 NR Description: cyclin family [Arabidopsis thaliana]
  misc_feature (1)..(77): Homolog of NCBI NO: 25403322 NR Description: protein T22C5.7 [imported] - Arabidopsis thaliana
  misc_feature (28)..(269): Homolog of NCBI NO: 30694715 NR Description: cyclin family [Arabidopsis thaliana]
  misc_feature (86)..(317): Homolog of NCBI NO: 6693016 NR Description: T22C5.8 [Arabidopsis thaliana]
  misc_feature (1)..(317): Homolog of NCBI NO: 21618277 NR Description: putative cyclin [Arabidopsis thaliana]
  misc_feature (1)..(317): Homolog of NCBI NO: 15217663 NR Description: cyclin family [Arabidopsis thaliana]
MGEEHPRKRSRQHFEAEARNVSLFESPQCETSKWYFSREEIERFSPSRKDGIDLVKESFLRSSYCTFLQRLGMKLHVSQVTISCAMVMCHRFYMRQSHAKNDWQTIATSSLFLACKAEDEPCQLSSVVVASYEIIYEWDPSASIRIHQTECYHEFKEIILSGESLLLSTSAFHLDIELPYKPLAAALNRLNAWPDLATAAWNFVHDWIRTTLCLQYKPHVIATATVHLAATFQNAKVGSRRDWWLEFGVTTKLLKEVIQEMCTLIEVDRRRNMPPPPPPPRRELSWAIPAAVKPVHMARAYPFHSYPLQSYRQAGIW

SEQ ID NO: 22592 - protein, 245 aa, Arabidopsis thaliana
  peptide (1)..(245): Ceres Seq. ID no. 13493895
  misc_feature (1)..(103): Pfam Name: Cyclin, N-terminal domain Pfam Description: Cyclin, N-terminal domain
  misc_feature (1)..(194): Homolog of NCBI NO: 28278709 NR Description: similar to cyclin T1 [Danio rerio]
  misc_feature (1)..(186): Homolog of NCBI NO: 15235087 NR Description: cyclin family [Arabidopsis thaliana]
  misc_feature (1)..(196): Homolog of NCBI NO: 15219592 NR Description: cyclin family [Arabidopsis thaliana]
  misc_feature (1)..(197): Homolog of NCBI NO: 7486085 NR Description: hypothetical protein F24J7.161 - Arabidopsis
  misc_feature (1)..(197): Homolog of NCBI NO: 9759604 NR Description: contains similarity to cyclin~gene_id:K18C1.7
  misc_feature (1)..(197): Homolog of NCBI NO: 30684822 NR Description: cyclin family [Arabidopsis thaliana]
  misc_feature (1)..(197): Homolog of NCBI NO: 30694715 NR Description: cyclin family [Arabidopsis thaliana]
  misc_feature (14)..(245): Homolog of NCBI NO: 6693016 NR Description: T22C5.8 [Arabidopsis thaliana]
  misc_feature (1)..(245): Homolog of NCBI NO: 21618277 NR Description: putative cyclin [Arabidopsis thaliana]
  misc_feature (1)..(245): Homolog of NCBI NO: 15217663 NR Description: cyclin family [Arabidopsis thaliana]
MKLHVSQVTISCAMVMCHRFYMRQSHAKNDWQTIATSSLFLACKAEDEPCQLSSVVVASYEIIYEWDPSASIRIHQTECYHEFKEIILSGESLLLSTSAFHLDIELPYKPLAAALNRLNAWPDLATAAWNFVHDWIRTTLCLQYKPHVIATATVHLAATFQNAKVGSRRDWWLEFGVTTKLLKEVIQEMCTLIEVDRRRNMPPPPPPPRRELSWAIPAAVKPVHMARAYPFHSYPLQSYRQAGIW

SEQ ID NO: 22593 - protein, 232 aa, Arabidopsis thaliana
  peptide (1)..(232): Ceres Seq. ID no. 13493896
  misc_feature (1)..(90): Pfam Name: Cyclin, N-terminal domain Pfam Description: Cyclin, N-terminal domain
  misc_feature (1)..(181): Homolog of NCBI NO: 28278709 NR Description: similar to cyclin T1 [Danio rerio]
  misc_feature (1)..(173): Homolog of NCBI NO: 15235087 NR Description: cyclin family [Arabidopsis thaliana]
  misc_feature (1)..(183): Homolog of NCBI NO: 15219592 NR Description: cyclin family [Arabidopsis thaliana]
  misc_feature (1)..(184): Homolog of NCBI NO: 7486085 NR Description: hypothetical protein F24J7.161 - Arabidopsis
  misc_feature (1)..(184): Homolog of NCBI NO: 9759604 NR Description: contains similarity to cyclin~gene_id:K18C1.7
  misc_feature (1)..(184): Homolog of NCBI NO: 30684822 NR Description: cyclin family [Arabidopsis thaliana]
  misc_feature (1)..(184): Homolog of NCBI NO: 30694715 NR Description: cyclin family [Arabidopsis thaliana]
  misc_feature (1)..(232): Homolog of NCBI NO: 6693016 NR Description: T22C5.8 [Arabidopsis thaliana]
  misc_feature (1)..(232): Homolog of NCBI NO: 21618277 NR Description: putative cyclin [Arabidopsis thaliana]
  misc_feature (1)..(232): Homolog of NCBI NO: 15217663 NR Description: cyclin family [Arabidopsis thaliana]
MVMCHRFYMRQSHAKNDWQTIATSSLFLACKAEDEPCQLSSVVVASYEIIYEWDPSASIRIHQTECYHEFKEIILSGESLLLSTSAFHLDIELPYKPLAAALNRLNAWPDLATAAWNFVHDWIRTTLCLQYKPHVIATATVHLAATFQNAKVGSRRDWWLEFGVTTKLLKEVIQEMCTLIEVDRRRNMPPPPPPPRRELSWAIPAAVKPVHMARAYPFHSYPLQSYRQAGIW

SEQ ID NO: 22594 - DNA, 1072 bp, Arabidopsis thaliana
  misc_feature (1)..(1072): Ceres Seq. ID no. 13613504
  misc_feature: MA Experiment ID: 108462 Result: Up-regulated in Transcription
  misc_feature: MA Experiment 108462 PARAMETER Experiment Name: At_Germinating_Seeds_cDNA_P Parameter: Age (day) Value: 2 vs. 0
  misc_feature: MA Experiment 108462 PARAMETER Experiment Name: At_Germinating_Seeds_cDNA_P Parameter: Tissue Value: Germinating Seeds
  misc_feature: MA Experiment ID: 20000495 Result: Down-regulated in Transcription
  misc_feature: MA Experiment 20000495 PARAMETER Experiment Name: At_Guard_Cells_P Parameter: Harvest Date Value: 8/2/2002
  misc_feature: MA Experiment 20000495 PARAMETER Experiment Name: At_Guard_Cells_P Parameter: Organism Value: A. thaliana
  misc_feature: MA Experiment 20000495 PARAMETER Experiment Name: At_Guard_Cells_P Parameter: Tissue Value: Guard Cells vs. Leaves
  misc_feature: MA Experiment ID: 20000794 Result: Down-regulated in Transcription
  misc_feature: MA Experiment 20000794 PARAMETER Experiment Name: At_Petals_P Parameter: Age (day) Value: 23-25 days
  misc_feature: MA Experiment 20000794 PARAMETER Experiment Name: At_Petals_P Parameter: Plant Line Value: WS
  misc_feature: MA Experiment 20000794 PARAMETER Experiment Name: At_Petals_P Parameter: Tissue Value: Petals vs. Whole plant
  misc_feature: MA Experiment ID: 20001905 Result: Down-regulated in Transcription
  misc_feature: MA Experiment 20001905 PARAMETER Experiment Name: At_Drought_Reproduction_P Parameter: Age (day) Value: 40
  misc_feature: MA Experiment 20001905 PARAMETER Experiment Name: At_Drought_Reproduction_P Parameter: Organism Value: A. thaliana
  misc_feature: MA Experiment 20001905 PARAMETER Experiment Name: At_Drought_Reproduction_P Parameter: Plant Line Value: WS
  misc_feature: MA Experiment 20001905 PARAMETER Experiment Name: At_Drought_Reproduction_P Parameter: Timepoint (day) Value: 10
  misc_feature: MA Experiment 20001905 PARAMETER Experiment Name: At_Drought_Reproduction_P Parameter: Tissue Value: Rosettes
  misc_feature: MA Experiment 20001905 PARAMETER Experiment Name: At_Drought_Reproduction_P Parameter: Treatment Value: Drought vs. No Drought
acaacggccactgaacactatcgatctaatcttttcagctctctccatcgtcgtcgtatctgtgactctcgtgatcatcgcctgaaaaaaatttgagataatggccagaaagttcttcgtcggaggcaactggaaatgtaacggaactgctgaggaggtgaagaagattgtgaacactcttaatgaagctcaggttccttcacaggatgttgtagaggttgtggttagccctccatatgtttttcttcccctggttaagagcacattgaggtctgacttttttgttgcggcacaaaactgttgggttaagaaaggaggtgctttcactggtgaagtgagtgcggagatgcttgtgaacttggatattccatgggttatccttggtcactctgaaaggagggcaatccttaatgaatcaagcgagttcgtcggagacaaggttgcctatgcacttgctcaaggtttgaaagtgattgcttgtgttggtgagactcttgaggagcgggaagctggatcgaccatggatgttgtggctgcccagaccaaggctattgccgatcgggtgacaaactggtcaaatgttgtcatagcctatgaaccagtgtgggccattggaaccggaaaggtcgctagcccagcccaagctcaagaagtacacgatgagctgaggaaatggctggccaagaacgtgagtgctgatgtcgctgctacaacccgcatcatttatggaggatccgtcaatggtggtaactgcaaggagctaggtggacaggccgatgttgatggtttcttggtcggtggtgcttctctaaagcctgagtttatcgacatcattaaggccgcagaggtgaagaaaagtgcctaatgagctcattaagcaatttaaaagtcctttgcttttccagtcgcaactctgaaaaaatgaataagttggtattatgatatgatacattttgcttcagttgtatttggcaaaagtttctctcttactatattgttttgagaacgcaacaatcattttcttcgccatttatttagctgtggacttgcaatttgcaaatcccttcctttt

SEQ ID NO: 22595 - protein, 254 aa, Arabidopsis thaliana; identical to SEQ ID NO: 21075
  peptide (1)..(254): Ceres Seq. ID no. 13613505
  misc_feature (3)..(249): Pfam Name: Triosephosphate isomerase Pfam Description: Triosephosphate isomerase
  misc_feature (1)..(253): Homolog of NCBI NO: 1174749 NR Description: Triosephosphate isomerase, cytosolic (TIM)
  misc_feature (1)..(253): Homolog of NCBI NO: 11124572 NR Description: triosephosphat-isomerase [Triticum aestivum]
  misc_feature (1)..(253): Homolog of NCBI NO: 34895792 NR Description: putative triose-phosphate isomerase
  misc_feature (2)..(254): Homolog of NCBI NO: 34908172 NR Description: putative triosephosphate isomerase
  misc_feature (1)..(253): Homolog of NCBI NO: 136063 NR Description: TRIOSEPHOSPHATE ISOMERASE, CYTOSOLIC (TIM)
  misc_feature (1)..(253): Homolog of NCBI NO: 136057 NR Description: TRIOSEPHOSPHATE ISOMERASE, CYTOSOLIC (TIM)
  misc_feature (1)..(254): Homolog of NCBI NO: 38112662 NR Description: triose phosphate isomerase cytosolic isoform
  misc_feature (1)..(254): Homolog of NCBI NO: 1351279 NR Description: Triosephosphate isomerase, cytosolic (TIM)
  misc_feature (1)..(254): Homolog of NCBI NO: 11270444 NR Description: triose-phosphate isomerase (EC 5.3.1.1),
  misc_feature (1)..(254): Homolog of NCBI NO: 15233272 NR Description: triosephosphate isomerase, cytosolic, putative

SEQ ID NO: 22596 - protein, 172 aa, Arabidopsis thaliana; identical to SEQ ID NO: 21076
  peptide (1)..(172): Ceres Seq. ID no. 13613506
  misc_feature (1)..(167): Pfam Name: Triosephosphate isomerase Pfam Description: Triosephosphate isomerase
  misc_feature (1)..(171): Homolog of NCBI NO: 1174749 NR Description: Triosephosphate isomerase, cytosolic (TIM)
  misc_feature (1)..(171): Homolog of NCBI NO: 11124572 NR Description: triosephosphat-isomerase [Triticum aestivum]
  misc_feature (1)..(171): Homolog of NCBI NO: 34895792 NR Description: putative triose-phosphate isomerase
  misc_feature (1)..(172): Homolog of NCBI NO: 34908172 NR Description: putative triosephosphate isomerase
  misc_feature (1)..(171): Homolog of NCBI NO: 136063 NR Description: TRIOSEPHOSPHATE ISOMERASE, CYTOSOLIC (TIM)
  misc_feature (1)..(171): Homolog of NCBI NO: 136057 NR Description: TRIOSEPHOSPHATE ISOMERASE, CYTOSOLIC (TIM)
  misc_feature (1)..(172): Homolog of NCBI NO: 38112662 NR Description: triose phosphate isomerase cytosolic isoform
  misc_feature (1)..(172): Homolog of NCBI NO: 1351279 NR Description: Triosephosphate isomerase, cytosolic (TIM)
  misc_feature (1)..(172): Homolog of NCBI NO: 11270444 NR Description: triose-phosphate isomerase (EC 5.3.1.1),
  misc_feature (1)..(172): Homolog of NCBI NO: 15233272 NR Description: triosephosphate isomerase, cytosolic, putative

SEQ ID NO: 22597 - DNA, 1465 bp, Arabidopsis thaliana
  misc_feature (1)..(1465): Ceres Seq. ID no. 12423211
  misc_feature: MA Experiment ID: 108434 Result: Up-regulated in Transcription
  misc_feature: MA Experiment 108434 PARAMETER Experiment Name: At_Root_Tips_cDNA_P Parameter: Tissue Value: Root Tips
  misc_feature: MA Experiment ID: 108462 Result: Down-regulated in Transcription
  misc_feature: MA Experiment 108462 PARAMETER Experiment Name: At_Germinating_Seeds_cDNA_P Parameter: Age (day) Value: 2 vs. 0
  misc_feature: MA Experiment 108462 PARAMETER Experiment Name: At_Germinating_Seeds_cDNA_P Parameter: Tissue Value: Germinating Seeds
  misc_feature: MA Experiment ID: 108463 Result: Down-regulated in Transcription
  misc_feature: MA Experiment 108463 PARAMETER Experiment Name: At_Germinating_Seeds_cDNA_P Parameter: Age (day) Value: 3 vs. 0
  misc_feature: MA Experiment 108463 PARAMETER Experiment Name: At_Germinating_Seeds_cDNA_P Parameter: Tissue Value: Germinating Seeds
  misc_feature: MA Experiment ID: 108464 Result: Down-regulated in Transcription
  misc_feature: MA Experiment 108464 PARAMETER Experiment Name: At_Germinating_Seeds_cDNA_P Parameter: Age (day) Value: 4 vs. 0
  misc_feature: MA Experiment 108464 PARAMETER Experiment Name: At_Germinating_Seeds_cDNA_P Parameter: Tissue Value: Germinating Seeds
  misc_feature: MA Experiment ID: 108607 Result: Down-regulated in Transcription
  misc_feature: MA Experiment 108607 PARAMETER Experiment Name: At_100uM_ABA_cDNA_P Parameter: Timepoint (hr) Value: 4
  misc_feature: MA Experiment 108607 PARAMETER Experiment Name: At_100uM_ABA_cDNA_P Parameter: Tissue Value: Aerial
  misc_feature: MA Experiment 108607 PARAMETER Experiment Name: At_100uM_ABA_cDNA_P Parameter: Treatment Value: 100uM ABA vs. No Treatment
  misc_feature: MA Experiment ID: 20000069 Result: Down-regulated in Transcription
  misc_feature: MA Experiment 20000069 PARAMETER Experiment Name: At_100uM_ABA_Mutants_cDNA_P Parameter: Plant Line Value: CS23
  misc_feature: MA Experiment 20000069 PARAMETER Experiment Name: At_100uM_ABA_Mutants_cDNA_P Parameter: Timepoint (hr) Value: 6
  misc_feature: MA Experiment 20000069 PARAMETER Experiment Name: At_100uM_ABA_Mutants_cDNA_P Parameter: Tissue Value: Aerial
  misc_feature: MA Experiment 20000069 PARAMETER Experiment Name: At_100uM_ABA_Mutants_cDNA_P Parameter: Treatment Value: 100uM ABA vs. No Treatment
  misc_feature: MA Experiment ID: 20000070 Result: Down-regulated in Transcription
  misc_feature: MA Experiment 20000070 PARAMETER Experiment Name: At_100uM_ABA_Mutants_cDNA_P Parameter: Plant Line Value: CS24
  misc_feature: MA Experiment 20000070 PARAMETER Experiment Name: At_100uM_ABA_Mutants_cDNA_P Parameter: Timepoint (hr) Value: 6
  misc_feature: MA Experiment 20000070 PARAMETER Experiment Name: At_100uM_ABA_Mutants_cDNA_P Parameter: Tissue Value: Aerial
  misc_feature: MA Experiment 20000070 PARAMETER Experiment Name: At_100uM_ABA_Mutants_cDNA_P Parameter: Treatment Value: 100uM ABA vs. No Treatment
  misc_feature: MA Experiment ID: 20000072 Result: Down-regulated in Transcription
  misc_feature: MA Experiment 20000072 PARAMETER Experiment Name: At_100uM_ABA_Mutants_cDNA_P Parameter: Plant Line Value: CS8105
  misc_feature: MA Experiment 20000072 PARAMETER Experiment Name: At_100uM_ABA_Mutants_cDNA_P Parameter: Timepoint (hr) Value: 6
  misc_feature: MA Experiment 20000072 PARAMETER Experiment Name: At_100uM_ABA_Mutants_cDNA_P Parameter: Tissue Value: Aerial
  misc_feature: MA Experiment 20000072 PARAMETER Experiment Name: At_100uM_ABA_Mutants_cDNA_P Parameter: Treatment Value: 100uM ABA vs. No Treatment
  misc_feature: MA Experiment ID: 20000086 Result: Down-regulated in Transcription
  misc_feature: MA Experiment 20000086 PARAMETER Experiment Name: At_100uM_ABA_Mutants_cDNA_P Parameter: Plant Line Value: CS22
  misc_feature: MA Experiment 20000086 PARAMETER Experiment Name: At_100uM_ABA_Mutants_cDNA_P Parameter: Timepoint (hr) Value: 6
  misc_feature: MA Experiment 20000086 PARAMETER Experiment Name: At_100uM_ABA_Mutants_cDNA_P Parameter: Tissue Value: Aerial
  misc_feature: MA Experiment 20000086 PARAMETER Experiment Name: At_100uM_ABA_Mutants_cDNA_P Parameter: Treatment Value: 100uM ABA vs. No Treatment
  misc_feature: MA Experiment ID: 20000087 Result: Down-regulated in Transcription
  misc_feature: MA Experiment 20000087 PARAMETER Experiment Name: At_100uM_ABA_Mutants_cDNA_P Parameter: Plant Line Value: WS
  misc_feature: MA Experiment 20000087 PARAMETER Experiment Name: At_100uM_ABA_Mutants_cDNA_P Parameter: Timepoint (hr) Value: 6
  misc_feature: MA Experiment 20000087 PARAMETER Experiment Name: At_100uM_ABA_Mutants_cDNA_P Parameter: Tissue Value: Aerial
  misc_feature: MA Experiment 20000087 PARAMETER Experiment Name: At_100uM_ABA_Mutants_cDNA_P Parameter: Treatment Value: 100uM ABA vs. No Treatment
  misc_feature: MA Experiment ID: 20000117 Result: Down-regulated in Transcription
  misc_feature: MA Experiment 20000117 PARAMETER Experiment Name: At_100uM_ABA_Mutants_cDNA_P Parameter: Plant Line Value: Columbia
  misc_feature: MA Experiment 20000117 PARAMETER Experiment Name: At_100uM_ABA_Mutants_cDNA_P Parameter: Timepoint (hr) Value: 6
  misc_feature: MA Experiment 20000117 PARAMETER Experiment Name: At_100uM_ABA_Mutants_cDNA_P Parameter: Tissue Value: Aerial
  misc_feature: MA Experiment 20000117 PARAMETER Experiment Name: At_100uM_ABA_Mutants_cDNA_P Parameter: Treatment Value: 100uM ABA vs. No Treatment
  misc_feature: MA Experiment ID: 20000184 Result: Up-regulated in Transcription
  misc_feature: MA Experiment 20000184 PARAMETER Experiment Name: At_Shoots__P Parameter: Age (day) Value: 7
  misc_feature: MA Experiment 20000184 PARAMETER Experiment Name: At_Shoots__P Parameter: Tissue Value: Shoots vs. Whole Plant
  misc_feature: MA Experiment ID: 20000234 Result: Up-regulated in Transcription
  misc_feature: MA Experiment 20000234 PARAMETER Experiment Name: At_Siliques_P Parameter: Age (day) Value: 21
  misc_feature: MA Experiment 20000234 PARAMETER Experiment Name: At_Siliques_P Parameter: Organism Value: A. thaliana
  misc_feature: MA Experiment 20000234 PARAMETER Experiment Name: At_Siliques_P Parameter: Plant Line Value: WS
  misc_feature: MA Experiment 20000234 PARAMETER Experiment Name: At_Siliques_P Parameter: Tissue Value: Less Than 5mm Siliques vs. Whole Plant
  misc_feature: MA Experiment ID: 20000264 Result: Up-regulated in Transcription
  misc_feature: MA Experiment 20000264 PARAMETER Experiment Name: At_Open_Flower_P Parameter: Age (day) Value: 21
  misc_feature: MA Experiment 20000264 PARAMETER Experiment Name: At_Open_Flower_P Parameter: Plant Line Value: WS
  misc_feature: MA Experiment 20000264 PARAMETER Experiment Name: At_Open_Flower_P Parameter: Tissue Value: Open Flower vs. Whole Plant
  misc_feature: MA Experiment ID: 20000265 Result: Up-regulated in Transcription
  misc_feature: MA Experiment 20000265 PARAMETER Experiment Name: At_Open_Flower_P Parameter: Age (day) Value: 21
  misc_feature: MA Experiment 20000265 PARAMETER Experiment Name: At_Open_Flower_P Parameter: Plant Line Value: WS
  misc_feature: MA Experiment 20000265 PARAMETER Experiment Name: At_Open_Flower_P Parameter: Tissue Value: Closed Flower vs. Whole Plant
  misc_feature: MA Experiment ID: 20000286 Result: Up-regulated in Transcription
  misc_feature: MA Experiment 20000286 PARAMETER Experiment Name: At_Open_Flower_P Parameter: Age (day) Value: 21
  misc_feature: MA Experiment 20000286 PARAMETER Experiment Name: At_Open_Flower_P Parameter: Plant Line Value: WS
  misc_feature: MA Experiment 20000286 PARAMETER Experiment Name: At_Open_Flower_P Parameter: Tissue Value: Half Open vs. Whole Plant
  misc_feature: MA Experiment ID: 20000437 Result: Down-regulated in Transcription
  misc_feature: MA Experiment 20000437 PARAMETER Experiment Name: At_Drought_P Parameter: Age (day) Value: 8
  misc_feature: MA Experiment 20000437 PARAMETER Experiment Name: At_Drought_P Parameter: Organism Value: A. thaliana
  misc_feature: MA Experiment 20000437 PARAMETER Experiment Name: At_Drought_P Parameter: Plant Line Value: WS
  misc_feature: MA Experiment 20000437 PARAMETER Experiment Name: At_Drought_P Parameter: Timepoint (hr) Value: 24
  misc_feature: MA Experiment 20000437 PARAMETER Experiment Name: At_Drought_P Parameter: Tissue Value: Whole Plant
  misc_feature: MA Experiment 20000437 PARAMETER Experiment Name: At_Drought_P Parameter: Treatment Value: Drought vs. No Drought
  misc_feature: MA Experiment ID: 20000438 Result: Up-regulated in Transcription
  misc_feature: MA Experiment 20000438 PARAMETER Experiment Name: At_Shoots__P Parameter: Age (day) Value: 14
  misc_feature: MA Experiment 20000438 PARAMETER Experiment Name: At_Shoots__P Parameter: Tissue Value: Shoots vs. Whole Plant
  misc_feature: MA Experiment ID: 20001248 Result: Down-regulated in Transcription
  misc_feature: MA Experiment 20001248 PARAMETER Experiment Name: At_Far-red-induction_P Parameter: Age (day) Value: 7
  misc_feature: MA Experiment 20001248 PARAMETER Experiment Name: At_Far-red-induction_P Parameter: Light Value: Far-red vs. White
  misc_feature: MA Experiment 20001248 PARAMETER Experiment Name: At_Far-red-induction_P Parameter: Organism Value: A. thaliana
  misc_feature: MA Experiment 20001248 PARAMETER Experiment Name: At_Far-red-induction_P Parameter: Plant Line Value: Columbia
  misc_feature: MA Experiment 20001248 PARAMETER Experiment Name: At_Far-red-induction_P Parameter: Timepoint (hr) Value: 4
  misc_feature: MA Experiment 20001248 PARAMETER Experiment Name: At_Far-red-induction_P Parameter: Tissue Value: Whole Plant
  misc_feature: MA Experiment ID: 20001450 Result: Down-regulated in Transcription
  misc_feature: MA Experiment 20001450 PARAMETER Experiment Name: At_Far-red-induction_P Parameter: Age (day) Value: 7
  misc_feature: MA Experiment 20001450 PARAMETER Experiment Name: At_Far-red-induction_P Parameter: Light Value: Far-red vs. White
  misc_feature: MA Experiment 20001450 PARAMETER Experiment Name: At_Far-red-induction_P Parameter: Organism Value: A. thaliana
  misc_feature: MA Experiment 20001450 PARAMETER Experiment Name: At_Far-red-induction_P Parameter: Plant Line Value: Columbia
  misc_feature: MA Experiment 20001450 PARAMETER Experiment Name: At_Far-red-induction_P Parameter: Timepoint (hr) Value: 8
  misc_feature: MA Experiment 20001450 PARAMETER Experiment Name: At_Far-red-induction_P Parameter: Tissue Value: Whole Plant
  misc_feature: MA Experiment ID: 20001451 Result: Down-regulated in Transcription
  misc_feature: MA Experiment 20001451 PARAMETER Experiment Name: At_Far-red-induction_P Parameter: Age (day) Value: 7
  misc_feature: MA Experiment 20001451 PARAMETER Experiment Name: At_Far-red-induction_P Parameter: Light Value: Far-red vs. White
  misc_feature: MA Experiment 20001451 PARAMETER Experiment Name: At_Far-red-induction_P Parameter: Organism Value: A. thaliana
  misc_feature: MA Experiment 20001451 PARAMETER Experiment Name: At_Far-red-induction_P Parameter: Plant Line Value: Columbia
  misc_feature: MA Experiment 20001451 PARAMETER Experiment Name: At_Far-red-induction_P Parameter: Timepoint (hr) Value: 24
  misc_feature: MA Experiment 20001451 PARAMETER Experiment Name: At_Far-red-induction_P Parameter: Tissue Value: Whole Plant
  misc_feature: MA Experiment ID: 20001757 Result: Up-regulated in Transcription
  misc_feature: MA Experiment 20001757 PARAMETER Experiment Name: At_50mM_NH4NO3_L-to-H_P Parameter: Timepoint (hr) Value: 6
  misc_feature: MA Experiment 20001757 PARAMETER Experiment Name: At_50mM_NH4NO3_L-to-H_P Parameter: Tissue Value: Leaf
  misc_feature: MA Experiment 20001757 PARAMETER Experiment Name: At_50mM_NH4NO3_L-to-H_P Parameter: Treatment Value: 50mM NH4NO3 vs 100mM Mannitol
  misc_feature: MA Experiment ID: 20001905 Result: Down-regulated in Transcription
  misc_feature: MA Experiment 20001905 PARAMETER Experiment Name: At_Drought_Reproduction_P Parameter: Age (day) Value: 40
  misc_feature: MA Experiment 20001905 PARAMETER Experiment Name: At_Drought_Reproduction_P Parameter: Organism Value: A. thaliana
  misc_feature: MA Experiment 20001905 PARAMETER Experiment Name: At_Drought_Reproduction_P Parameter: Plant Line Value: WS
  misc_feature: MA Experiment 20001905 PARAMETER Experiment Name: At_Drought_Reproduction_P Parameter: Timepoint (day) Value: 10
  misc_feature: MA Experiment 20001905 PARAMETER Experiment Name: At_Drought_Reproduction_P Parameter: Tissue Value: Rosettes
  misc_feature: MA Experiment 20001905 PARAMETER Experiment Name: At_Drought_Reproduction_P Parameter: Treatment Value: Drought vs. No Drought
  misc_feature: MA Experiment ID: 20001911 Result: Down-regulated in Transcription
  misc_feature: MA Experiment 20001911 PARAMETER Experiment Name: At_Drought_Reproduction_P Parameter: Age (day) Value: 40
  misc_feature: MA Experiment 20001911 PARAMETER Experiment Name: At_Drought_Reproduction_P Parameter: Organism Value: A. thaliana
  misc_feature: MA Experiment 20001911 PARAMETER Experiment Name: At_Drought_Reproduction_P Parameter: Plant Line Value: WS
  misc_feature: MA Experiment 20001911 PARAMETER Experiment Name: At_Drought_Reproduction_P Parameter: Timepoint (day) Value: 10
  misc_feature: MA Experiment 20001911 PARAMETER Experiment Name: At_Drought_Reproduction_P Parameter: Tissue Value: Flowers
  misc_feature: MA Experiment 20001911 PARAMETER Experiment Name: At_Drought_Reproduction_P Parameter: Treatment Value: Drought vs. No Drought
atcgagtgtctcgcccagcttcttcagtcttcaccacataatattaataaaaagcattttcttctttcgattgcttcagattcgtcagctcactctttcctctccagaagaaaccctagacatctcatcgccaaaatgttcagatctatgctcgtccgatcttctgcctccgcgaagcaggcggttatccgccgtagcttctcctccggctccgtccccgagcgtaaagtcgccatccttggtgccgccggtggaattggtcagcctcttgctctcctcatgaagcttaatcctcttgtctcttccctctccctctacgatatcgctaacactcctggagttgctgctgatgttggtcacatcaacaccagatctgaggttgttggatacatgggcgatgataacttggccaaagctcttgaaggagctgatctcgttatcattccagctggtgtaccaaggaagcctggtatgacccgtgacgatcttttcaacattaatgctggaattgtcaagaacctttgcactgccatcgccaagtactgcccacatgcgcttattaatatgatcagcaaccctgtgaactctactgttccaattgcagctgagatatttaagaaggctggtatgtacgatgaaaagaaattgtttggtgttaccactcttgacgtcgtcagggccaggactttctatgctggaaaggcaaatgtcccagttgcagaagttaatgttccggtgattggtggtcatgctggggttactattctccctctcttctctcaggcaactcctcaagccaacttgtcaagtgacatacttaccgcccttactaagcgtacccaagatggaggtacagaagtcgtggaggcaaaagcaggaaaaggttcagctacattgtccatggcctatgccggagcattgttcgctgatgcatgcttgaaaggactcaacggtgttccagatgtcatagaatgctcatacgtgcaatctacaatcaccgagcttcctttctttgcctcgaaggtgaggttggggaagaatggtgtggaggaggttcttgacttgggaccactctcagactttgagaaggaaggcttggaagcattgaagccagaactcaagtcctccatagaaaagggagtcaagtttgccaaccagtgattaaaccgagtttactcggtaatttttccaattttccagctagagttgccacctcctccttcatcgggttgtatcaataaaaaatccatgtttgtgcctccattagtgaaaccataaggctctttttggttaatcaccaaactcaaagaaaaactgtaacatgtcaaagttgtaattctttcttcctttttggaaccatgcgacttttttttcatgaacaagagatcataagtgtgggttggttcctttttaatgctgcgtctgtgtcaccatactttctgtttctcagatattactttcttct

SEQ ID NO: 22598 - protein, 386 aa, Arabidopsis thaliana
  peptide (1)..(386): Ceres Seq. ID no. 12423212
  misc_feature (220)..(384): Pfam Name: lactate/malate dehydrogenase, alpha/beta Pfam Description: lactate/malate dehydrogenase, alpha/beta
  misc_feature (43)..(385): Homolog of NCBI NO: 126896 NR Description: MALATE DEHYDROGENASE, MITOCHONDRIAL PRECURSOR
  misc_feature (46)..(386): Homolog of NCBI NO: 15232468 NR Description: mitochondrial NAD-dependent malate dehydrogenase,
  misc_feature (46)..(386): Homolog of NCBI NO: 2497857 NR Description: MALATE DEHYDROGENASE, MITOCHONDRIAL PRECURSOR
  misc_feature (46)..(386): Homolog of NCBI NO: 7769871 NR Description: F12M16.14 [Arabidopsis thaliana]
  misc_feature (46)..(386): Homolog of NCBI NO: 21592905 NR Description: mitochondrial NAD-dependent malate dehydrogenase
  misc_feature (46)..(386): Homolog of NCBI NO: 18404382 NR Description: mitochondrial NAD-dependent malate dehydrogenase
IECLAQLLQSSPHNINKKHFLLSIASDSSAHSFLSRRNPRHLIAKMFRSMLVRSSASAKQAVIRRSFSSGSVPERKVAILGAAGGIGQPLALLMKLNPLVSSLSLYDIANTPGVAADVGHINTRSEVVGYMGDDNLAKALEGADLVIIPAGVPRKPGMTRDDLFNINAGIVKNLCTAIAKYCPHALINMISNPVNSTVPIAAEIFKKAGMYDEKKLFGVTTLDVVRARTFYAGKANVPVAEVNVPVIGGHAGVTILPLFSQATPQANLSSDILTALTKRTQDGGTEVVEAKAGKGSATLSMAYAGALFADACLKGLNGVPDVIECSYVQSTITELPFFASKVRLGKNGVEEVLDLGPLSDFEKEGLEALKPELKSSIEKGVKFANQ

SEQ ID NO: 22599 - protein, 341 aa, Arabidopsis thaliana
  peptide (1)..(341): Ceres Seq. ID no. 12423213
  misc_feature (175)..(339): Pfam Name: lactate/malate dehydrogenase, alpha/beta Pfam Description: lactate/malate dehydrogenase, alpha/beta
  misc_feature (1)..(340): Homolog of NCBI NO: 126896 NR Description: MALATE DEHYDROGENASE, MITOCHONDRIAL PRECURSOR
  misc_feature (1)..(341): Homolog of NCBI NO: 15232468 NR Description: mitochondrial NAD-dependent malate dehydrogenase,
  misc_feature (1)..(341): Homolog of NCBI NO: 2497857 NR Description: MALATE DEHYDROGENASE, MITOCHONDRIAL PRECURSOR
  misc_feature (1)..(341): Homolog of NCBI NO: 7769871 NR Description: F12M16.14 [Arabidopsis thaliana]
  misc_feature (1)..(341): Homolog of NCBI NO: 21592905 NR Description: mitochondrial NAD-dependent malate dehydrogenase
  misc_feature (1)..(341): Homolog of NCBI NO: 18404382 NR Description: mitochondrial NAD-dependent malate dehydrogenase
MFRSMLVRSSASAKQAVIRRSFSSGSVPERKVAILGAAGGIGQPLALLMKLNPLVSSLSLYDIANTPGVAADVGHINTRSEVVGYMGDDNLAKALEGADLVIIPAGVPRKPGMTRDDLFNINAGIVKNLCTAIAKYCPHALINMISNPVNSTVPIAAEIFKKAGMYDEKKLFGVTTLDVVRARTFYAGKANVPVAEVNVPVIGGHAGVTILPLFSQATPQANLSSDILTALTKRTQDGGTEVVEAKAGKGSATLSMAYAGALFADACLKGLNGVPDVIECSYVQSTITELPFFASKVRLGKNGVEEVLDLGPLSDFEKEGLEALKPELKSSIEKGVKFANQ

SEQ ID NO: 22600 - protein, 337 aa, Arabidopsis thaliana
  peptide (1)..(337): Ceres Seq. ID no. 12423214
  misc_feature (171)..(335): Pfam Name: lactate/malate dehydrogenase, alpha/beta Pfam Description: lactate/malate dehydrogenase, alpha/beta
  misc_feature (1)..(336): Homolog of NCBI NO: 126896 NR Description: MALATE DEHYDROGENASE, MITOCHONDRIAL PRECURSOR
  misc_feature (1)..(337): Homolog of NCBI NO: 15232468 NR Description: mitochondrial NAD-dependent malate dehydrogenase,
  misc_feature (1)..(337): Homolog of NCBI NO: 2497857 NR Description: MALATE DEHYDROGENASE, MITOCHONDRIAL PRECURSOR
  misc_feature (1)..(337): Homolog of NCBI NO: 7769871 NR Description: F12M16.14 [Arabidopsis thaliana]
  misc_feature (1)..(337): Homolog of NCBI NO: 21592905 NR Description: mitochondrial NAD-dependent malate dehydrogenase
  misc_feature (1)..(337): Homolog of NCBI NO: 18404382 NR Description: mitochondrial NAD-dependent malate dehydrogenase
MLVRSSASAKQAVIRRSFSSGSVPERKVAILGAAGGIGQPLALLMKLNPLVSSLSLYDIANTPGVAADVGHINTRSEVVGYMGDDNLAKALEGADLVIIPAGVPRKPGMTRDDLFNINAGIVKNLCTAIAKYCPHALINMISNPVNSTVPIAAEIFKKAGMYDEKKLFGVTTLDVVRARTFYAGKANVPVAEVNVPVIGGHAGVTILPLFSQATPQANLSSDILTALTKRTQDGGTEVVEAKAGKGSATLSMAYAGALFADACLKGLNGVPDVIECSYVQSTITELPFFASKVRLGKNGVEEVLDLGPLSDFEKEGLEALKPELKSSIEKGVKFANQ

SEQ ID NO: 22601 - DNA, 1067 bp, Arabidopsis thaliana
  misc_feature (1)..(1067): Ceres Seq. ID no. 12393102
  misc_feature: MA Experiment ID: 20000179 Result: Up-regulated in Transcription
  misc_feature: MA Experiment 20000179 PARAMETER Experiment Name: At_Germinating_Seeds_P Parameter: Age (hr) Value: 6 vs. 0
  misc_feature: MA Experiment 20000179 PARAMETER Experiment Name: At_Germinating_Seeds_P Parameter: Tissue Value: Germinating Seeds
  misc_feature: MA Experiment ID: 20000180 Result: Up-regulated in Transcription
  misc_feature: MA Experiment 20000180 PARAMETER Experiment Name: At_Germinating_Seeds_P Parameter: Age (hr) Value: 24 vs. 0
  misc_feature: MA Experiment 20000180 PARAMETER Experiment Name: At_Germinating_Seeds_P Parameter: Tissue Value: Germinating Seeds
  misc_feature: MA Experiment ID: 20000185 Result: Down-regulated in Transcription
  misc_feature: MA Experiment 20000185 PARAMETER Experiment Name: At_Roots__P Parameter: Age (day) Value: 7 vs. 21
  misc_feature: MA Experiment 20000185 PARAMETER Experiment Name: At_Roots__P Parameter: Organism Value: A. thaliana
  misc_feature: MA Experiment 20000185 PARAMETER Experiment Name: At_Roots__P Parameter: Tissue Value: Roots vs. Whole Plant
  misc_feature: MA Experiment ID: 20000269 Result: Down-regulated in Transcription
  misc_feature: MA Experiment 20000269 PARAMETER Experiment Name: At_1mM_KNO3_L-vs-H_Roots_P Parameter: Age (day) Value: 7,10,12
  misc_feature: MA Experiment 20000269 PARAMETER Experiment Name: At_1mM_KNO3_L-vs-H_Roots_P Parameter: Organism Value: A. thaliana
  misc_feature: MA Experiment 20000269 PARAMETER Experiment Name: At_1mM_KNO3_L-vs-H_Roots_P Parameter: Plant Line Value: WS
  misc_feature: MA Experiment 20000269 PARAMETER Experiment Name: At_1mM_KNO3_L-vs-H_Roots_P Parameter: Timepoint (day) Value: 7,10,12
  misc_feature: MA Experiment 20000269 PARAMETER Experiment Name: At_1mM_KNO3_L-vs-H_Roots_P Parameter: Tissue Value: Roots
  misc_feature: MA Experiment 20000269 PARAMETER Experiment Name: At_1mM_KNO3_L-vs-H_Roots_P Parameter: Treatment Value: 1mM KNO3 vs. 50mM KNO3
  misc_feature: MA Experiment ID: 20000439 Result: Down-regulated in Transcription
  misc_feature: MA Experiment 20000439 PARAMETER Experiment Name: At_Roots__P Parameter: Age (day) Value: 14 vs. 21
  misc_feature: MA Experiment 20000439 PARAMETER Experiment Name: At_Roots__P Parameter: Organism Value: A. thaliana
  misc_feature: MA Experiment 20000439 PARAMETER Experiment Name: At_Roots__P Parameter: Tissue Value: Roots vs. Whole Plant
  misc_feature: MA Experiment ID: 20000794 Result: Down-regulated in Transcription
  misc_feature: MA Experiment 20000794 PARAMETER Experiment Name: At_Petals_P Parameter: Age (day) Value: 23-25 days
  misc_feature: MA Experiment 20000794 PARAMETER Experiment Name: At_Petals_P Parameter: Plant Line Value: WS
  misc_feature: MA Experiment 20000794 PARAMETER Experiment Name: At_Petals_P Parameter: Tissue Value: Petals vs. Whole plant
  misc_feature: MA Experiment ID: 20001557 Result: Down-regulated in Transcription
  misc_feature: MA Experiment 20001557 PARAMETER Experiment Name: At_Drought_Soil_Dry_P Parameter: Age (day) Value: 27
  misc_feature: MA Experiment 20001557 PARAMETER Experiment Name: At_Drought_Soil_Dry_P Parameter: Organism Value: A. thaliana
  misc_feature: MA Experiment 20001557 PARAMETER Experiment Name: At_Drought_Soil_Dry_P Parameter: Plant Line Value: WS
  misc_feature: MA Experiment 20001557 PARAMETER Experiment Name: At_Drought_Soil_Dry_P Parameter: Post Timepoint (hr) Value: 3
  misc_feature: MA Experiment 20001557 PARAMETER Experiment Name: At_Drought_Soil_Dry_P Parameter: Post-Treatment Value: Re-Water vs. No Drought
  misc_feature: MA Experiment 20001557 PARAMETER Experiment Name: At_Drought_Soil_Dry_P Parameter: Timepoint (day) Value: 13
  misc_feature: MA Experiment 20001557 PARAMETER Experiment Name: At_Drought_Soil_Dry_P Parameter: Treatment Value: Drought vs. No Drought
  misc_feature: MA Experiment ID: 20001757 Result: Up-regulated in Transcription
  misc_feature: MA Experiment 20001757 PARAMETER Experiment Name: At_50mM_NH4NO3_L-to-H_P Parameter: Timepoint (hr) Value: 6
  misc_feature: MA Experiment 20001757 PARAMETER Experiment Name: At_50mM_NH4NO3_L-to-H_P Parameter: Tissue Value: Leaf
  misc_feature: MA Experiment 20001757 PARAMETER Experiment Name: At_50mM_NH4NO3_L-to-H_P Parameter: Treatment Value: 50mM NH4NO3 vs 100mM Mannitol
  misc_feature: MA Experiment ID: 20001904 Result: Down-regulated in Transcription
  misc_feature: MA Experiment 20001904 PARAMETER Experiment Name: At_Drought_Reproduction_P Parameter: Age (day) Value: 37
  misc_feature: MA Experiment 20001904 PARAMETER Experiment Name: At_Drought_Reproduction_P Parameter: Organism Value: A. thaliana
  misc_feature: MA Experiment 20001904 PARAMETER Experiment Name: At_Drought_Reproduction_P Parameter: Plant Line Value: WS
  misc_feature: MA Experiment 20001904 PARAMETER Experiment Name: At_Drought_Reproduction_P Parameter: Timepoint (day) Value: 7
  misc_feature: MA Experiment 20001904 PARAMETER Experiment Name: At_Drought_Reproduction_P Parameter: Tissue Value: Rosettes
  misc_feature: MA Experiment 20001904 PARAMETER Experiment Name: At_Drought_Reproduction_P Parameter: Treatment Value: Drought vs. No Drought
  misc_feature: MA Experiment ID: 20001906 Result: Down-regulated in Transcription
  misc_feature: MA Experiment 20001906 PARAMETER Experiment Name: At_Drought_Reproduction_P Parameter: Age (day) Value: 35
  misc_feature: MA Experiment 20001906 PARAMETER Experiment Name: At_Drought_Reproduction_P Parameter: Organism Value: A. thaliana
  misc_feature: MA Experiment 20001906 PARAMETER Experiment Name: At_Drought_Reproduction_P Parameter: Plant Line Value: WS
  misc_feature: MA Experiment 20001906 PARAMETER Experiment Name: At_Drought_Reproduction_P Parameter: Timepoint (day) Value: 5
  misc_feature: MA Experiment 20001906 PARAMETER Experiment Name: At_Drought_Reproduction_P Parameter: Tissue Value: Siliques
  misc_feature: MA Experiment 20001906 PARAMETER Experiment Name: At_Drought_Reproduction_P Parameter: Treatment Value: Drought vs. No Drought
ttttcataacttaatcacacacaaggagagaagagagaaagagagaaagagagacagagataatggcgtacagtgcgtgtttcctacaccagagcgcattggcttcatcagccgcacgatcatcatcttcctcctcatcccagcgtcacgtgtcgctctccaaacctgttcagatcatctgtaaagctcaacagtctcatgaagacgataactccgccgtctcccgccgtcttgctctcactctcctcgtcggcgccgctgctgttggttccaaagtatctcctgctgatgccgcctacggtgaagctgcaaacgtgtttgggaagccaaagacgaacacagacttcttgccatacaatggagatgggttcaaagtgcaggttccagcaaaatggaacccaagcaaagagattgagtatccaggacaagtccttaggttcgaagacaacttcgatgctactagcaatctcaatgtcatggtcactcctaccgacaagaagtccatcactgattacggttctcccgaagagttcctctctcaggttaattacctcctagggaaacaagcttacttcggtgagactgcctctgagggaggctttgacaacaatgcagtggcaacagcaaacattctggagtcatcatctcaggaagttggtgggaaaccctactattacttgtctgtgttgacaagaacggctgatggagacgaaggtgggaagcatcagctgatcacagcaaccgtgaatggagggaagctttacatctgcaaagcacaagctggagacaagaggtggttcaagggagccaggaaatttgtcgagagcgcagccacttctttcagtgttgcttgagtgaaagcaacacaacgtaacaatgctctgcttgctttcttcatttgtctcttgtaaaaaatggaaaatgaaactgagcttttgagaactatcaagatgatgttaccttttcggcatcacttgtgtacctatgataccagactcgtttccaagttttcttaaaaaacaactatattcaatagatattttctcaaattaataagatattgactc

SEQ ID NO: 22602 - protein, 263 aa, Arabidopsis thaliana
  peptide (1)..(263): Ceres Seq. ID no. 12393103
  misc_feature (61)..(263): Pfam Name: PsbP Pfam Description: PsbP
  misc_feature (2)..(263): Homolog of NCBI NO: 266856 NR Description: Oxygen-evolving enhancer protein 2, chloroplast (OEE2) (23 kDa subunit of oxygen evolving system of photosystem
  misc_feature (1)..(263): Homolog of NCBI NO: 417604 NR Description: 23 kDa polypeptide of water-oxidizing complex of
  misc_feature (8)..(263): Homolog of NCBI NO: 19898 NR Description: photosystem II 23 kDa polypeptide [Nicotiana
  misc_feature (6)..(263): Homolog of NCBI NO: 1345550 NR Description: 23-kDa ploypeptide of photosystem II
  misc_feature (1)..(263): Homolog of NCBI NO: 7443216 NR Description: photosystem II oxygen-evolving complex protein 2
  misc_feature (1)..(263): Homolog of NCBI NO: 15224572 NR Description: photosystem II oxygen-evolving complex 23 (OEC23)
  misc_feature (13)..(263): Homolog of NCBI NO: 81723 NR Description: photosystem II oxygen-evolving complex protein 2
  misc_feature (1)..(263): Homolog of NCBI NO: 11133887 NR Description: OXYGEN-EVOLVING ENHANCER PROTEIN 2-2, CHLOROPLAST (OEE2) (23 KDA SUBUNIT OF OXYGEN EVOLVING SYSTEM OF PHOTOSYSTEM
  misc_feature (1)..(263): Homolog of NCBI NO: 131391 NR Description: Oxygen-evolving enhancer protein 2, chloroplast (OEE2) (23 kDa subunit of oxygen evolving system of photosystem
  misc_feature (1)..(263): Homolog of NCBI NO: 15222166 NR Description: photosystem II oxygen-evolving complex 23 (OEC23)
MAYSACFLHQSALASSAARSSSSSSSQRHVSLSKPVQIICKAQQSHEDDNSAVSRRLALTLLVGAAAVGSKVSPADAAYGEAANVFGKPKTNTDFLPYNGDGFKVQVPAKWNPSKEIEYPGQVLRFEDNFDATSNLNVMVTPTDKKSITDYGSPEEFLSQVNYLLGKQAYFGETASEGGFDNNAVATANILESSSQEVGGKPYYYLSVLTRTADGDEGGKHQLITATVNGGKLYICKAQAGDKRWFKGARKFVESAATSFSVA

SEQ ID NO: 22603 - DNA, 1829 bp, Arabidopsis thaliana
  misc_feature (1)..(1829): Ceres Seq. ID no. 12422940
  misc_feature: MA Experiment ID: 108434 Result: Down-regulated in Transcription
  misc_feature: MA Experiment 108434 PARAMETER Experiment Name: At_Root_Tips_cDNA_P Parameter: Tissue Value: Root Tips
  misc_feature: MA Experiment ID: 108435 Result: Up-regulated in Transcription
  misc_feature: MA Experiment 108435 PARAMETER Experiment Name: At_stm_Mutants_cDNA_P Parameter: Plant Line Value: wt Landsburg vs stm
  misc_feature: MA Experiment 108435 PARAMETER Experiment Name: At_stm_Mutants_cDNA_P Parameter: Tissue Value: Shoot Apical Meristem Region
  misc_feature: MA Experiment ID: 20000069 Result: Down-regulated in Transcription
  misc_feature: MA Experiment 20000069 PARAMETER Experiment Name: At_100uM_ABA_Mutants_cDNA_P Parameter: Plant Line Value: CS23
  misc_feature: MA Experiment 20000069 PARAMETER Experiment Name: At_100uM_ABA_Mutants_cDNA_P Parameter: Timepoint (hr) Value: 6
  misc_feature: MA Experiment 20000069 PARAMETER Experiment Name: At_100uM_ABA_Mutants_cDNA_P Parameter: Tissue Value: Aerial
  misc_feature: MA Experiment 20000069 PARAMETER Experiment Name: At_100uM_ABA_Mutants_cDNA_P Parameter: Treatment Value: 100uM ABA vs. No Treatment
  misc_feature: MA Experiment ID: 20000070 Result: Down-regulated in Transcription
  misc_feature: MA Experiment 20000070 PARAMETER Experiment Name: At_100uM_ABA_Mutants_cDNA_P Parameter: Plant Line Value: CS24
  misc_feature: MA Experiment 20000070 PARAMETER Experiment Name: At_100uM_ABA_Mutants_cDNA_P Parameter: Timepoint (hr) Value: 6
  misc_feature: MA Experiment 20000070 PARAMETER Experiment Name: At_100uM_ABA_Mutants_cDNA_P Parameter: Tissue Value: Aerial
  misc_feature: MA Experiment 20000070 PARAMETER Experiment Name: At_100uM_ABA_Mutants_cDNA_P Parameter: Treatment Value: 100uM ABA vs. No Treatment
  misc_feature: MA Experiment ID: 20000071 Result: Down-regulated in Transcription
  misc_feature: MA Experiment 20000071 PARAMETER Experiment Name: At_100uM_ABA_Mutants_cDNA_P Parameter: Plant Line Value: CS8104
  misc_feature: MA Experiment 20000071 PARAMETER Experiment Name: At_100uM_ABA_Mutants_cDNA_P Parameter: Timepoint (hr) Value: 6
  misc_feature: MA Experiment 20000071 PARAMETER Experiment Name: At_100uM_ABA_Mutants_cDNA_P Parameter: Tissue Value: Aerial
  misc_feature: MA Experiment 20000071 PARAMETER Experiment Name: At_100uM_ABA_Mutants_cDNA_P Parameter: Treatment Value: 100uM ABA vs. No Treatment
  misc_feature: MA Experiment ID: 20000117 Result: Down-regulated in Transcription
  misc_feature: MA Experiment 20000117 PARAMETER Experiment Name: At_100uM_ABA_Mutants_cDNA_P Parameter: Plant Line Value: Columbia
  misc_feature: MA Experiment 20000117 PARAMETER Experiment Name: At_100uM_ABA_Mutants_cDNA_P Parameter: Timepoint (hr) Value: 6
  misc_feature: MA Experiment 20000117 PARAMETER Experiment Name: At_100uM_ABA_Mutants_cDNA_P Parameter: Tissue Value: Aerial
  misc_feature: MA Experiment 20000117 PARAMETER Experiment Name: At_100uM_ABA_Mutants_cDNA_P Parameter: Treatment Value: 100uM ABA vs. No Treatment
  misc_feature: MA Experiment ID: 20000224 Result: Up-regulated in Transcription
  misc_feature: MA Experiment ID: 20000306 Result: Up-regulated in Transcription
  misc_feature: MA Experiment 20000306 PARAMETER Experiment Name: At_Germinating_Seeds_Sub_P Parameter: Age (hr) Value: 6 vs. 0
  misc_feature: MA Experiment 20000306 PARAMETER Experiment Name: At_Germinating_Seeds_Sub_P Parameter: Organism Value: A. thaliana
  misc_feature: MA Experiment 20000306 PARAMETER Experiment Name: At_Germinating_Seeds_Sub_P Parameter: Plant Line Value: WS
  misc_feature: MA Experiment 20000306 PARAMETER Experiment Name: At_Germinating_Seeds_Sub_P Parameter: Tissue Value: Germinating Seeds
  misc_feature: MA Experiment ID: 20000307 Result: Up-regulated in Transcription
  misc_feature: MA Experiment 20000307 PARAMETER Experiment Name: At_Germinating_Seeds_Sub_P Parameter: Age (hr) Value: 24 vs. 0
  misc_feature: MA Experiment 20000307 PARAMETER Experiment Name: At_Germinating_Seeds_Sub_P Parameter: Organism Value: A. thaliana
  misc_feature: MA Experiment 20000307 PARAMETER Experiment Name: At_Germinating_Seeds_Sub_P Parameter: Plant Line Value: WS
  misc_feature: MA Experiment 20000307 PARAMETER Experiment Name: At_Germinating_Seeds_Sub_P Parameter: Tissue Value: Germinating Seeds
  misc_feature: MA Experiment ID: 20000314 Result: Up-regulated in Transcription
  misc_feature: MA Experiment 20000314 PARAMETER Experiment Name: At_14day_Shoots-Roots_Sub_P Parameter: Age (day) Value: 14
  misc_feature: MA Experiment 20000314 PARAMETER Experiment Name: At_14day_Shoots-Roots_Sub_P Parameter: Organism Value: A. thaliana
  misc_feature: MA Experiment 20000314 PARAMETER Experiment Name: At_14day_Shoots-Roots_Sub_P Parameter: Plant Line Value: WS
  misc_feature: MA Experiment 20000314 PARAMETER Experiment Name: At_14day_Shoots-Roots_Sub_P Parameter: Tissue Value: Roots vs. Whole Plant
  misc_feature: MA Experiment ID: 20000327 Result: Down-regulated in Transcription
  misc_feature: MA Experiment 20000327 PARAMETER Experiment Name: At_42deg_Heat_Sub_P Parameter: Age (day) Value: 14
  misc_feature: MA Experiment 20000327 PARAMETER Experiment Name: At_42deg_Heat_Sub_P Parameter: Organism Value: A. thaliana
  misc_feature: MA Experiment 20000327 PARAMETER Experiment Name: At_42deg_Heat_Sub_P Parameter: Plant Line Value: WS
  misc_feature: MA Experiment 20000327 PARAMETER Experiment Name: At_42deg_Heat_Sub_P Parameter: Temperature (deg C) Value: 42 vs. 22
  misc_feature: MA Experiment 20000327 PARAMETER Experiment Name: At_42deg_Heat_Sub_P Parameter: Timepoint (hr) Value: 1
  misc_feature: MA Experiment 20000327 PARAMETER Experiment Name: At_42deg_Heat_Sub_P Parameter: Tissue Value: Aerial
  misc_feature: MA Experiment ID: 20000328 Result: Down-regulated in Transcription
  misc_feature: MA Experiment 20000328 PARAMETER Experiment Name: At_42deg_Heat_Sub_P Parameter: Age (day) Value: 14
  misc_feature: MA Experiment 20000328 PARAMETER Experiment Name: At_42deg_Heat_Sub_P Parameter: Organism Value: A. thaliana
  misc_feature: MA Experiment 20000328 PARAMETER Experiment Name: At_42deg_Heat_Sub_P Parameter: Plant Line Value: WS
  misc_feature: MA Experiment 20000328 PARAMETER Experiment Name: At_42deg_Heat_Sub_P Parameter: Temperature (deg C) Value: 42 vs. 22
  misc_feature: MA Experiment 20000328 PARAMETER Experiment Name: At_42deg_Heat_Sub_P Parameter: Timepoint (hr) Value: 6
  misc_feature: MA Experiment 20000328 PARAMETER Experiment Name: At_42deg_Heat_Sub_P Parameter: Tissue Value: Aerial
  misc_feature: MA Experiment ID: 20000329 Result: Up-regulated in Transcription
  misc_feature: MA Experiment 20000329 PARAMETER Experiment Name: At_4deg_Cold_Sub_P Parameter: Age (day) Value: 14
  misc_feature: MA Experiment 20000329 PARAMETER Experiment Name: At_4deg_Cold_Sub_P Parameter: Organism Value: A. thaliana
  misc_feature: MA Experiment 20000329 PARAMETER Experiment Name: At_4deg_Cold_Sub_P Parameter: Plant Line Value: WS
  misc_feature: MA Experiment 20000329 PARAMETER Experiment Name: At_4deg_Cold_Sub_P Parameter: Temperature (deg C) Value: 4 vs. 22
  misc_feature: MA Experiment 20000329 PARAMETER Experiment Name: At_4deg_Cold_Sub_P Parameter: Timepoint (hr) Value: 6
  misc_feature: MA Experiment 20000329 PARAMETER Experiment Name: At_4deg_Cold_Sub_P Parameter: Tissue Value: Aerial
  misc_feature: MA Experiment ID: 20000355 Result: Down-regulated in Transcription
  misc_feature: MA Experiment 20000355 PARAMETER Experiment Name: At_Siliques_Sub_P Parameter: Age (day) Value: 21
  misc_feature: MA Experiment 20000355 PARAMETER Experiment Name: At_Siliques_Sub_P Parameter: Organism Value: A. thaliana
  misc_feature: MA Experiment 20000355 PARAMETER Experiment Name: At_Siliques_Sub_P Parameter: Plant Line Value: WS
  misc_feature: MA Experiment 20000355 PARAMETER Experiment Name: At_Siliques_Sub_P Parameter: Tissue Value: Less Than 5mm Siliques vs. Whole Plant
aacacaaagaatcattttacctctaaagccaaagaccaacatgtctaattcaaaccaaccacttctttccaaaccaaagtctcttaagcacaagaatctatgccttgtcctctccttcgtagccattcttggctctgtggctttcttcacagcccaattaatctccgttaacaccaacaataatgatgattccttattaactacgagccagatttgccatggagctcacgaccaagactcatgccaagctctcttgtccgaattcacgacgttgtcgctctcaaagctcaaccgccttgacctattgcacgtgtttttgaagaactcggtgtggcggcttgagagcacgatgaccatggtgagcgaggctaggatccgctcgaacggtgttagagacaaggcaggttttgctgactgcgaggagatgatggacgtatcaaaggatcggatgatgagttcgatggaggaacttcgcggaggaaactataatcttgagtcatactcaaacgttcatacttggctgagcagtgtgcttacaaactacatgacatgtttagaaagtattagtgatgtctccgtcaactctaagcaaatagtcaagccacaactcgaggacttggtttctagggcaagagtggctctagccatctttgtctccgtcttgcctgccagagacgatctcaaaatgatcatttccaatcgcttcccgtcgtggctaactgctcttgacagaaagcttttagaatcttctcccaagacacttaaggtgaccgcgaacgttgtggtggcaaaagacggcaccggaaagttcaaaacagtgaatgaggcagtggcggcagcaccggagaacagcaatacaagatacgttatatacgtaaagaaaggggtttacaaagaaactattgacataggaaagaaaaagaagaacttaatgcttgttggtgatggcaaagacgcaacgatcataaccggtagtttgaatgtcattgatggatccaccaccttcagatcagccactgttgctgccaatggagacgggtttatggcacaagacatatggttccaaaacactgcagggccggcaaagcaccaggctgtggctctacgagtgagtgctgatcaaactgttataaatcgttgtcgcatagatgcgtatcaagacacgctctacactcacacgttgagacaattctaccgcgacagctacatcaccggtaccgtagatttcatcttcggaaactctgctgtggtattccagaactgcgacatcgtggcacgaaatcctggagctgggcaaaagaacatgttaacggctcaaggacgggaggatcagaaccagaacaccgccatttcgatccaaaaatgtaagataacggctagttcggatcttgctcctgtaaaaggatctgtgaaaacgttccttggtcgaccgtggaagttgtactcaagaacagtgatcatgcagtctttcattgacaaccacattgacccggctggttggttcccatgggatggtgagtttgcgctctccacattgtattatggagagtatgcaaataccggtcctggagcggatacgagtaagagagtgaattggaagggatttaaagttattaaagactcaaaagaggccgaacaattcactgtggcgaagcttattcaaggaggattatggttgaaacccactggagttactttccaagagtggctttgattttaatgtctacttgttcttgtactttgtgttgtgttacctctgttttagtttgatgtattttttctggtttgttttgtatgacttacccaataaataacatgctctgtttcgc

SEQ ID NO: 22604 - protein, 570 aa, Arabidopsis thaliana
  peptide (1)..(570): Ceres Seq. ID no. 12422941
  misc_feature (259)..(556): Pfam Name: Pectinesterase Pfam Description: Pectinesterase
  misc_feature (19)..(570): Homolog of NCBI NO: 29539385 NR Description: pectin methylesterase [Pisum sativum]
  misc_feature (19)..(570): Homolog of NCBI NO: 7447372 NR Description: pectinesterase (EC 3.1.1.11) precursor - garden
  misc_feature (17)..(570): Homolog of NCBI NO: 20269071 NR Description: pectin methylesterase [Sesbania rostrata]
  misc_feature (14)..(570): Homolog of NCBI NO: 6093734 NR Description: Pectinesterase 2 precursor (Pectin methylesterase
  misc_feature (17)..(570): Homolog of NCBI NO: 29539387 NR Description: pectin methylesterase [Pisum sativum]
  misc_feature (19)..(570): Homolog of NCBI NO: 7447371 NR Description: probable pectinesterase (EC 3.1.1.11) precursor -
  misc_feature (14)..(303): Homolog of NCBI NO: 15081650 NR Description: At1g11580/T23J18_33 [Arabidopsis thaliana]
  misc_feature (1)..(340): Homolog of NCBI NO: 6554190 NR Description: T23J18.23 [Arabidopsis thaliana]
  misc_feature (14)..(570): Homolog of NCBI NO: 14334992 NR Description: At1g11580/T23J18_33 [Arabidopsis thaliana]
  misc_feature (14)..(570): Homolog of NCBI NO: 15220424 NR Description: pectin methylesterase, putative
TQRIILPLKPKTNMSNSNQPLLSKPKSLKHKNLCLVLSFVAILGSVAFFTAQLISVNTNNNDDSLLTTSQICHGAHDQDSCQALLSEFTTLSLSKLNRLDLLHVFLKNSVWRLESTMTMVSEARIRSNGVRDKAGFADCEEMMDVSKDRMMSSMEELRGGNYNLESYSNVHTWLSSVLTNYMTCLESISDVSVNSKQIVKPQLEDLVSRARVALAIFVSVLPARDDLKMIISNRFPSWLTALDRKLLESSPKTLKVTANVVVAKDGTGKFKTVNEAVAAAPENSNTRYVIYVKKGVYKETIDIGKKKKNLMLVGDGKDATIITGSLNVIDGSTTFRSATVAANGDGFMAQDIWFQNTAGPAKHQAVALRVSADQTVINRCRIDAYQDTLYTHTLRQFYRDSYITGTVDFIFGNSAVVFQNCDIVARNPGAGQKNMLTAQGREDQNQNTAISIQKCKITASSDLAPVKGSVKTFLGRPWKLYSRTVIMQSFIDNHIDPAGWFPWDGEFALSTLYYGEYANTGPGADTSKRVNWKGFKVIKDSKEAEQFTVAKLIQGGLWLKPTGVTFQEWL

SEQ ID NO: 22605 - protein, 557 aa, Arabidopsis thaliana
  peptide (1)..(557): Ceres Seq. ID no. 12422942
  misc_feature (246)..(543): Pfam Name: Pectinesterase Pfam Description: Pectinesterase
  misc_feature (1)..(557): Homolog of NCBI NO: 6093734 NR Description: Pectinesterase 2 precursor (Pectin methylesterase
  misc_feature (1)..(290): Homolog of NCBI NO: 15081650 NR Description: At1g11580/T23J18_33 [Arabidopsis thaliana]
  misc_feature (4)..(557): Homolog of NCBI NO: 29539387 NR Description: pectin methylesterase [Pisum sativum]
  misc_feature (6)..(557): Homolog of NCBI NO: 7447371 NR Description: probable pectinesterase (EC 3.1.1.11) precursor -
  misc_feature (6)..(557): Homolog of NCBI NO: 29539385 NR Description: pectin methylesterase [Pisum sativum]
  misc_feature (6)..(557): Homolog of NCBI NO: 7447372 NR Description: pectinesterase (EC 3.1.1.11) precursor - garden
  misc_feature (4)..(557): Homolog of NCBI NO: 20269071 NR Description: pectin methylesterase [Sesbania rostrata]
  misc_feature (1)..(327): Homolog of NCBI NO: 6554190 NR Description: T23J18.23 [Arabidopsis thaliana]
  misc_feature (1)..(557): Homolog of NCBI NO: 14334992 NR Description: At1g11580/T23J18_33 [Arabidopsis thaliana]
  misc_feature (1)..(557): Homolog of NCBI NO: 15220424 NR Description: pectin methylesterase, putative
MSNSNQPLLSKPKSLKHKNLCLVLSFVAILGSVAFFTAQLISVNTNNNDDSLLTTSQICHGAHDQDSCQALLSEFTTLSLSKLNRLDLLHVFLKNSVWRLESTMTMVSEARIRSNGVRDKAGFADCEEMMDVSKDRMMSSMEELRGGNYNLESYSNVHTWLSSVLTNYMTCLESISDVSVNSKQIVKPQLEDLVSRARVALAIFVSVLPARDDLKMIISNRFPSWLTALDRKLLESSPKTLKVTANVVVAKDGTGKFKTVNEAVAAAPENSNTRYVIYVKKGVYKETIDIGKKKKNLMLVGDGKDATIITGSLNVIDGSTTFRSATVAANGDGFMAQDIWFQNTAGPAKHQAVALRVSADQTVINRCRIDAYQDTLYTHTLRQFYRDSYITGTVDFIFGNSAVVFQNCDIVARNPGAGQKNMLTAQGREDQNQNTAISIQKCKITASSDLAPVKGSVKTFLGRPWKLYSRTVIMQSFIDNHIDPAGWFPWDGEFALSTLYYGEYANTGPGADTSKRVNWKGFKVIKDSKEAEQFTVAKLIQGGLWLKPTGVTFQEWL

SEQ ID NO: 22606 - protein, 454 aa, Arabidopsis thaliana
  peptide (1)..(454): Ceres Seq. ID no. 12422943
  misc_feature (143)..(440): Pfam Name: Pectinesterase Pfam Description: Pectinesterase
  misc_feature (1)..(454): Homolog of NCBI NO: 6093734 NR Description: Pectinesterase 2 precursor (Pectin methylesterase
  misc_feature (1)..(187): Homolog of NCBI NO: 15081650 NR Description: At1g11580/T23J18_33 [Arabidopsis thaliana]
  misc_feature (1)..(454): Homolog of NCBI NO: 29539387 NR Description: pectin methylesterase [Pisum sativum]
  misc_feature (1)..(454): Homolog of NCBI NO: 7447371 NR Description: probable pectinesterase (EC 3.1.1.11) precursor -
  misc_feature (1)..(454): Homolog of NCBI NO: 29539385 NR Description: pectin methylesterase [Pisum sativum]
  misc_feature (1)..(454): Homolog of NCBI NO: 7447372 NR Description: pectinesterase (EC 3.1.1.11) precursor - garden
  misc_feature (1)..(454): Homolog of NCBI NO: 20269071 NR Description: pectin methylesterase [Sesbania rostrata]
  misc_feature (1)..(224): Homolog of NCBI NO: 6554190 NR Description: T23J18.23 [Arabidopsis thaliana]
  misc_feature (1)..(454): Homolog of NCBI NO: 14334992 NR Description: At1g11580/T23J18_33 [Arabidopsis thaliana]
  misc_feature (1)..(454): Homolog of NCBI NO: 15220424 NR Description: pectin methylesterase, putative
MTMVSEARIRSNGVRDKAGFADCEEMMDVSKDRMMSSMEELRGGNYNLESYSNVHTWLSSVLTNYMTCLESISDVSVNSKQIVKPQLEDLVSRARVALAIFVSVLPARDDLKMIISNRFPSWLTALDRKLLESSPKTLKVTANVVVAKDGTGKFKTVNEAVAAAPENSNTRYVIYVKKGVYKETIDIGKKKKNLMLVGDGKDATIITGSLNVIDGSTTFRSATVAANGDGFMAQDIWFQNTAGPAKHQAVALRVSADQTVINRCRIDAYQDTLYTHTLRQFYRDSYITGTVDFIFGNSAVVFQNCDIVARNPGAGQKNMLTAQGREDQNQNTAISIQKCKITASSDLAPVKGSVKTFLGRPWKLYSRTVIMQSFIDNHIDPAGWFPWDGEFALSTLYYGEYANTGPGADTSKRVNWKGFKVIKDSKEAEQFTVAKLIQGGLWLKPTGVTFQEWL

SEQ ID NO: 22607 - DNA, 1124 bp, Arabidopsis thaliana
  misc_feature (1)..(1124): Ceres Seq. ID no. 12340331
  misc_feature: MA Experiment ID: 108435 Result: Up-regulated in Transcription
  misc_feature: MA Experiment 108435 PARAMETER Experiment Name: At_stm_Mutants_cDNA_P Parameter: Plant Line Value: wt Landsburg vs stm
  misc_feature: MA Experiment 108435 PARAMETER Experiment Name: At_stm_Mutants_cDNA_P Parameter: Tissue Value: Shoot Apical Meristem Region
  misc_feature: MA Experiment ID: 108462 Result: Up-regulated in Transcription
  misc_feature: MA Experiment 108462 PARAMETER Experiment Name: At_Germinating_Seeds_cDNA_P Parameter: Age (day) Value: 2 vs. 0
  misc_feature: MA Experiment 108462 PARAMETER Experiment Name: At_Germinating_Seeds_cDNA_P Parameter: Tissue Value: Germinating Seeds
  misc_feature: MA Experiment ID: 108463 Result: Up-regulated in Transcription
  misc_feature: MA Experiment 108463 PARAMETER Experiment Name: At_Germinating_Seeds_cDNA_P Parameter: Age (day) Value: 3 vs. 0
  misc_feature: MA Experiment 108463 PARAMETER Experiment Name: At_Germinating_Seeds_cDNA_P Parameter: Tissue Value: Germinating Seeds
  misc_feature: MA Experiment ID: 108464 Result: Up-regulated in Transcription
  misc_feature: MA Experiment 108464 PARAMETER Experiment Name: At_Germinating_Seeds_cDNA_P Parameter: Age (day) Value: 4 vs. 0
  misc_feature: MA Experiment 108464 PARAMETER Experiment Name: At_Germinating_Seeds_cDNA_P Parameter: Tissue Value: Germinating Seeds
  misc_feature: MA Experiment ID: 108569 Result: Up-regulated in Transcription
  misc_feature: MA Experiment 108569 PARAMETER Experiment Name: At_0.001%_MeJA__cDNA_P Parameter: Timepoint (hr) Value: 6
  misc_feature: MA Experiment 108569 PARAMETER Experiment Name: At_0.001%_MeJA__cDNA_P Parameter: Tissue Value: Aerial
  misc_feature: MA Experiment 108569 PARAMETER Experiment Name: At_0.001%_MeJA__cDNA_P Parameter: Treatment Value: 0.001% MeJA vs. No Treatment
  misc_feature: MA Experiment ID: 108573 Result: Up-regulated in Transcription
  misc_feature: MA Experiment 108573 PARAMETER Experiment Name: At_Drought_cDNA_P Parameter: Timepoint (hr) Value: 6
  misc_feature: MA Experiment 108573 PARAMETER Experiment Name: At_Drought_cDNA_P Parameter: Tissue Value: Aerial
  misc_feature: MA Experiment 108573 PARAMETER Experiment Name: At_Drought_cDNA_P Parameter: Treatment Value: Drought vs. No Drought
  misc_feature: MA Experiment ID: 108579 Result: Up-regulated in Transcription
  misc_feature: MA Experiment 108579 PARAMETER Experiment Name: At_4deg_Cold_cDNA_P Parameter: Temperature (deg C) Value: 4 vs. 22
  misc_feature: MA Experiment 108579 PARAMETER Experiment Name: At_4deg_Cold_cDNA_P Parameter: Timepoint (hr) Value: 6
  misc_feature: MA Experiment 108579 PARAMETER Experiment Name: At_4deg_Cold_cDNA_P Parameter: Tissue Value: Aerial
  misc_feature: MA Experiment ID: 108585 Result: Up-regulated in Transcription
  misc_feature: MA Experiment 108585 PARAMETER Experiment Name: At_5mM_NaNP_cDNA_P Parameter: Timepoint (hr) Value: 6
  misc_feature: MA Experiment 108585 PARAMETER Experiment Name: At_5mM_NaNP_cDNA_P Parameter: Tissue Value: Aerial
  misc_feature: MA Experiment 108585 PARAMETER Experiment Name: At_5mM_NaNP_cDNA_P Parameter: Treatment Value: null
  misc_feature: MA Experiment ID: 108607 Result: Up-regulated in Transcription
  misc_feature: MA Experiment 108607 PARAMETER Experiment Name: At_100uM_ABA_cDNA_P Parameter: Timepoint (hr) Value: 4
  misc_feature: MA Experiment 108607 PARAMETER Experiment Name: At_100uM_ABA_cDNA_P Parameter: Tissue Value: Aerial
  misc_feature: MA Experiment 108607 PARAMETER Experiment Name: At_100uM_ABA_cDNA_P Parameter: Treatment Value: 100uM ABA vs. No Treatment
  misc_feature: MA Experiment ID: 20000087 Result: Up-regulated in Transcription
  misc_feature: MA Experiment 20000087 PARAMETER Experiment Name: At_100uM_ABA_Mutants_cDNA_P Parameter: Plant Line Value: WS
  misc_feature: MA Experiment 20000087 PARAMETER Experiment Name: At_100uM_ABA_Mutants_cDNA_P Parameter: Timepoint (hr) Value: 6
  misc_feature: MA Experiment 20000087 PARAMETER Experiment Name: At_100uM_ABA_Mutants_cDNA_P Parameter: Tissue Value: Aerial
  misc_feature: MA Experiment 20000087 PARAMETER Experiment Name: At_100uM_ABA_Mutants_cDNA_P Parameter: Treatment Value: 100uM ABA vs. No Treatment
  misc_feature: MA Experiment ID: 20000093 Result: Up-regulated in Transcription
  misc_feature: MA Experiment 20000093 PARAMETER Experiment Name: At_42deg_Heat_cDNA_P Parameter: Temperature (deg C) Value: 42 vs. 22
  misc_feature: MA Experiment 20000093 PARAMETER Experiment Name: At_42deg_Heat_cDNA_P Parameter: Timepoint (hr) Value: 0.5
  misc_feature: MA Experiment 20000093 PARAMETER Experiment Name: At_42deg_Heat_cDNA_P Parameter: Tissue Value: Aerial
  misc_feature: MA Experiment ID: 20000112 Result: Up-regulated in Transcription
  misc_feature: MA Experiment 20000112 PARAMETER Experiment Name: At_42deg_Heat_cDNA_P Parameter: Temperature (deg C) Value: 42 vs. 22
  misc_feature: MA Experiment 20000112 PARAMETER Experiment Name: At_42deg_Heat_cDNA_P Parameter: Timepoint (hr) Value: 2
  misc_feature: MA Experiment 20000112 PARAMETER Experiment Name: At_42deg_Heat_cDNA_P Parameter: Tissue Value: Aerial
  misc_feature: MA Experiment ID: 20000113 Result: Up-regulated in Transcription
  misc_feature: MA Experiment 20000113 PARAMETER Experiment Name: At_42deg_Heat_cDNA_P Parameter: Temperature (deg C) Value: 42 vs. 22
  misc_feature: MA Experiment 20000113 PARAMETER Experiment Name: At_42deg_Heat_cDNA_P Parameter: Timepoint (hr) Value: 8
  misc_feature: MA Experiment 20000113 PARAMETER Experiment Name: At_42deg_Heat_cDNA_P Parameter: Tissue Value: Aerial
  misc_feature: MA Experiment ID: 20000117 Result: Up-regulated in Transcription
  misc_feature: MA Experiment 20000117 PARAMETER Experiment Name: At_100uM_ABA_Mutants_cDNA_P Parameter: Plant Line Value: Columbia
  misc_feature: MA Experiment 20000117 PARAMETER Experiment Name: At_100uM_ABA_Mutants_cDNA_P Parameter: Timepoint (hr) Value: 6
  misc_feature: MA Experiment 20000117 PARAMETER Experiment Name: At_100uM_ABA_Mutants_cDNA_P Parameter: Tissue Value: Aerial
  misc_feature: MA Experiment 20000117 PARAMETER Experiment Name: At_100uM_ABA_Mutants_cDNA_P Parameter: Treatment Value: 100uM ABA vs. No Treatment
  misc_feature: MA Experiment ID: 20000144 Result: Up-regulated in Transcription
  misc_feature: MA Experiment 20000144 PARAMETER Experiment Name: At_42deg_Heat_cDNA_P Parameter: Temperature (deg C) Value: 42 vs. 22
  misc_feature: MA Experiment 20000144 PARAMETER Experiment Name: At_42deg_Heat_cDNA_P Parameter: Timepoint (hr) Value: 1
  misc_feature: MA Experiment 20000144 PARAMETER Experiment Name: At_42deg_Heat_cDNA_P Parameter: Tissue Value: Aerial
  misc_feature: MA Experiment ID: 20000169 Result: Up-regulated in Transcription
  misc_feature: MA Experiment 20000169 PARAMETER Experiment Name: At_100uM_ABA_P Parameter: Age (day) Value: 14
  misc_feature: MA Experiment 20000169 PARAMETER Experiment Name: At_100uM_ABA_P Parameter: Organism Value: A. thaliana
  misc_feature: MA Experiment 20000169 PARAMETER Experiment Name: At_100uM_ABA_P Parameter: Plant Line Value: WS
  misc_feature: MA Experiment 20000169 PARAMETER Experiment Name: At_100uM_ABA_P Parameter: Timepoint (hr) Value: 6
  misc_feature: MA Experiment 20000169 PARAMETER Experiment Name: At_100uM_ABA_P Parameter: Tissue Value: Aerial
  misc_feature: MA Experiment 20000169 PARAMETER Experiment Name: At_100uM_ABA_P Parameter: Treatment Value: 100uM ABA vs. No Treatment
  misc_feature: MA Experiment ID: 20000171 Result: Up-regulated in Transcription
  misc_feature: MA Experiment 20000171 PARAMETER Experiment Name: At_42deg_Heat_P Parameter: Age (day) Value: 14
  misc_feature: MA Experiment 20000171 PARAMETER Experiment Name: At_42deg_Heat_P Parameter: Organism Value: A. thaliana
  misc_feature: MA Experiment 20000171 PARAMETER Experiment Name: At_42deg_Heat_P Parameter: Plant Line Value: WS
  misc_feature: MA Experiment 20000171 PARAMETER Experiment Name: At_42deg_Heat_P Parameter: Temperature (deg C) Value: 42 vs. 22
  misc_feature: MA Experiment 20000171 PARAMETER Experiment Name: At_42deg_Heat_P Parameter: Timepoint (hr) Value: 1
  misc_feature: MA Experiment 20000171 PARAMETER Experiment Name: At_42deg_Heat_P Parameter: Tissue Value: Aerial
  misc_feature: MA Experiment ID: 20000179 Result: Up-regulated in Transcription
  misc_feature: MA Experiment 20000179 PARAMETER Experiment Name: At_Germinating_Seeds_P Parameter: Age (hr) Value: 6 vs. 0
  misc_feature: MA Experiment 20000179 PARAMETER Experiment Name: At_Germinating_Seeds_P Parameter: Tissue Value: Germinating Seeds
  misc_feature: MA Experiment ID: 20000180 Result: Up-regulated in Transcription
  misc_feature: MA Experiment 20000180 PARAMETER Experiment Name: At_Germinating_Seeds_P Parameter: Age (hr) Value: 24 vs. 0
  misc_feature: MA Experiment 20000180 PARAMETER Experiment Name: At_Germinating_Seeds_P Parameter: Tissue Value: Germinating Seeds
  misc_feature: MA Experiment ID: 20000460 Result: Down-regulated in Transcription
  misc_feature: MA Experiment 20000460 PARAMETER Experiment Name: At_10percent_PEG_P Parameter: Age (day) Value: 12
  misc_feature: MA Experiment 20000460 PARAMETER Experiment Name: At_10percent_PEG_P Parameter: Organism Value: A. thaliana
  misc_feature: MA Experiment 20000460 PARAMETER Experiment Name: At_10percent_PEG_P Parameter: Plant Line Value: WS
  misc_feature: MA Experiment 20000460 PARAMETER Experiment Name: At_10percent_PEG_P Parameter: Timepoint (day) Value: 12
  misc_feature: MA Experiment 20000460 PARAMETER Experiment Name: At_10percent_PEG_P Parameter: Tissue Value: Whole Plant
  misc_feature: MA Experiment 20000460 PARAMETER Experiment Name: At_10percent_PEG_P Parameter: Treatment Value: 10percent PEG vs. No Treatment
  misc_feature: MA Experiment ID: 20000527 Result: Down-regulated in Transcription
  misc_feature: MA Experiment 20000527 PARAMETER Experiment Name: At_10percent_PEG_P Parameter: Age (day) Value: 20
  misc_feature: MA Experiment 20000527 PARAMETER Experiment Name: At_10percent_PEG_P Parameter: Organism Value: A. thaliana
  misc_feature: MA Experiment 20000527 PARAMETER Experiment Name: At_10percent_PEG_P Parameter: Plant Line Value: WS
  misc_feature: MA Experiment 20000527 PARAMETER Experiment Name: At_10percent_PEG_P Parameter: Timepoint (day) Value: 20
  misc_feature: MA Experiment 20000527 PARAMETER Experiment Name: At_10percent_PEG_P Parameter: Tissue Value: Whole Plant
  misc_feature: MA Experiment 20000527 PARAMETER Experiment Name: At_10percent_PEG_P Parameter: Treatment Value: 10percent PEG vs. No Treatment
  misc_feature: MA Experiment ID: 20000573 Result: Down-regulated in Transcription
  misc_feature: MA Experiment 20000573 PARAMETER Experiment Name: At_100uM_ABA_Mutants__P Parameter: Organism Value: A. thaliana
  misc_feature: MA Experiment 20000573 PARAMETER Experiment Name: At_100uM_ABA_Mutants__P Parameter: Plant Line Value: CS22 vs. Ler wt
  misc_feature: MA Experiment 20000573 PARAMETER Experiment Name: At_100uM_ABA_Mutants__P Parameter: Timepoint (hr) Value: N/A
  misc_feature: MA Experiment 20000573 PARAMETER Experiment Name: At_100uM_ABA_Mutants__P Parameter: Tissue Value: Whole Plant
  misc_feature: MA Experiment 20000573 PARAMETER Experiment Name: At_100uM_ABA_Mutants__P Parameter: Treatment Value: None
  misc_feature: MA Experiment ID: 20000574 Result: Down-regulated in Transcription
  misc_feature: MA Experiment 20000574 PARAMETER Experiment Name: At_100uM_ABA_Mutants__P Parameter: Organism Value: A. thaliana
  misc_feature: MA Experiment 20000574 PARAMETER Experiment Name: At_100uM_ABA_Mutants__P Parameter: Plant Line Value: CS23 vs. Ler wt
  misc_feature: MA Experiment 20000574 PARAMETER Experiment Name: At_100uM_ABA_Mutants__P Parameter: Timepoint (hr) Value: N/A
  misc_feature: MA Experiment 20000574 PARAMETER Experiment Name: At_100uM_ABA_Mutants__P Parameter: Tissue Value: Whole Plant
  misc_feature: MA Experiment 20000574 PARAMETER Experiment Name: At_100uM_ABA_Mutants__P Parameter: Treatment Value: None
  misc_feature: MA Experiment ID: 20001248 Result: Down-regulated in Transcription
  misc_feature: MA Experiment 20001248 PARAMETER Experiment Name: At_Far-red-induction_P Parameter: Age (day) Value: 7
  misc_feature: MA Experiment 20001248 PARAMETER Experiment Name: At_Far-red-induction_P Parameter: Light Value: Far-red vs. White
  misc_feature: MA Experiment 20001248 PARAMETER Experiment Name: At_Far-red-induction_P Parameter: Organism Value: A. thaliana
  misc_feature: MA Experiment 20001248 PARAMETER Experiment Name: At_Far-red-induction_P Parameter: Plant Line Value: Columbia
  misc_feature: MA Experiment 20001248 PARAMETER Experiment Name: At_Far-red-induction_P Parameter: Timepoint (hr) Value: 4
  misc_feature: MA Experiment 20001248 PARAMETER Experiment Name: At_Far-red-induction_P Parameter: Tissue Value: Whole Plant
  misc_feature: MA Experiment ID: 20001450 Result: Down-regulated in Transcription
  misc_feature: MA Experiment 20001450 PARAMETER Experiment Name: At_Far-red-induction_P Parameter: Age (day) Value: 7
  misc_feature: MA Experiment 20001450 PARAMETER Experiment Name: At_Far-red-induction_P Parameter: Light Value: Far-red vs. White
  misc_feature: MA Experiment 20001450 PARAMETER Experiment Name: At_Far-red-induction_P Parameter: Organism Value: A. thaliana
  misc_feature: MA Experiment 20001450 PARAMETER Experiment Name: At_Far-red-induction_P Parameter: Plant Line Value: Columbia
  misc_feature: MA Experiment 20001450 PARAMETER Experiment Name: At_Far-red-induction_P Parameter: Timepoint (hr) Value: 8
  misc_feature: MA Experiment 20001450 PARAMETER Experiment Name: At_Far-red-induction_P Parameter: Tissue Value: Whole Plant
  misc_feature: MA Experiment ID: 20001560 Result: Up-regulated in Transcription
  misc_feature: MA Experiment 20001560 PARAMETER Experiment Name: At_Drought_Soil_Dry_P Parameter: Age (day) Value: 28
  misc_feature: MA Experiment 20001560 PARAMETER Experiment Name: At_Drought_Soil_Dry_P Parameter: Organism Value: A. thaliana
  misc_feature: MA Experiment 20001560 PARAMETER Experiment Name: At_Drought_Soil_Dry_P Parameter: Plant Line Value: WS
  misc_feature: MA Experiment 20001560 PARAMETER Experiment Name: At_Drought_Soil_Dry_P Parameter: Post Timepoint (hr) Value: None
  misc_feature: MA Experiment 20001560 PARAMETER Experiment Name: At_Drought_Soil_Dry_P Parameter: Post-Treatment Value: None
  misc_feature: MA Experiment 20001560 PARAMETER Experiment Name: At_Drought_Soil_Dry_P Parameter: Timepoint (day) Value: 14
  misc_feature: MA Experiment 20001560 PARAMETER Experiment Name: At_Drought_Soil_Dry_P Parameter: Treatment Value: Drought vs. No Drought
ataaaaagtagtactcgtgtcttactcgtgccagccactcgcatttctccagattttattatccttcctcgaaacaagtagatccacgattcgttgctgcgatcggcgttattatcgtcagctctctcgtttctgttctgtgagcttagctaagatgacgaagaactacccaaccgtgagcgaagattacaagaaagctgttgagaagtgcaggaggaagctcagaggtttgatcgctgagaagaactgtgcacccatcatggtccgactcgcatggcactctgctggaactttcgattgtcaatcaaggactggaggtccattcggaacaatgaggtttgacgctgagcaagctcatggagccaacagtggtatccacattgctcttaggttgttggaccccatcagggagcaattccctaccatctcttttgctgatttccatcagcttgctggtgttgtggccgttgaagttactggtggccctgacattcctttccaccctggaagagaggacaagccccaaccacctccagagggtcgtcttcctgatgctaccaagggttgtgaccatttgagagatgtctttgctaagcagatgggcttatctgacaaagacattgtcgctttatctggtgcccacactctgggacgatgccacaaggataggtctggcttcgaaggtgcatggacatcaaaccctctaatcttcgacaactcttacttcaaggaactcttgagcggagagaaggaaggccttcttcagcttgtctctgacaaagcactattggacgaccctgttttccgtcctttggtcgagaaatacgctgctgatgaagatgcctttttcgctgattacgctgaggcccacatgaagctttctgagcttgggtttgctgatgcttaagctgtgacgtatgctctgtgtgtgtgtgtgtgtctccccgagagtcatggctgtttttggttgggggctggaggggtcgcattgcatttgaactttgtcatatgattgcttaatgtactctcggatttacgtatctgtttttttcggtgggttgtgatttgaacacatccgttgcgcttttgctgcttagacacattaataaaattaatttctctcg

SEQ ID NO: 22608 - protein, 250 aa, Arabidopsis thaliana
  peptide (1)..(250): Ceres Seq. ID no. 12340332
  misc_feature (19)..(227): Pfam Name: Peroxidase Pfam Description: Peroxidase
  misc_feature (1)..(250): Homolog of NCBI NO: 24636598 NR Description: ascorbate peroxidase [Solanum tuberosum]
  misc_feature (1)..(250): Homolog of NCBI NO: 7488439 NR Description: L-ascorbate peroxidase (EC 1.11.1.11) - leaf
  misc_feature (1)..(250): Homolog of NCBI NO: 1890354 NR Description: L-ascorbate peroxidase [Brassica napus]
  misc_feature (1)..(250): Homolog of NCBI NO: 541927 NR Description: L-ascorbate peroxidase (EC 1.11.1.11) - radish
  misc_feature (1)..(250): Homolog of NCBI NO: 18265379 NR Description: ascorbate peroxidase [Brassica oleracea]
  misc_feature (1)..(250): Homolog of NCBI NO: 18265381 NR Description: ascorbate peroxidase [Brassica oleracea]
  misc_feature (1)..(250): Homolog of NCBI NO: 24421231 NR Description: ascorbate peroxidase [Brassica juncea]
  misc_feature (1)..(250): Homolog of NCBI NO: 24421233 NR Description: ascorbate peroxidase [Brassica juncea]
  misc_feature (1)..(250): Homolog of NCBI NO: 15223049 NR Description: ascorbate peroxidase, putative (APX)
  misc_feature (1)..(250): Homolog of NCBI NO: 99735 NR Description: L-ascorbate peroxidase (EC 1.11.1.11) precursor -
MTKNYPTVSEDYKKAVEKCRRKLRGLIAEKNCAPIMVRLAWHSAGTFDCQSRTGGPFGTMRFDAEQAHGANSGIHIALRLLDPIREQFPTISFADFHQLAGVVAVEVTGGPDIPFHPGREDKPQPPPEGRLPDATKGCDHLRDVFAKQMGLSDKDIVALSGAHTLGRCHKDRSGFEGAWTSNPLIFDNSYFKELLSGEKEGLLQLVSDKALLDDPVFRPLVEKYAADEDAFFADYAEAHMKLSELGFADA

SEQ ID NO: 22609 - protein, 215 aa, Arabidopsis thaliana
  peptide (1)..(215): Ceres Seq. ID no. 12340333
  misc_feature (1)..(192): Pfam Name: Peroxidase Pfam Description: Peroxidase
  misc_feature (1)..(215): Homolog of NCBI NO: 24636598 NR Description: ascorbate peroxidase [Solanum tuberosum]
  misc_feature (1)..(215): Homolog of NCBI NO: 7488439 NR Description: L-ascorbate peroxidase (EC 1.11.1.11) - leaf
  misc_feature (1)..(215): Homolog of NCBI NO: 1890354 NR Description: L-ascorbate peroxidase [Brassica napus]
  misc_feature (1)..(215): Homolog of NCBI NO: 541927 NR Description: L-ascorbate peroxidase (EC 1.11.1.11) - radish
  misc_feature (1)..(215): Homolog of NCBI NO: 18265379 NR Description: ascorbate peroxidase [Brassica oleracea]
  misc_feature (1)..(215): Homolog of NCBI NO: 18265381 NR Description: ascorbate peroxidase [Brassica oleracea]
  misc_feature (1)..(215): Homolog of NCBI NO: 24421231 NR Description: ascorbate peroxidase [Brassica juncea]
  misc_feature (1)..(215): Homolog of NCBI NO: 24421233 NR Description: ascorbate peroxidase [Brassica juncea]
  misc_feature (1)..(215): Homolog of NCBI NO: 15223049 NR Description: ascorbate peroxidase, putative (APX)
  misc_feature (1)..(215): Homolog of NCBI NO: 99735 NR Description: L-ascorbate peroxidase (EC 1.11.1.11) precursor -
MVRLAWHSAGTFDCQSRTGGPFGTMRFDAEQAHGANSGIHIALRLLDPIREQFPTISFADFHQLAGVVAVEVTGGPDIPFHPGREDKPQPPPEGRLPDATKGCDHLRDVFAKQMGLSDKDIVALSGAHTLGRCHKDRSGFEGAWTSNPLIFDNSYFKELLSGEKEGLLQLVSDKALLDDPVFRPLVEKYAADEDAFFADYAEAHMKLSELGFADA

SEQ ID NO: 22610 - protein, 191 aa, Arabidopsis thaliana
  peptide (1)..(191): Ceres Seq. ID no. 12340334
  misc_feature (1)..(168): Pfam Name: Peroxidase Pfam Description: Peroxidase
  misc_feature (1)..(191): Homolog of NCBI NO: 24636598 NR Description: ascorbate peroxidase [Solanum tuberosum]
  misc_feature (1)..(191): Homolog of NCBI NO: 7488439 NR Description: L-ascorbate peroxidase (EC 1.11.1.11) - leaf
  misc_feature (1)..(191): Homolog of NCBI NO: 1890354 NR Description: L-ascorbate peroxidase [Brassica napus]
  misc_feature (1)..(191): Homolog of NCBI NO: 541927 NR Description: L-ascorbate peroxidase (EC 1.11.1.11) - radish
  misc_feature (1)..(191): Homolog of NCBI NO: 18265379 NR Description: ascorbate peroxidase [Brassica oleracea]
  misc_feature (1)..(191): Homolog of NCBI NO: 18265381 NR Description: ascorbate peroxidase [Brassica oleracea]
  misc_feature (1)..(191): Homolog of NCBI NO: 24421231 NR Description: ascorbate peroxidase [Brassica juncea]
  misc_feature (1)..(191): Homolog of NCBI NO: 24421233 NR Description: ascorbate peroxidase [Brassica juncea]
  misc_feature (1)..(191): Homolog of NCBI NO: 15223049 NR Description: ascorbate peroxidase, putative (APX)
  misc_feature (1)..(191): Homolog of NCBI NO: 99735 NR Description: L-ascorbate peroxidase (EC 1.11.1.11) precursor -
MRFDAEQAHGANSGIHIALRLLDPIREQFPTISFADFHQLAGVVAVEVTGGPDIPFHPGREDKPQPPPEGRLPDATKGCDHLRDVFAKQMGLSDKDIVALSGAHTLGRCHKDRSGFEGAWTSNPLIFDNSYFKELLSGEKEGLLQLVSDKALLDDPVFRPLVEKYAADEDAFFADYAEAHMKLSELGFADA

SEQ ID NO: 22611 - DNA, 1431 bp, Arabidopsis thaliana
  misc_feature (1)..(1431): Ceres Seq. ID no. 12396135
  misc_feature: MA Experiment ID: 108462 Result: Down-regulated in Transcription
  misc_feature: MA Experiment 108462 PARAMETER Experiment Name: At_Germinating_Seeds_cDNA_P Parameter: Age (day) Value: 2 vs. 0
  misc_feature: MA Experiment 108462 PARAMETER Experiment Name: At_Germinating_Seeds_cDNA_P Parameter: Tissue Value: Germinating Seeds
  misc_feature: MA Experiment ID: 108464 Result: Down-regulated in Transcription
  misc_feature: MA Experiment 108464 PARAMETER Experiment Name: At_Germinating_Seeds_cDNA_P Parameter: Age (day) Value: 4 vs. 0
  misc_feature: MA Experiment 108464 PARAMETER Experiment Name: At_Germinating_Seeds_cDNA_P Parameter: Tissue Value: Germinating Seeds
  misc_feature: MA Experiment ID: 108573 Result: Up-regulated in Transcription
  misc_feature: MA Experiment 108573 PARAMETER Experiment Name: At_Drought_cDNA_P Parameter: Timepoint (hr) Value: 6
  misc_feature: MA Experiment 108573 PARAMETER Experiment Name: At_Drought_cDNA_P Parameter: Tissue Value: Aerial
  misc_feature: MA Experiment 108573 PARAMETER Experiment Name: At_Drought_cDNA_P Parameter: Treatment Value: Drought vs. No Drought
  misc_feature: MA Experiment ID: 108576 Result: Up-regulated in Transcription
  misc_feature: MA Experiment 108576 PARAMETER Experiment Name: At_42deg_Heat_cDNA_P Parameter: Temperature (deg C) Value: 42 vs. 22
  misc_feature: MA Experiment 108576 PARAMETER Experiment Name: At_42deg_Heat_cDNA_P Parameter: Timepoint (hr) Value: 1
  misc_feature: MA Experiment 108576 PARAMETER Experiment Name: At_42deg_Heat_cDNA_P Parameter: Tissue Value: Aerial
  misc_feature: MA Experiment ID: 108579 Result: Down-regulated in Transcription
  misc_feature: MA Experiment 108579 PARAMETER Experiment Name: At_4deg_Cold_cDNA_P Parameter: Temperature (deg C) Value: 4 vs. 22
  misc_feature: MA Experiment 108579 PARAMETER Experiment Name: At_4deg_Cold_cDNA_P Parameter: Timepoint (hr) Value: 6
  misc_feature: MA Experiment 108579 PARAMETER Experiment Name: At_4deg_Cold_cDNA_P Parameter: Tissue Value: Aerial
  misc_feature: MA Experiment ID: 20000070 Result: Up-regulated in Transcription
  misc_feature: MA Experiment 20000070 PARAMETER Experiment Name: At_100uM_ABA_Mutants_cDNA_P Parameter: Plant Line Value: CS24
  misc_feature: MA Experiment 20000070 PARAMETER Experiment Name: At_100uM_ABA_Mutants_cDNA_P Parameter: Timepoint (hr) Value: 6
  misc_feature: MA Experiment 20000070 PARAMETER Experiment Name: At_100uM_ABA_Mutants_cDNA_P Parameter: Tissue Value: Aerial
  misc_feature: MA Experiment 20000070 PARAMETER Experiment Name: At_100uM_ABA_Mutants_cDNA_P Parameter: Treatment Value: 100uM ABA vs. No Treatment
  misc_feature: MA Experiment ID: 20000071 Result: Up-regulated in Transcription
  misc_feature: MA Experiment 20000071 PARAMETER Experiment Name: At_100uM_ABA_Mutants_cDNA_P Parameter: Plant Line Value: CS8104
  misc_feature: MA Experiment 20000071 PARAMETER Experiment Name: At_100uM_ABA_Mutants_cDNA_P Parameter: Timepoint (hr) Value: 6
  misc_feature: MA Experiment 20000071 PARAMETER Experiment Name: At_100uM_ABA_Mutants_cDNA_P Parameter: Tissue Value: Aerial
  misc_feature: MA Experiment 20000071 PARAMETER Experiment Name: At_100uM_ABA_Mutants_cDNA_P Parameter: Treatment Value: 100uM ABA vs. No Treatment
  misc_feature: MA Experiment ID: 20000072 Result: Up-regulated in Transcription
  misc_feature: MA Experiment 20000072 PARAMETER Experiment Name: At_100uM_ABA_Mutants_cDNA_P Parameter: Plant Line Value: CS8105
  misc_feature: MA Experiment 20000072 PARAMETER Experiment Name: At_100uM_ABA_Mutants_cDNA_P Parameter: Timepoint (hr) Value: 6
  misc_feature: MA Experiment 20000072 PARAMETER Experiment Name: At_100uM_ABA_Mutants_cDNA_P Parameter: Tissue Value: Aerial
  misc_feature: MA Experiment 20000072 PARAMETER Experiment Name: At_100uM_ABA_Mutants_cDNA_P Parameter: Treatment Value: 100uM ABA vs. No Treatment
  misc_feature: MA Experiment ID: 20000088 Result: Up-regulated in Transcription
  misc_feature: MA Experiment 20000088 PARAMETER Experiment Name: At_100uM_ABA_Mutants_cDNA_P Parameter: Plant Line Value: Landsberg
  misc_feature: MA Experiment 20000088 PARAMETER Experiment Name: At_100uM_ABA_Mutants_cDNA_P Parameter: Timepoint (hr) Value: 6
  misc_feature: MA Experiment 20000088 PARAMETER Experiment Name: At_100uM_ABA_Mutants_cDNA_P Parameter: Tissue Value: Aerial
  misc_feature: MA Experiment 20000088 PARAMETER Experiment Name: At_100uM_ABA_Mutants_cDNA_P Parameter: Treatment Value: 100uM ABA vs. No Treatment
  misc_feature: MA Experiment ID: 20000089 Result: Up-regulated in Transcription
  misc_feature: MA Experiment ID: 20000090 Result: Up-regulated in Transcription
  misc_feature: MA Experiment ID: 20000093 Result: Up-regulated in Transcription
  misc_feature: MA Experiment 20000093 PARAMETER Experiment Name: At_42deg_Heat_cDNA_P Parameter: Temperature (deg C) Value: 42 vs. 22
  misc_feature: MA Experiment 20000093 PARAMETER Experiment Name: At_42deg_Heat_cDNA_P Parameter: Timepoint (hr) Value: 0.5
  misc_feature: MA Experiment 20000093 PARAMETER Experiment Name: At_42deg_Heat_cDNA_P Parameter: Tissue Value: Aerial
  misc_feature: MA Experiment ID: 20000112 Result: Up-regulated in Transcription
  misc_feature: MA Experiment 20000112 PARAMETER Experiment Name: At_42deg_Heat_cDNA_P Parameter: Temperature (deg C) Value: 42 vs. 22
  misc_feature: MA Experiment 20000112 PARAMETER Experiment Name: At_42deg_Heat_cDNA_P Parameter: Timepoint (hr) Value: 2
  misc_feature: MA Experiment 20000112 PARAMETER Experiment Name: At_42deg_Heat_cDNA_P Parameter: Tissue Value: Aerial
  misc_feature: MA Experiment ID: 20000144 Result: Up-regulated in Transcription
  misc_feature: MA Experiment 20000144 PARAMETER Experiment Name: At_42deg_Heat_cDNA_P Parameter: Temperature (deg C) Value: 42 vs. 22
  misc_feature: MA Experiment 20000144 PARAMETER Experiment Name: At_42deg_Heat_cDNA_P Parameter: Timepoint (hr) Value: 1
  misc_feature: MA Experiment 20000144 PARAMETER Experiment Name: At_42deg_Heat_cDNA_P Parameter: Tissue Value: Aerial
  misc_feature: MA Experiment ID: 20000171 Result: Up-regulated in Transcription
  misc_feature: MA Experiment 20000171 PARAMETER Experiment Name: At_42deg_Heat_P Parameter: Age (day) Value: 14
  misc_feature: MA Experiment 20000171 PARAMETER Experiment Name: At_42deg_Heat_P Parameter: Organism Value: A. thaliana
  misc_feature: MA Experiment 20000171 PARAMETER Experiment Name: At_42deg_Heat_P Parameter: Plant Line Value: WS
  misc_feature: MA Experiment 20000171 PARAMETER Experiment Name: At_42deg_Heat_P Parameter: Temperature (deg C) Value: 42 vs. 22
  misc_feature: MA Experiment 20000171 PARAMETER Experiment Name: At_42deg_Heat_P Parameter: Timepoint (hr) Value: 1
  misc_feature: MA Experiment 20000171 PARAMETER Experiment Name: At_42deg_Heat_P Parameter: Tissue Value: Aerial
  misc_feature: MA Experiment ID: 20000180 Result: Down-regulated in Transcription
  misc_feature: MA Experiment 20000180 PARAMETER Experiment Name: At_Germinating_Seeds_P Parameter: Age (hr) Value: 24 vs. 0
  misc_feature: MA Experiment 20000180 PARAMETER Experiment Name: At_Germinating_Seeds_P Parameter: Tissue Value: Germinating Seeds
  misc_feature: MA Experiment ID: 20000184 Result: Down-regulated in Transcription
  misc_feature: MA Experiment 20000184 PARAMETER Experiment Name: At_Shoots__P Parameter: Age (day) Value: 7
  misc_feature: MA Experiment 20000184 PARAMETER Experiment Name: At_Shoots__P Parameter: Tissue Value: Shoots vs. Whole Plant
  misc_feature: MA Experiment ID: 20000214 Result: Down-regulated in Transcription
  misc_feature: MA Experiment 20000214 PARAMETER Experiment Name: At_4deg_Cold_P Parameter: Timepoint (hr) Value: 6
  misc_feature: MA Experiment ID: 20000227 Result: Down-regulated in Transcription
  misc_feature: MA Experiment 20000227 PARAMETER Experiment Name: At_Root-Tips-vs-Tops_P Parameter: Tissue Value: Root Tips vs. Root Tops
  misc_feature: MA Experiment ID: 20000234 Result: Down-regulated in Transcription
  misc_feature: MA Experiment 20000234 PARAMETER Experiment Name: At_Siliques_P Parameter: Age (day) Value: 21
  misc_feature: MA Experiment 20000234 PARAMETER Experiment Name: At_Siliques_P Parameter: Organism Value: A. thaliana
  misc_feature: MA Experiment 20000234 PARAMETER Experiment Name: At_Siliques_P Parameter: Plant Line Value: WS
  misc_feature: MA Experiment 20000234 PARAMETER Experiment Name: At_Siliques_P Parameter: Tissue Value: Less Than 5mm Siliques vs. Whole Plant
  misc_feature: MA Experiment ID: 20000437 Result: Up-regulated in Transcription
  misc_feature: MA Experiment 20000437 PARAMETER Experiment Name: At_Drought_P Parameter: Age (day) Value: 8
  misc_feature: MA Experiment 20000437 PARAMETER Experiment Name: At_Drought_P Parameter: Organism Value: A. thaliana
  misc_feature: MA Experiment 20000437 PARAMETER Experiment Name: At_Drought_P Parameter: Plant Line Value: WS
  misc_feature: MA Experiment 20000437 PARAMETER Experiment Name: At_Drought_P Parameter: Timepoint (hr) Value: 24
  misc_feature: MA Experiment 20000437 PARAMETER Experiment Name: At_Drought_P Parameter: Tissue Value: Whole Plant
  misc_feature: MA Experiment 20000437 PARAMETER Experiment Name: At_Drought_P Parameter: Treatment Value: Drought vs. No Drought
  misc_feature: MA Experiment ID: 20000438 Result: Down-regulated in Transcription
  misc_feature: MA Experiment 20000438 PARAMETER Experiment Name: At_Shoots__P Parameter: Age (day) Value: 14
  misc_feature: MA Experiment 20000438 PARAMETER Experiment Name: At_Shoots__P Parameter: Tissue Value: Shoots vs. Whole Plant
  misc_feature: MA Experiment ID: 20000452 Result: Down-regulated in Transcription
  misc_feature: MA Experiment 20000452 PARAMETER Experiment Name: At_CS6879_Shoots-Roots_P Parameter: Age (day) Value: 14
  misc_feature: MA Experiment 20000452 PARAMETER Experiment Name: At_CS6879_Shoots-Roots_P Parameter: Organism Value: A. thaliana
  misc_feature: MA Experiment 20000452 PARAMETER Experiment Name: At_CS6879_Shoots-Roots_P Parameter: Plant Line Value: CS6879 vs. WS
  misc_feature: MA Experiment 20000452 PARAMETER Experiment Name: At_CS6879_Shoots-Roots_P Parameter: Tissue Value: Shoots
  misc_feature: MA Experiment ID: 20001560 Result: Down-regulated in Transcription
  misc_feature: MA Experiment 20001560 PARAMETER Experiment Name: At_Drought_Soil_Dry_P Parameter: Age (day) Value: 28
  misc_feature: MA Experiment 20001560 PARAMETER Experiment Name: At_Drought_Soil_Dry_P Parameter: Organism Value: A. thaliana
  misc_feature: MA Experiment 20001560 PARAMETER Experiment Name: At_Drought_Soil_Dry_P Parameter: Plant Line Value: WS
  misc_feature: MA Experiment 20001560 PARAMETER Experiment Name: At_Drought_Soil_Dry_P Parameter: Post Timepoint (hr) Value: None
  misc_feature: MA Experiment 20001560 PARAMETER Experiment Name: At_Drought_Soil_Dry_P Parameter: Post-Treatment Value: None
  misc_feature: MA Experiment 20001560 PARAMETER Experiment Name: At_Drought_Soil_Dry_P Parameter: Timepoint (day) Value: 14
  misc_feature: MA Experiment 20001560 PARAMETER Experiment Name: At_Drought_Soil_Dry_P Parameter: Treatment Value: Drought vs. No Drought
attttattttctcgaatcttcttcttcttcctagattccagcgacttaacaacaacaacaacaacatattctctgctgggtattagattcgaatttctctttttgtgatcagaaatggatcgagctccggtgaccacaggaccgttggatatgccgattatgcacgacagtgatcgatatgacttcgttaaggatattggttctggtaatttcggtgttgctcgtcttatgagagataaactcactaaagagcttgttgctgtcaagtacatcgagagaggagacaagattgatgaaaatgttcaaagggagatcattaaccacaggtcactaaggcatcctaatattgtcagatttaaagaggtcattttgacgccgactcatctggctatcataatggaatatgcttctggcggtgaactttacgagcggatttgcaatgcaggacggtttagtgaagatgaggctcggttcttctttcagcagcttctatctggagtcagttattgtcatgcgatgcaaatttgccatcgtgacctgaagctagagaatacattgttggatggaagtcctgctcctcgattaaaaatttgtgattttggatattcaaagtcttctgttcttcattcacaaccaaagtcaactgttggtactcctgcatacatcgctccagaggtactgcttcgtcaggaatatgatggcaagattgcagatgtatggtcatgtggtgtgaccttatacgtcatgttggttggagcgtatccgttcgaagatccagaagagccaagagactatcggaaaacaatacagagaatccttagcgttaaatactcaatccctgatgacatacggatatcacctgaatgctgtcatcttatttcaagaatcttcgtggctgatcccgctaccagaataagcataccagagatcaaaacccatagttggttcttgaagaatctccctgctgatctaatgaacgagagcaacacaggaagccagttccaggagcctgaacaaccaatgcaaagccttgacacaatcatgcaaatcatctctgaagccacaattcccgctgttcgaaaccgttgcctagacgatttcatgactgacaatcttgatcttgacgatgacatggatgactttgactctgaatctgaaatcgacattgacagtagcggagagatagtttacgctctctaataaaaagccttttttaacaaccaaaacacttctctatctgttctaagaccagtagtgttctgatcctctggtttcaaattctaccaatttttgtattgtctctgtttgtttcttgttttcttcatgcacacatatatcatatatgtaatgtaaaatatcatctgtgtatatatattccaatgtcacacaaaagcaaattagcagttaaaacagttgaagcaagttgaggtc

SEQ ID NO: 22612 - protein, 361 aa, Arabidopsis thaliana
  peptide (1)..(361): Ceres Seq. ID no. 12396136
  misc_feature (22)..(278): Pfam Name: Protein kinase domain Pfam Description: Protein kinase domain
  misc_feature (20)..(361): Homolog of NCBI NO: 14588571 NR Description: protein kinase HvPKABA1 [Hordeum vulgare subsp.
  misc_feature (20)..(361): Homolog of NCBI NO: 34906840 NR Description: putative protein kinase HvPKABA1(Abcisic
  misc_feature (20)..(361): Homolog of NCBI NO: 29164823 NR Description: abcisic acid-inducible protein kinanase
  misc_feature (11)..(361): Homolog of NCBI NO: 6739629 NR Description: abscisic acid-activated protein kinase [Vicia
  misc_feature (1)..(361): Homolog of NCBI NO: 7446439 NR Description: probable serine/threonine-specific protein kinase
  misc_feature (1)..(361): Homolog of NCBI NO: 18418337 NR Description: protein kinase - like protein
  misc_feature (10)..(361): Homolog of NCBI NO: 21593534 NR Description: protein kinase SPK-2 [Arabidopsis thaliana]
  misc_feature (10)..(361): Homolog of NCBI NO: 15229772 NR Description: protein kinase SPK-2
  misc_feature (13)..(361): Homolog of NCBI NO: 20260398 NR Description: putative protein [Arabidopsis thaliana]
  misc_feature (1)..(361): Homolog of NCBI NO: 15240124 NR Description: protein kinase, 41K (EC 2.7.1.-) (pir||S71172)
MDRAPVTTGPLDMPIMHDSDRYDFVKDIGSGNFGVARLMRDKLTKELVAVKYIERGDKIDENVQREIINHRSLRHPNIVRFKEVILTPTHLAIIMEYASGGELYERICNAGRFSEDEARFFFQQLLSGVSYCHAMQICHRDLKLENTLLDGSPAPRLKICDFGYSKSSVLHSQPKSTVGTPAYIAPEVLLRQEYDGKIADVWSCGVTLYVMLVGAYPFEDPEEPRDYRKTIQRILSVKYSIPDDIRISPECCHLISRIFVADPATRISIPEIKTHSWFLKNLPADLMNESNTGSQFQEPEQPMQSLDTIMQIISEATIPAVRNRCLDDFMTDNLDLDDDMDDFDSESEIDIDSSGEIVYAL

SEQ ID NO: 22613 - protein, 349 aa, Arabidopsis thaliana
  peptide (1)..(349): Ceres Seq. ID no. 12396137
  misc_feature (10)..(266): Pfam Name: Protein kinase domain Pfam Description: Protein kinase domain
  misc_feature (8)..(349): Homolog of NCBI NO: 14588571 NR Description: protein kinase HvPKABA1 [Hordeum vulgare subsp.
  misc_feature (8)..(349): Homolog of NCBI NO: 34906840 NR Description: putative protein kinase HvPKABA1(Abcisic
  misc_feature (8)..(349): Homolog of NCBI NO: 29164823 NR Description: abcisic acid-inducible protein kinanase
  misc_feature (1)..(349): Homolog of NCBI NO: 6739629 NR Description: abscisic acid-activated protein kinase [Vicia
  misc_feature (1)..(349): Homolog of NCBI NO: 7446439 NR Description: probable serine/threonine-specific protein kinase
  misc_feature (1)..(349): Homolog of NCBI NO: 18418337 NR Description: protein kinase - like protein
  misc_feature (1)..(349): Homolog of NCBI NO: 21593534 NR Description: protein kinase SPK-2 [Arabidopsis thaliana]
  misc_feature (1)..(349): Homolog of NCBI NO: 15229772 NR Description: protein kinase SPK-2
  misc_feature (1)..(349): Homolog of NCBI NO: 20260398 NR Description: putative protein [Arabidopsis thaliana]
  misc_feature (1)..(349): Homolog of NCBI NO: 15240124 NR Description: protein kinase, 41K (EC 2.7.1.-) (pir||S71172)
MPIMHDSDRYDFVKDIGSGNFGVARLMRDKLTKELVAVKYIERGDKIDENVQREIINHRSLRHPNIVRFKEVILTPTHLAIIMEYASGGELYERICNAGRFSEDEARFFFQQLLSGVSYCHAMQICHRDLKLENTLLDGSPAPRLKICDFGYSKSSVLHSQPKSTVGTPAYIAPEVLLRQEYDGKIADVWSCGVTLYVMLVGAYPFEDPEEPRDYRKTIQRILSVKYSIPDDIRISPECCHLISRIFVADPATRISIPEIKTHSWFLKNLPADLMNESNTGSQFQEPEQPMQSLDTIMQIISEATIPAVRNRCLDDFMTDNLDLDDDMDDFDSESEIDIDSSGEIVYAL

SEQ ID NO: 22614 - protein, 346 aa, Arabidopsis thaliana
  peptide (1)..(346): Ceres Seq. ID no. 12396138
  misc_feature (7)..(263): Pfam Name: Protein kinase domain Pfam Description: Protein kinase domain
  misc_feature (5)..(346): Homolog of NCBI NO: 14588571 NR Description: protein kinase HvPKABA1 [Hordeum vulgare subsp.
  misc_feature (5)..(346): Homolog of NCBI NO: 34906840 NR Description: putative protein kinase HvPKABA1(Abcisic
  misc_feature (5)..(346): Homolog of NCBI NO: 29164823 NR Description: abcisic acid-inducible protein kinanase
  misc_feature (1)..(346): Homolog of NCBI NO: 6739629 NR Description: abscisic acid-activated protein kinase [Vicia
  misc_feature (1)..(346): Homolog of NCBI NO: 7446439 NR Description: probable serine/threonine-specific protein kinase
  misc_feature (1)..(346): Homolog of NCBI NO: 18418337 NR Description: protein kinase - like protein
  misc_feature (1)..(346): Homolog of NCBI NO: 21593534 NR Description: protein kinase SPK-2 [Arabidopsis thaliana]
  misc_feature (1)..(346): Homolog of NCBI NO: 15229772 NR Description: protein kinase SPK-2
  misc_feature (1)..(346): Homolog of NCBI NO: 20260398 NR Description: putative protein [Arabidopsis thaliana]
  misc_feature (1)..(346): Homolog of NCBI NO: 15240124 NR Description: protein kinase, 41K (EC 2.7.1.-) (pir||S71172)
MHDSDRYDFVKDIGSGNFGVARLMRDKLTKELVAVKYIERGDKIDENVQREIINHRSLRHPNIVRFKEVILTPTHLAIIMEYASGGELYERICNAGRFSEDEARFFFQQLLSGVSYCHAMQICHRDLKLENTLLDGSPAPRLKICDFGYSKSSVLHSQPKSTVGTPAYIAPEVLLRQEYDGKIADVWSCGVTLYVMLVGAYPFEDPEEPRDYRKTIQRILSVKYSIPDDIRISPECCHLISRIFVADPATRISIPEIKTHSWFLKNLPADLMNESNTGSQFQEPEQPMQSLDTIMQIISEATIPAVRNRCLDDFMTDNLDLDDDMDDFDSESEIDIDSSGEIVYAL

SEQ ID NO: 22615 - DNA, 1213 bp, Arabidopsis thaliana
  misc_feature (1)..(1213): Ceres Seq. ID no. 12334662
  misc_feature: MA Experiment ID: 20000184 Result: Down-regulated in Transcription
  misc_feature: MA Experiment 20000184 PARAMETER Experiment Name: At_Shoots__P Parameter: Age (day) Value: 7
  misc_feature: MA Experiment 20000184 PARAMETER Experiment Name: At_Shoots__P Parameter: Tissue Value: Shoots vs. Whole Plant
  misc_feature: MA Experiment ID: 20000234 Result: Down-regulated in Transcription
  misc_feature: MA Experiment 20000234 PARAMETER Experiment Name: At_Siliques_P Parameter: Age (day) Value: 21
  misc_feature: MA Experiment 20000234 PARAMETER Experiment Name: At_Siliques_P Parameter: Organism Value: A. thaliana
  misc_feature: MA Experiment 20000234 PARAMETER Experiment Name: At_Siliques_P Parameter: Plant Line Value: WS
  misc_feature: MA Experiment 20000234 PARAMETER Experiment Name: At_Siliques_P Parameter: Tissue Value: Less Than 5mm Siliques vs. Whole Plant
  misc_feature: MA Experiment ID: 20000264 Result: Down-regulated in Transcription
  misc_feature: MA Experiment 20000264 PARAMETER Experiment Name: At_Open_Flower_P Parameter: Age (day) Value: 21
  misc_feature: MA Experiment 20000264 PARAMETER Experiment Name: At_Open_Flower_P Parameter: Plant Line Value: WS
  misc_feature: MA Experiment 20000264 PARAMETER Experiment Name: At_Open_Flower_P Parameter: Tissue Value: Open Flower vs. Whole Plant
  misc_feature: MA Experiment ID: 20000265 Result: Down-regulated in Transcription
  misc_feature: MA Experiment 20000265 PARAMETER Experiment Name: At_Open_Flower_P Parameter: Age (day) Value: 21
  misc_feature: MA Experiment 20000265 PARAMETER Experiment Name: At_Open_Flower_P Parameter: Plant Line Value: WS
  misc_feature: MA Experiment 20000265 PARAMETER Experiment Name: At_Open_Flower_P Parameter: Tissue Value: Closed Flower vs. Whole Plant
  misc_feature: MA Experiment ID: 20000286 Result: Down-regulated in Transcription
  misc_feature: MA Experiment 20000286 PARAMETER Experiment Name: At_Open_Flower_P Parameter: Age (day) Value: 21
  misc_feature: MA Experiment 20000286 PARAMETER Experiment Name: At_Open_Flower_P Parameter: Plant Line Value: WS
  misc_feature: MA Experiment 20000286 PARAMETER Experiment Name: At_Open_Flower_P Parameter: Tissue Value: Half Open vs. Whole Plant
  misc_feature: MA Experiment ID: 20001248 Result: Up-regulated in Transcription
  misc_feature: MA Experiment 20001248 PARAMETER Experiment Name: At_Far-red-induction_P Parameter: Age (day) Value: 7
  misc_feature: MA Experiment 20001248 PARAMETER Experiment Name: At_Far-red-induction_P Parameter: Light Value: Far-red vs. White
  misc_feature: MA Experiment 20001248 PARAMETER Experiment Name: At_Far-red-induction_P Parameter: Organism Value: A. thaliana
  misc_feature: MA Experiment 20001248 PARAMETER Experiment Name: At_Far-red-induction_P Parameter: Plant Line Value: Columbia
  misc_feature: MA Experiment 20001248 PARAMETER Experiment Name: At_Far-red-induction_P Parameter: Timepoint (hr) Value: 4
  misc_feature: MA Experiment 20001248 PARAMETER Experiment Name: At_Far-red-induction_P Parameter: Tissue Value: Whole Plant
  misc_feature: MA Experiment ID: 20001450 Result: Up-regulated in Transcription
  misc_feature: MA Experiment 20001450 PARAMETER Experiment Name: At_Far-red-induction_P Parameter: Age (day) Value: 7
  misc_feature: MA Experiment 20001450 PARAMETER Experiment Name: At_Far-red-induction_P Parameter: Light Value: Far-red vs. White
  misc_feature: MA Experiment 20001450 PARAMETER Experiment Name: At_Far-red-induction_P Parameter: Organism Value: A. thaliana
  misc_feature: MA Experiment 20001450 PARAMETER Experiment Name: At_Far-red-induction_P Parameter: Plant Line Value: Columbia
  misc_feature: MA Experiment 20001450 PARAMETER Experiment Name: At_Far-red-induction_P Parameter: Timepoint (hr) Value: 8
  misc_feature: MA Experiment 20001450 PARAMETER Experiment Name: At_Far-red-induction_P Parameter: Tissue Value: Whole Plant
  misc_feature: MA Experiment ID: 20001451 Result: Up-regulated in Transcription
  misc_feature: MA Experiment 20001451 PARAMETER Experiment Name: At_Far-red-induction_P Parameter: Age (day) Value: 7
  misc_feature: MA Experiment 20001451 PARAMETER Experiment Name: At_Far-red-induction_P Parameter: Light Value: Far-red vs. White
  misc_feature: MA Experiment 20001451 PARAMETER Experiment Name: At_Far-red-induction_P Parameter: Organism Value: A. thaliana
  misc_feature: MA Experiment 20001451 PARAMETER Experiment Name: At_Far-red-induction_P Parameter: Plant Line Value: Columbia
  misc_feature: MA Experiment 20001451 PARAMETER Experiment Name: At_Far-red-induction_P Parameter: Timepoint (hr) Value: 24
  misc_feature: MA Experiment 20001451 PARAMETER Experiment Name: At_Far-red-induction_P Parameter: Tissue Value: Whole Plant
  misc_feature: MA Experiment ID: 20001556 Result: Down-regulated in Transcription
  misc_feature: MA Experiment 20001556 PARAMETER Experiment Name: At_Drought_Soil_Dry_P Parameter: Age (day) Value: 26
  misc_feature: MA Experiment 20001556 PARAMETER Experiment Name: At_Drought_Soil_Dry_P Parameter: Organism Value: A. thaliana
  misc_feature: MA Experiment 20001556 PARAMETER Experiment Name: At_Drought_Soil_Dry_P Parameter: Plant Line Value: WS
  misc_feature: MA Experiment 20001556 PARAMETER Experiment Name: At_Drought_Soil_Dry_P Parameter: Post Timepoint (hr) Value: None
  misc_feature: MA Experiment 20001556 PARAMETER Experiment Name: At_Drought_Soil_Dry_P Parameter: Post-Treatment Value: None
  misc_feature: MA Experiment 20001556 PARAMETER Experiment Name: At_Drought_Soil_Dry_P Parameter: Timepoint (day) Value: 12
  misc_feature: MA Experiment 20001556 PARAMETER Experiment Name: At_Drought_Soil_Dry_P Parameter: Treatment Value: Drought vs. No Drought
  misc_feature: MA Experiment ID: 20001557 Result: Down-regulated in Transcription
  misc_feature: MA Experiment 20001557 PARAMETER Experiment Name: At_Drought_Soil_Dry_P Parameter: Age (day) Value: 27
  misc_feature: MA Experiment 20001557 PARAMETER Experiment Name: At_Drought_Soil_Dry_P Parameter: Organism Value: A. thaliana
  misc_feature: MA Experiment 20001557 PARAMETER Experiment Name: At_Drought_Soil_Dry_P Parameter: Plant Line Value: WS
  misc_feature: MA Experiment 20001557 PARAMETER Experiment Name: At_Drought_Soil_Dry_P Parameter: Post Timepoint (hr) Value: 3
  misc_feature: MA Experiment 20001557 PARAMETER Experiment Name: At_Drought_Soil_Dry_P Parameter: Post-Treatment Value: Re-Water vs. No Drought
  misc_feature: MA Experiment 20001557 PARAMETER Experiment Name: At_Drought_Soil_Dry_P Parameter: Timepoint (day) Value: 13
  misc_feature: MA Experiment 20001557 PARAMETER Experiment Name: At_Drought_Soil_Dry_P Parameter: Treatment Value: Drought vs. No Drought
  misc_feature: MA Experiment ID: 20001558 Result: Down-regulated in Transcription
  misc_feature: MA Experiment 20001558 PARAMETER Experiment Name: At_Drought_Soil_Dry_P Parameter: Age (day) Value: 27
  misc_feature: MA Experiment 20001558 PARAMETER Experiment Name: At_Drought_Soil_Dry_P Parameter: Organism Value: A. thaliana
  misc_feature: MA Experiment 20001558 PARAMETER Experiment Name: At_Drought_Soil_Dry_P Parameter: Plant Line Value: WS
  misc_feature: MA Experiment 20001558 PARAMETER Experiment Name: At_Drought_Soil_Dry_P Parameter: Post Timepoint (hr) Value: 6
  misc_feature: MA Experiment 20001558 PARAMETER Experiment Name: At_Drought_Soil_Dry_P Parameter: Post-Treatment Value: Re-Water vs. No Drought
  misc_feature: MA Experiment 20001558 PARAMETER Experiment Name: At_Drought_Soil_Dry_P Parameter: Timepoint (day) Value: 13
  misc_feature: MA Experiment 20001558 PARAMETER Experiment Name: At_Drought_Soil_Dry_P Parameter: Treatment Value: Drought vs. No Drought
  misc_feature: MA Experiment ID: 20001560 Result: Down-regulated in Transcription
  misc_feature: MA Experiment 20001560 PARAMETER Experiment Name: At_Drought_Soil_Dry_P Parameter: Age (day) Value: 28
  misc_feature: MA Experiment 20001560 PARAMETER Experiment Name: At_Drought_Soil_Dry_P Parameter: Organism Value: A. thaliana
  misc_feature: MA Experiment 20001560 PARAMETER Experiment Name: At_Drought_Soil_Dry_P Parameter: Plant Line Value: WS
  misc_feature: MA Experiment 20001560 PARAMETER Experiment Name: At_Drought_Soil_Dry_P Parameter: Post Timepoint (hr) Value: None
  misc_feature: MA Experiment 20001560 PARAMETER Experiment Name: At_Drought_Soil_Dry_P Parameter: Post-Treatment Value: None
  misc_feature: MA Experiment 20001560 PARAMETER Experiment Name: At_Drought_Soil_Dry_P Parameter: Timepoint (day) Value: 14
  misc_feature: MA Experiment 20001560 PARAMETER Experiment Name: At_Drought_Soil_Dry_P Parameter: Treatment Value: Drought vs. No Drought
atccacttctctctcaccatctcacgtccgatctctcctctctgagctctcatcacgagtcaacccctttctccgtcgaaattcgcatgcttaaactctgagagaagaagatgactatgacggaggagaaaccaacttccgacggcaaaggaggttggggtttcttcaagattccatttcgtaactcaagcggtcacagaaacgccgcttcaagtgctgctacttctccgtttccatctggagcttcttcttcttctacttcttctcatctacataaccatcatcaacatcatcatcaacatcaccatcagcaccatcatcagcttggttataacggtcctcacggtgatggatcgggtcaaaatcaacatccgactccttctccttcagtttcatctgttgctaagtcttttcttcctactaaacgaagattgaagcttgatccttctgagaaactctattttccttatgagcctgggaagcaagttaggagtgctattaagattaaaaatacaagcaaatcacatgtagccttcaagtttcaaacaactgcgccgaagagttgctttatgcgtccacctggtgctattcttgctcctggagagactattattgctactgtgtttaaatttgttgagcctcctgagaataatgagaagccaatggatcaaaggagcagagtgaagtttaaaatcatgagcctgaaggtgaaaggtccaatggactatgtgcctgagctgttcgatgagcaaaaggatgatgtctctaaggagcaaatattgcgtgtgattttcttggatcctgagcgctccaaccctgcattggaaaaactgaagcgtcaattagcagaagcggatgcagcggtggaggcacgaaagaaacctccagaggaaacaggtccaaagatgattggagaagggcttgtgatcgatgaatggaaggagcgtagagagagatatcttgcacagcaacaaggcgaaggagctgactctgtctgagagactaaaagagttttctcaggacaaaaacaagtgcgcttgtgaagatgaagaagaagggaccgctatattgaatttatatgctaacttctagattcatgatgcaatatataaggatcatgctggtaaaaaaaaaagacaatgaaggaaacttttttcatgtaaaaaagaaatgtaaacttgggtttgatgataatgaattgttcatgttaagg

SEQ ID NO: 22616 - protein, 295 aa, Arabidopsis thaliana
  peptide (1)..(295): Ceres Seq. ID no. 12334663
  misc_feature (1)..(72): Pfam Name: 7 transmembrane receptor (rhodopsin family) Pfam Description: 7 transmembrane receptor (rhodopsin family)
  misc_feature (34)..(294): Homolog of NCBI NO: 25365874 NR Description: hypothetical protein AT4g05060 [imported] -
  misc_feature (67)..(295): Homolog of NCBI NO: 1800147 NR Description: membrane associated protein [Arabidopsis thaliana]
  misc_feature (67)..(276): Homolog of NCBI NO: 8809582 NR Description: membrane associated protein [Arabidopsis thaliana]
  misc_feature (67)..(295): Homolog of NCBI NO: 18423592 NR Description: membrane associated protein
  misc_feature (37)..(295): Homolog of NCBI NO: 34394013 NR Description: putative 27k vesicle-associated membrane
  misc_feature (1)..(120): Homolog of NCBI NO: 25365874 NR Description: hypothetical protein AT4g05060 [imported] -
  misc_feature (1)..(294): Homolog of NCBI NO: 21593103 NR Description: membrane associated protein-like protein
  misc_feature (1)..(294): Homolog of NCBI NO: 18412787 NR Description: contains similarity to Arabidopsis thaliana
  misc_feature (1)..(295): Homolog of NCBI NO: 7485721 NR Description: hypothetical protein F18E5.70 - Arabidopsis
  misc_feature (1)..(295): Homolog of NCBI NO: 18415696 NR Description: putative membrane associated protein
MTMTEEKPTSDGKGGWGFFKIPFRNSSGHRNAASSAATSPFPSGASSSSTSSHLHNHHQHHHQHHHQHHHQLGYNGPHGDGSGQNQHPTPSPSVSSVAKSFLPTKRRLKLDPSEKLYFPYEPGKQVRSAIKIKNTSKSHVAFKFQTTAPKSCFMRPPGAILAPGETIIATVFKFVEPPENNEKPMDQRSRVKFKIMSLKVKGPMDYVPELFDEQKDDVSKEQILRVIFLDPERSNPALEKLKRQLAEADAAVEARKKPPEETGPKMIGEGLVIDEWKERRERYLAQQQGEGADSV

SEQ ID NO: 22617 - protein, 293 aa, Arabidopsis thaliana
  peptide (1)..(293): Ceres Seq. ID no. 12334664
  misc_feature (1)..(70): Pfam Name: 7 transmembrane receptor (rhodopsin family) Pfam Description: 7 transmembrane receptor (rhodopsin family)
  misc_feature (1)..(118): Homolog of NCBI NO: 25365874 NR Description: hypothetical protein AT4g05060 [imported] -
  misc_feature (32)..(292): Homolog of NCBI NO: 25365874 NR Description: hypothetical protein AT4g05060 [imported] -
  misc_feature (65)..(293): Homolog of NCBI NO: 1800147 NR Description: membrane associated protein [Arabidopsis thaliana]
  misc_feature (65)..(274): Homolog of NCBI NO: 8809582 NR Description: membrane associated protein [Arabidopsis thaliana]
  misc_feature (65)..(293): Homolog of NCBI NO: 18423592 NR Description: membrane associated protein
  misc_feature (35)..(293): Homolog of NCBI NO: 34394013 NR Description: putative 27k vesicle-associated membrane
  misc_feature (1)..(292): Homolog of NCBI NO: 21593103 NR Description: membrane associated protein-like protein
  misc_feature (1)..(292): Homolog of NCBI NO: 18412787 NR Description: contains similarity to Arabidopsis thaliana
  misc_feature (1)..(293): Homolog of NCBI NO: 7485721 NR Description: hypothetical protein F18E5.70 - Arabidopsis
  misc_feature (1)..(293): Homolog of NCBI NO: 18415696 NR Description: putative membrane associated protein
MTEEKPTSDGKGGWGFFKIPFRNSSGHRNAASSAATSPFPSGASSSSTSSHLHNHHQHHHQHHHQHHHQLGYNGPHGDGSGQNQHPTPSPSVSSVAKSFLPTKRRLKLDPSEKLYFPYEPGKQVRSAIKIKNTSKSHVAFKFQTTAPKSCFMRPPGAILAPGETIIATVFKFVEPPENNEKPMDQRSRVKFKIMSLKVKGPMDYVPELFDEQKDDVSKEQILRVIFLDPERSNPALEKLKRQLAEADAAVEARKKPPEETGPKMIGEGLVIDEWKERRERYLAQQQGEGADSV

SEQ ID NO: 22618 - DNA, 1276 bp, Arabidopsis thaliana
  misc_feature (1)..(1276): Ceres Seq. ID no. 13492437
  misc_feature: MA Experiment ID: 108434 Result: Down-regulated in Transcription
  misc_feature: MA Experiment 108434 PARAMETER Experiment Name: At_Root_Tips_cDNA_P Parameter: Tissue Value: Root Tips
  misc_feature: MA Experiment ID: 108435 Result: Down-regulated in Transcription
  misc_feature: MA Experiment 108435 PARAMETER Experiment Name: At_stm_Mutants_cDNA_P Parameter: Plant Line Value: wt Landsburg vs stm
  misc_feature: MA Experiment 108435 PARAMETER Experiment Name: At_stm_Mutants_cDNA_P Parameter: Tissue Value: Shoot Apical Meristem Region
  misc_feature: MA Experiment ID: 108462 Result: Up-regulated in Transcription
  misc_feature: MA Experiment 108462 PARAMETER Experiment Name: At_Germinating_Seeds_cDNA_P Parameter: Age (day) Value: 2 vs. 0
  misc_feature: MA Experiment 108462 PARAMETER Experiment Name: At_Germinating_Seeds_cDNA_P Parameter: Tissue Value: Germinating Seeds
  misc_feature: MA Experiment ID: 108463 Result: Up-regulated in Transcription
  misc_feature: MA Experiment 108463 PARAMETER Experiment Name: At_Germinating_Seeds_cDNA_P Parameter: Age (day) Value: 3 vs. 0
  misc_feature: MA Experiment 108463 PARAMETER Experiment Name: At_Germinating_Seeds_cDNA_P Parameter: Tissue Value: Germinating Seeds
  misc_feature: MA Experiment ID: 108464 Result: Up-regulated in Transcription
  misc_feature: MA Experiment 108464 PARAMETER Experiment Name: At_Germinating_Seeds_cDNA_P Parameter: Age (day) Value: 4 vs. 0
  misc_feature: MA Experiment 108464 PARAMETER Experiment Name: At_Germinating_Seeds_cDNA_P Parameter: Tissue Value: Germinating Seeds
  misc_feature: MA Experiment ID: 108469 Result: Down-regulated in Transcription
  misc_feature: MA Experiment ID: 108488 Result: Up-regulated in Transcription
  misc_feature: MA Experiment ID: 108501 Result: Down-regulated in Transcription
  misc_feature: MA Experiment 108501 PARAMETER Experiment Name: At_ap2_floral_buds_cDNA_P Parameter: Plant Line Value: ap2 (Ler.)
  misc_feature: MA Experiment 108501 PARAMETER Experiment Name: At_ap2_floral_buds_cDNA_P Parameter: Tissue Value: Closed Flower
  misc_feature: MA Experiment ID: 108569 Result: Up-regulated in Transcription
  misc_feature: MA Experiment 108569 PARAMETER Experiment Name: At_0.001%_MeJA__cDNA_P Parameter: Timepoint (hr) Value: 6
  misc_feature: MA Experiment 108569 PARAMETER Experiment Name: At_0.001%_MeJA__cDNA_P Parameter: Tissue Value: Aerial
  misc_feature: MA Experiment 108569 PARAMETER Experiment Name: At_0.001%_MeJA__cDNA_P Parameter: Treatment Value: 0.001% MeJA vs. No Treatment
  misc_feature: MA Experiment ID: 108574 Result: Up-regulated in Transcription
  misc_feature: MA Experiment 108574 PARAMETER Experiment Name: At_Wounding__cDNA_P Parameter: Timepoint (hr) Value: 1
  misc_feature: MA Experiment 108574 PARAMETER Experiment Name: At_Wounding__cDNA_P Parameter: Tissue Value: Aerial
  misc_feature: MA Experiment 108574 PARAMETER Experiment Name: At_Wounding__cDNA_P Parameter: Treatment Value: Wounding vs. No Wounding
  misc_feature: MA Experiment ID: 108579 Result: Up-regulated in Transcription
  misc_feature: MA Experiment 108579 PARAMETER Experiment Name: At_4deg_Cold_cDNA_P Parameter: Temperature (deg C) Value: 4 vs. 22
  misc_feature: MA Experiment 108579 PARAMETER Experiment Name: At_4deg_Cold_cDNA_P Parameter: Timepoint (hr) Value: 6
  misc_feature: MA Experiment 108579 PARAMETER Experiment Name: At_4deg_Cold_cDNA_P Parameter: Tissue Value: Aerial
  misc_feature: MA Experiment ID: 108595 Result: Down-regulated in Transcription
  misc_feature: MA Experiment 108595 PARAMETER Experiment Name: At_Ler-pi_Ovule_cDNA_P Parameter: Plant Line Value: null
  misc_feature: MA Experiment ID: 108607 Result: Up-regulated in Transcription
  misc_feature: MA Experiment 108607 PARAMETER Experiment Name: At_100uM_ABA_cDNA_P Parameter: Timepoint (hr) Value: 4
  misc_feature: MA Experiment 108607 PARAMETER Experiment Name: At_100uM_ABA_cDNA_P Parameter: Tissue Value: Aerial
  misc_feature: MA Experiment 108607 PARAMETER Experiment Name: At_100uM_ABA_cDNA_P Parameter: Treatment Value: 100uM ABA vs. No Treatment
  misc_feature: MA Experiment ID: 20000089 Result: Down-regulated in Transcription
  misc_feature: MA Experiment ID: 20000090 Result: Down-regulated in Transcription
  misc_feature: MA Experiment ID: 20000169 Result: Up-regulated in Transcription
  misc_feature: MA Experiment 20000169 PARAMETER Experiment Name: At_100uM_ABA_P Parameter: Age (day) Value: 14
  misc_feature: MA Experiment 20000169 PARAMETER Experiment Name: At_100uM_ABA_P Parameter: Organism Value: A. thaliana
  misc_feature: MA Experiment 20000169 PARAMETER Experiment Name: At_100uM_ABA_P Parameter: Plant Line Value: WS
  misc_feature: MA Experiment 20000169 PARAMETER Experiment Name: At_100uM_ABA_P Parameter: Timepoint (hr) Value: 6
  misc_feature: MA Experiment 20000169 PARAMETER Experiment Name: At_100uM_ABA_P Parameter: Tissue Value: Aerial
  misc_feature: MA Experiment 20000169 PARAMETER Experiment Name: At_100uM_ABA_P Parameter: Treatment Value: 100uM ABA vs. No Treatment
  misc_feature: MA Experiment ID: 20000184 Result: Up-regulated in Transcription
  misc_feature: MA Experiment 20000184 PARAMETER Experiment Name: At_Shoots__P Parameter: Age (day) Value: 7
  misc_feature: MA Experiment 20000184 PARAMETER Experiment Name: At_Shoots__P Parameter: Tissue Value: Shoots vs. Whole Plant
  misc_feature: MA Experiment ID: 20000185 Result: Down-regulated in Transcription
  misc_feature: MA Experiment 20000185 PARAMETER Experiment Name: At_Roots__P Parameter: Age (day) Value: 7 vs. 21
  misc_feature: MA Experiment 20000185 PARAMETER Experiment Name: At_Roots__P Parameter: Organism Value: A. thaliana
  misc_feature: MA Experiment 20000185 PARAMETER Experiment Name: At_Roots__P Parameter: Tissue Value: Roots vs. Whole Plant
  misc_feature: MA Experiment ID: 20000211 Result: Up-regulated in Transcription
  misc_feature: MA Experiment 20000211 PARAMETER Experiment Name: At_0.001percent_MeJA__P Parameter: Age (day) Value: 14
  misc_feature: MA Experiment 20000211 PARAMETER Experiment Name: At_0.001percent_MeJA__P Parameter: Organism Value: A. thaliana
  misc_feature: MA Experiment 20000211 PARAMETER Experiment Name: At_0.001percent_MeJA__P Parameter: Plant Line Value: WS
  misc_feature: MA Experiment 20000211 PARAMETER Experiment Name: At_0.001percent_MeJA__P Parameter: Timepoint (hr) Value: 1
  misc_feature: MA Experiment 20000211 PARAMETER Experiment Name: At_0.001percent_MeJA__P Parameter: Tissue Value: Aerial
  misc_feature: MA Experiment 20000211 PARAMETER Experiment Name: At_0.001percent_MeJA__P Parameter: Treatment Value: 0.001percent MeJA vs. No Treatment
  misc_feature: MA Experiment ID: 20000224 Result: Up-regulated in Transcription
  misc_feature: MA Experiment ID: 20000308 Result: Up-regulated in Transcription
  misc_feature: MA Experiment 20000308 PARAMETER Experiment Name: At_100mM_NaCl__P Parameter: Age (day) Value: 17
  misc_feature: MA Experiment 20000308 PARAMETER Experiment Name: At_100mM_NaCl__P Parameter: Organism Value: A. thaliana
  misc_feature: MA Experiment 20000308 PARAMETER Experiment Name: At_100mM_NaCl__P Parameter: Plant Line Value: WS
  misc_feature: MA Experiment 20000308 PARAMETER Experiment Name: At_100mM_NaCl__P Parameter: Timepoint (hr) Value: 72
  misc_feature: MA Experiment 20000308 PARAMETER Experiment Name: At_100mM_NaCl__P Parameter: Tissue Value: Whole Plant
  misc_feature: MA Experiment 20000308 PARAMETER Experiment Name: At_100mM_NaCl__P Parameter: Treatment Value: 100mM NaCl vs. No Treatment
  misc_feature: MA Experiment ID: 20000437 Result: Down-regulated in Transcription
  misc_feature: MA Experiment 20000437 PARAMETER Experiment Name: At_Drought_P Parameter: Age (day) Value: 8
  misc_feature: MA Experiment 20000437 PARAMETER Experiment Name: At_Drought_P Parameter: Organism Value: A. thaliana
  misc_feature: MA Experiment 20000437 PARAMETER Experiment Name: At_Drought_P Parameter: Plant Line Value: WS
  misc_feature: MA Experiment 20000437 PARAMETER Experiment Name: At_Drought_P Parameter: Timepoint (hr) Value: 24
  misc_feature: MA Experiment 20000437 PARAMETER Experiment Name: At_Drought_P Parameter: Tissue Value: Whole Plant
  misc_feature: MA Experiment 20000437 PARAMETER Experiment Name: At_Drought_P Parameter: Treatment Value: Drought vs. No Drought
  misc_feature: MA Experiment ID: 20000439 Result: Down-regulated in Transcription
  misc_feature: MA Experiment 20000439 PARAMETER Experiment Name: At_Roots__P Parameter: Age (day) Value: 14 vs. 21
  misc_feature: MA Experiment 20000439 PARAMETER Experiment Name: At_Roots__P Parameter: Organism Value: A. thaliana
  misc_feature: MA Experiment 20000439 PARAMETER Experiment Name: At_Roots__P Parameter: Tissue Value: Roots vs. Whole Plant
  misc_feature: MA Experiment ID: 20000452 Result: Up-regulated in Transcription
  misc_feature: MA Experiment 20000452 PARAMETER Experiment Name: At_CS6879_Shoots-Roots_P Parameter: Age (day) Value: 14
  misc_feature: MA Experiment 20000452 PARAMETER Experiment Name: At_CS6879_Shoots-Roots_P Parameter: Organism Value: A. thaliana
  misc_feature: MA Experiment 20000452 PARAMETER Experiment Name: At_CS6879_Shoots-Roots_P Parameter: Plant Line Value: CS6879 vs. WS
  misc_feature: MA Experiment 20000452 PARAMETER Experiment Name: At_CS6879_Shoots-Roots_P Parameter: Tissue Value: Shoots
  misc_feature: MA Experiment ID: 20000495 Result: Down-regulated in Transcription
  misc_feature: MA Experiment 20000495 PARAMETER Experiment Name: At_Guard_Cells_P Parameter: Harvest Date Value: 8/2/2002
  misc_feature: MA Experiment 20000495 PARAMETER Experiment Name: At_Guard_Cells_P Parameter: Organism Value: A. thaliana
  misc_feature: MA Experiment 20000495 PARAMETER Experiment Name: At_Guard_Cells_P Parameter: Tissue Value: Guard Cells vs. Leaves
  misc_feature: MA Experiment ID: 20000506 Result: Up-regulated in Transcription
  misc_feature: MA Experiment 20000506 PARAMETER Experiment Name: At_Wounding_P Parameter: Organism Value: A. thaliana
  misc_feature: MA Experiment 20000506 PARAMETER Experiment Name: At_Wounding_P Parameter: Plant Line Value: WS
  misc_feature: MA Experiment 20000506 PARAMETER Experiment Name: At_Wounding_P Parameter: Timepoint (hr) Value: 6
  misc_feature: MA Experiment 20000506 PARAMETER Experiment Name: At_Wounding_P Parameter: Tissue Value: Aerial
  misc_feature: MA Experiment 20000506 PARAMETER Experiment Name: At_Wounding_P Parameter: Treatment Value: Wounding vs. No Wounding
  misc_feature: MA Experiment ID: 20000527 Result: Down-regulated in Transcription
  misc_feature: MA Experiment 20000527 PARAMETER Experiment Name: At_10percent_PEG_P Parameter: Age (day) Value: 20
  misc_feature: MA Experiment 20000527 PARAMETER Experiment Name: At_10percent_PEG_P Parameter: Organism Value: A. thaliana
  misc_feature: MA Experiment 20000527 PARAMETER Experiment Name: At_10percent_PEG_P Parameter: Plant Line Value: WS
  misc_feature: MA Experiment 20000527 PARAMETER Experiment Name: At_10percent_PEG_P Parameter: Timepoint (day) Value: 20
  misc_feature: MA Experiment 20000527 PARAMETER Experiment Name: At_10percent_PEG_P Parameter: Tissue Value: Whole Plant
  misc_feature: MA Experiment 20000527 PARAMETER Experiment Name: At_10percent_PEG_P Parameter: Treatment Value: 10percent PEG vs. No Treatment
  misc_feature: MA Experiment ID: 20000606 Result: Down-regulated in Transcription
  misc_feature: MA Experiment 20000606 PARAMETER Experiment Name: At_CS8548_Mutant_P Parameter: Age (day) Value: 14
  misc_feature: MA Experiment 20000606 PARAMETER Experiment Name: At_CS8548_Mutant_P Parameter: Plant Line Value: CS8548 vs. wt
  misc_feature: MA Experiment 20000606 PARAMETER Experiment Name: At_CS8548_Mutant_P Parameter: Tissue Value: Whole Plant
  misc_feature: MA Experiment ID: 20000709 Result: Down-regulated in Transcription
  misc_feature: MA Experiment 20000709 PARAMETER Experiment Name: At_15mM_NH4NO3_L-to-H_P Parameter: Age (hr) Value: 14
  misc_feature: MA Experiment 20000709 PARAMETER Experiment Name: At_15mM_NH4NO3_L-to-H_P Parameter: Organism Value: A. thaliana
  misc_feature: MA Experiment 20000709 PARAMETER Experiment Name: At_15mM_NH4NO3_L-to-H_P Parameter: Plant Line Value: WS
  misc_feature: MA Experiment 20000709 PARAMETER Experiment Name: At_15mM_NH4NO3_L-to-H_P Parameter: Timepoint (hr) Value: 4
  misc_feature: MA Experiment 20000709 PARAMETER Experiment Name: At_15mM_NH4NO3_L-to-H_P Parameter: Tissue Value: Aerial
  misc_feature: MA Experiment 20000709 PARAMETER Experiment Name: At_15mM_NH4NO3_L-to-H_P Parameter: Treatment Value: 15mM NH4NO3 vs. 30mM Mannitol
  misc_feature: MA Experiment ID: 20000794 Result: Down-regulated in Transcription
  misc_feature: MA Experiment 20000794 PARAMETER Experiment Name: At_Petals_P Parameter: Age (day) Value: 23-25 days
  misc_feature: MA Experiment 20000794 PARAMETER Experiment Name: At_Petals_P Parameter: Plant Line Value: WS
  misc_feature: MA Experiment 20000794 PARAMETER Experiment Name: At_Petals_P Parameter: Tissue Value: Petals vs. Whole plant
  misc_feature: MA Experiment ID: 20001248 Result: Down-regulated in Transcription
  misc_feature: MA Experiment 20001248 PARAMETER Experiment Name: At_Far-red-induction_P Parameter: Age (day) Value: 7
  misc_feature: MA Experiment 20001248 PARAMETER Experiment Name: At_Far-red-induction_P Parameter: Light Value: Far-red vs. White
  misc_feature: MA Experiment 20001248 PARAMETER Experiment Name: At_Far-red-induction_P Parameter: Organism Value: A. thaliana
  misc_feature: MA Experiment 20001248 PARAMETER Experiment Name: At_Far-red-induction_P Parameter: Plant Line Value: Columbia
  misc_feature: MA Experiment 20001248 PARAMETER Experiment Name: At_Far-red-induction_P Parameter: Timepoint (hr) Value: 4
  misc_feature: MA Experiment 20001248 PARAMETER Experiment Name: At_Far-red-induction_P Parameter: Tissue Value: Whole Plant
  misc_feature: MA Experiment ID: 20001450 Result: Down-regulated in Transcription
  misc_feature: MA Experiment 20001450 PARAMETER Experiment Name: At_Far-red-induction_P Parameter: Age (day) Value: 7
  misc_feature: MA Experiment 20001450 PARAMETER Experiment Name: At_Far-red-induction_P Parameter: Light Value: Far-red vs. White
  misc_feature: MA Experiment 20001450 PARAMETER Experiment Name: At_Far-red-induction_P Parameter: Organism Value: A. thaliana
  misc_feature: MA Experiment 20001450 PARAMETER Experiment Name: At_Far-red-induction_P Parameter: Plant Line Value: Columbia
  misc_feature: MA Experiment 20001450 PARAMETER Experiment Name: At_Far-red-induction_P Parameter: Timepoint (hr) Value: 8
  misc_feature: MA Experiment 20001450 PARAMETER Experiment Name: At_Far-red-induction_P Parameter: Tissue Value: Whole Plant
  misc_feature: MA Experiment ID: 20001904 Result: Down-regulated in Transcription
  misc_feature: MA Experiment 20001904 PARAMETER Experiment Name: At_Drought_Reproduction_P Parameter: Age (day) Value: 37
  misc_feature: MA Experiment 20001904 PARAMETER Experiment Name: At_Drought_Reproduction_P Parameter: Organism Value: A. thaliana
  misc_feature: MA Experiment 20001904 PARAMETER Experiment Name: At_Drought_Reproduction_P Parameter: Plant Line Value: WS
  misc_feature: MA Experiment 20001904 PARAMETER Experiment Name: At_Drought_Reproduction_P Parameter: Timepoint (day) Value: 7
  misc_feature: MA Experiment 20001904 PARAMETER Experiment Name: At_Drought_Reproduction_P Parameter: Tissue Value: Rosettes
  misc_feature: MA Experiment 20001904 PARAMETER Experiment Name: At_Drought_Reproduction_P Parameter: Treatment Value: Drought vs. No Drought
  misc_feature: MA Experiment ID: 20001905 Result: Down-regulated in Transcription
  misc_feature: MA Experiment 20001905 PARAMETER Experiment Name: At_Drought_Reproduction_P Parameter: Age (day) Value: 40
  misc_feature: MA Experiment 20001905 PARAMETER Experiment Name: At_Drought_Reproduction_P Parameter: Organism Value: A. thaliana
  misc_feature: MA Experiment 20001905 PARAMETER Experiment Name: At_Drought_Reproduction_P Parameter: Plant Line Value: WS
  misc_feature: MA Experiment 20001905 PARAMETER Experiment Name: At_Drought_Reproduction_P Parameter: Timepoint (day) Value: 10
  misc_feature: MA Experiment 20001905 PARAMETER Experiment Name: At_Drought_Reproduction_P Parameter: Tissue Value: Rosettes
  misc_feature: MA Experiment 20001905 PARAMETER Experiment Name: At_Drought_Reproduction_P Parameter: Treatment Value: Drought vs. No Drought
  misc_feature: MA Experiment ID: 20001906 Result: Down-regulated in Transcription
  misc_feature: MA Experiment 20001906 PARAMETER Experiment Name: At_Drought_Reproduction_P Parameter: Age (day) Value: 35
  misc_feature: MA Experiment 20001906 PARAMETER Experiment Name: At_Drought_Reproduction_P Parameter: Organism Value: A. thaliana
  misc_feature: MA Experiment 20001906 PARAMETER Experiment Name: At_Drought_Reproduction_P Parameter: Plant Line Value: WS
  misc_feature: MA Experiment 20001906 PARAMETER Experiment Name: At_Drought_Reproduction_P Parameter: Timepoint (day) Value: 5
  misc_feature: MA Experiment 20001906 PARAMETER Experiment Name: At_Drought_Reproduction_P Parameter: Tissue Value: Siliques
  misc_feature: MA Experiment 20001906 PARAMETER Experiment Name: At_Drought_Reproduction_P Parameter: Treatment Value: Drought vs. No Drought
  misc_feature: MA Experiment ID: 20001907 Result: Down-regulated in Transcription
  misc_feature: MA Experiment 20001907 PARAMETER Experiment Name: At_Drought_Reproduction_P Parameter: Age (day) Value: 37
  misc_feature: MA Experiment 20001907 PARAMETER Experiment Name: At_Drought_Reproduction_P Parameter: Organism Value: A. thaliana
  misc_feature: MA Experiment 20001907 PARAMETER Experiment Name: At_Drought_Reproduction_P Parameter: Plant Line Value: WS
  misc_feature: MA Experiment 20001907 PARAMETER Experiment Name: At_Drought_Reproduction_P Parameter: Timepoint (day) Value: 7
  misc_feature: MA Experiment 20001907 PARAMETER Experiment Name: At_Drought_Reproduction_P Parameter: Tissue Value: Siliques
  misc_feature: MA Experiment 20001907 PARAMETER Experiment Name: At_Drought_Reproduction_P Parameter: Treatment Value: Drought vs. No Drought
  misc_feature: MA Experiment ID: 20001908 Result: Down-regulated in Transcription
  misc_feature: MA Experiment 20001908 PARAMETER Experiment Name: At_Drought_Reproduction_P Parameter: Age (day) Value: 40
  misc_feature: MA Experiment 20001908 PARAMETER Experiment Name: At_Drought_Reproduction_P Parameter: Organism Value: A. thaliana
  misc_feature: MA Experiment 20001908 PARAMETER Experiment Name: At_Drought_Reproduction_P Parameter: Plant Line Value: WS
  misc_feature: MA Experiment 20001908 PARAMETER Experiment Name: At_Drought_Reproduction_P Parameter: Timepoint (day) Value: 10
  misc_feature: MA Experiment 20001908 PARAMETER Experiment Name: At_Drought_Reproduction_P Parameter: Tissue Value: Siliques
  misc_feature: MA Experiment 20001908 PARAMETER Experiment Name: At_Drought_Reproduction_P Parameter: Treatment Value: Drought vs. No Drought
  misc_feature: MA Experiment ID: 20001911 Result: Down-regulated in Transcription
  misc_feature: MA Experiment 20001911 PARAMETER Experiment Name: At_Drought_Reproduction_P Parameter: Age (day) Value: 40
  misc_feature: MA Experiment 20001911 PARAMETER Experiment Name: At_Drought_Reproduction_P Parameter: Organism Value: A. thaliana
  misc_feature: MA Experiment 20001911 PARAMETER Experiment Name: At_Drought_Reproduction_P Parameter: Plant Line Value: WS
  misc_feature: MA Experiment 20001911 PARAMETER Experiment Name: At_Drought_Reproduction_P Parameter: Timepoint (day) Value: 10
  misc_feature: MA Experiment 20001911 PARAMETER Experiment Name: At_Drought_Reproduction_P Parameter: Tissue Value: Flowers
  misc_feature: MA Experiment 20001911 PARAMETER Experiment Name: At_Drought_Reproduction_P Parameter: Treatment Value: Drought vs. No Drought
acttatacctcactgacttactacaaatcagatatgtggaagattgggcagagaggagttccctatttccagagactcattgctgcgccgttcacgaccttgcggtccttgccaacttctttggtcgagacagggcagaaccgtgtcattgatgcttcgttaactctcatccgtgaaagggcaaaactcaaaggagagttagtgcgactcataggaggagcaaaagctacaacagctcttcttggagtaccacttggtcacaactcttcttttcttgaaggcccagccttggctcctcctcatgtaagggaagctatttggtgtggtagtacaaactccaccactgaagaagggaaggagctaaaagatccacgtgttctaagtgatgttggtgatattccggtacaagagattagagaaatgggggttgatgatgatagacttatgaaagtagtaagtgaatctgtgaagctggtgatggaagaggaaccattgcgcccgctggtcataggtggagaccattccatatcttatcctgttgtgagagctgtttcggagaaacttggaggacccgtggatattcttcatcttgatgcacatcccgatatatatgaccgttttgaaggcaattattactctcatgcatcttcttttgctcgtatcatggaaggtggctatgcgcggcggcttttacaggttgggatcagatccataaacaaagaaggacgggaacaaggcaagaggtttggagtagaacagtatgagatgcgaaccttctcaaaagatcgccaaatgttggaaaacttgaaactaggggaaggagtgaagggcgtgtatatctcgatcgatgttgactgtctcgatccgggattcgcgcacggagtgtcccacttcgaaccaggaggtctttctttccgagacgtccttaacatattacacaaccttcagggagatttggtgggggctgatgttgttgagtacaatccacagcgtgataccgctgatgacatgacggcaatggtcgcggctaagtttgttagagagctagccgcaaaaatgtcaaaatgaatttaaatggtactttggagtttaatcgttgaagcttgtaatatgcaataagtgtggtctcatagacatggtatcgaataagcttaatatcaattgggtttttaggcccaaatatcaatgtataatttattaaattatgataagatgcattgtaataagttgtaaaaataatttatcatattgcaatatatgtaaacattaatttagc

SEQ ID NO: 22619 - protein, 355 aa, Arabidopsis thaliana
  peptide (1)..(355): Ceres Seq. ID no. 13492438
  misc_feature (74)..(354): Pfam Name: Arginase family Pfam Description: Arginase family
  misc_feature (33)..(355): Homolog of NCBI NO: 12802155 NR Description: arginase [Pinus taeda]
  misc_feature (15)..(347): Homolog of NCBI NO: 13182957 NR Description: arginase [Brassica napus]
  misc_feature (15)..(355): Homolog of NCBI NO: 15236640 NR Description: arginase [Arabidopsis thaliana]
  misc_feature (12)..(355): Homolog of NCBI NO: 21592908 NR Description: putative arginase [Arabidopsis thaliana]
  misc_feature (12)..(355): Homolog of NCBI NO: 15236635 NR Description: arginase -related [Arabidopsis thaliana]
TYTSLTYYKSDMWKIGQRGVPYFQRLIAAPFTTLRSLPTSLVETGQNRVIDASLTLIRERAKLKGELVRLIGGAKATTALLGVPLGHNSSFLEGPALAPPHVREAIWCGSTNSTTEEGKELKDPRVLSDVGDIPVQEIREMGVDDDRLMKVVSESVKLVMEEEPLRPLVIGGDHSISYPVVRAVSEKLGGPVDILHLDAHPDIYDRFEGNYYSHASSFARIMEGGYARRLLQVGIRSINKEGREQGKRFGVEQYEMRTFSKDRQMLENLKLGEGVKGVYISIDVDCLDPGFAHGVSHFEPGGLSFRDVLNILHNLQGDLVGADVVEYNPQRDTADDMTAMVAAKFVRELAAKMSK

SEQ ID NO: 22620 - protein, 344 aa, Arabidopsis thaliana
  peptide (1)..(344): Ceres Seq. ID no. 13492439
  misc_feature (63)..(343): Pfam Name: Arginase family Pfam Description: Arginase family
  misc_feature (22)..(344): Homolog of NCBI NO: 12802155 NR Description: arginase [Pinus taeda]
  misc_feature (4)..(336): Homolog of NCBI NO: 13182957 NR Description: arginase [Brassica napus]
  misc_feature (4)..(344): Homolog of NCBI NO: 15236640 NR Description: arginase [Arabidopsis thaliana]
  misc_feature (1)..(344): Homolog of NCBI NO: 21592908 NR Description: putative arginase [Arabidopsis thaliana]
  misc_feature (1)..(344): Homolog of NCBI NO: 15236635 NR Description: arginase -related [Arabidopsis thaliana]
MWKIGQRGVPYFQRLIAAPFTTLRSLPTSLVETGQNRVIDASLTLIRERAKLKGELVRLIGGAKATTALLGVPLGHNSSFLEGPALAPPHVREAIWCGSTNSTTEEGKELKDPRVLSDVGDIPVQEIREMGVDDDRLMKVVSESVKLVMEEEPLRPLVIGGDHSISYPVVRAVSEKLGGPVDILHLDAHPDIYDRFEGNYYSHASSFARIMEGGYARRLLQVGIRSINKEGREQGKRFGVEQYEMRTFSKDRQMLENLKLGEGVKGVYISIDVDCLDPGFAHGVSHFEPGGLSFRDVLNILHNLQGDLVGADVVEYNPQRDTADDMTAMVAAKFVRELAAKMSK

SEQ ID NO: 22621 - protein, 215 aa, Arabidopsis thaliana
  peptide (1)..(215): Ceres Seq. ID no. 13492440
  misc_feature (1)..(214): Pfam Name: Arginase family Pfam Description: Arginase family
  misc_feature (1)..(215): Homolog of NCBI NO: 12802155 NR Description: arginase [Pinus taeda]
  misc_feature (1)..(207): Homolog of NCBI NO: 13182957 NR Description: arginase [Brassica napus]
  misc_feature (1)..(215): Homolog of NCBI NO: 15236640 NR Description: arginase [Arabidopsis thaliana]
  misc_feature (1)..(215): Homolog of NCBI NO: 21592908 NR Description: putative arginase [Arabidopsis thaliana]
  misc_feature (1)..(215): Homolog of NCBI NO: 15236635 NR Description: arginase -related [Arabidopsis thaliana]
MGVDDDRLMKVVSESVKLVMEEEPLRPLVIGGDHSISYPVVRAVSEKLGGPVDILHLDAHPDIYDRFEGNYYSHASSFARIMEGGYARRLLQVGIRSINKEGREQGKRFGVEQYEMRTFSKDRQMLENLKLGEGVKGVYISIDVDCLDPGFAHGVSHFEPGGLSFRDVLNILHNLQGDLVGADVVEYNPQRDTADDMTAMVAAKFVRELAAKMSK

SEQ ID NO: 22622 - DNA, 707 bp, Arabidopsis thaliana
  misc_feature (1)..(707): Ceres Seq. ID no. 12322487
  misc_feature: MA Experiment ID: 20000437 Result: Down-regulated in Transcription
  misc_feature: MA Experiment 20000437 PARAMETER Experiment Name: At_Drought_P Parameter: Age (day) Value: 8
  misc_feature: MA Experiment 20000437 PARAMETER Experiment Name: At_Drought_P Parameter: Organism Value: A. thaliana
  misc_feature: MA Experiment 20000437 PARAMETER Experiment Name: At_Drought_P Parameter: Plant Line Value: WS
  misc_feature: MA Experiment 20000437 PARAMETER Experiment Name: At_Drought_P Parameter: Timepoint (hr) Value: 24
  misc_feature: MA Experiment 20000437 PARAMETER Experiment Name: At_Drought_P Parameter: Tissue Value: Whole Plant
  misc_feature: MA Experiment 20000437 PARAMETER Experiment Name: At_Drought_P Parameter: Treatment Value: Drought vs. No Drought
  misc_feature: MA Experiment ID: 20000794 Result: Down-regulated in Transcription
  misc_feature: MA Experiment 20000794 PARAMETER Experiment Name: At_Petals_P Parameter: Age (day) Value: 23-25 days
  misc_feature: MA Experiment 20000794 PARAMETER Experiment Name: At_Petals_P Parameter: Plant Line Value: WS
  misc_feature: MA Experiment 20000794 PARAMETER Experiment Name: At_Petals_P Parameter: Tissue Value: Petals vs. Whole plant
  misc_feature: MA Experiment ID: 20001558 Result: Up-regulated in Transcription
  misc_feature: MA Experiment 20001558 PARAMETER Experiment Name: At_Drought_Soil_Dry_P Parameter: Age (day) Value: 27
  misc_feature: MA Experiment 20001558 PARAMETER Experiment Name: At_Drought_Soil_Dry_P Parameter: Organism Value: A. thaliana
  misc_feature: MA Experiment 20001558 PARAMETER Experiment Name: At_Drought_Soil_Dry_P Parameter: Plant Line Value: WS
  misc_feature: MA Experiment 20001558 PARAMETER Experiment Name: At_Drought_Soil_Dry_P Parameter: Post Timepoint (hr) Value: 6
  misc_feature: MA Experiment 20001558 PARAMETER Experiment Name: At_Drought_Soil_Dry_P Parameter: Post-Treatment Value: Re-Water vs. No Drought
  misc_feature: MA Experiment 20001558 PARAMETER Experiment Name: At_Drought_Soil_Dry_P Parameter: Timepoint (day) Value: 13
  misc_feature: MA Experiment 20001558 PARAMETER Experiment Name: At_Drought_Soil_Dry_P Parameter: Treatment Value: Drought vs. No Drought
  misc_feature: MA Experiment ID: 20001560 Result: Up-regulated in Transcription
  misc_feature: MA Experiment 20001560 PARAMETER Experiment Name: At_Drought_Soil_Dry_P Parameter: Age (day) Value: 28
  misc_feature: MA Experiment 20001560 PARAMETER Experiment Name: At_Drought_Soil_Dry_P Parameter: Organism Value: A. thaliana
  misc_feature: MA Experiment 20001560 PARAMETER Experiment Name: At_Drought_Soil_Dry_P Parameter: Plant Line Value: WS
  misc_feature: MA Experiment 20001560 PARAMETER Experiment Name: At_Drought_Soil_Dry_P Parameter: Post Timepoint (hr) Value: None
  misc_feature: MA Experiment 20001560 PARAMETER Experiment Name: At_Drought_Soil_Dry_P Parameter: Post-Treatment Value: None
  misc_feature: MA Experiment 20001560 PARAMETER Experiment Name: At_Drought_Soil_Dry_P Parameter: Timepoint (day) Value: 14
  misc_feature: MA Experiment 20001560 PARAMETER Experiment Name: At_Drought_Soil_Dry_P Parameter: Treatment Value: Drought vs. No Drought
  misc_feature: MA Experiment ID: 20001757 Result: Up-regulated in Transcription
  misc_feature: MA Experiment 20001757 PARAMETER Experiment Name: At_50mM_NH4NO3_L-to-H_P Parameter: Timepoint (hr) Value: 6
  misc_feature: MA Experiment 20001757 PARAMETER Experiment Name: At_50mM_NH4NO3_L-to-H_P Parameter: Tissue Value: Leaf
  misc_feature: MA Experiment 20001757 PARAMETER Experiment Name: At_50mM_NH4NO3_L-to-H_P Parameter: Treatment Value: 50mM NH4NO3 vs 100mM Mannitol
tttcttctcaccacttaaagagtttccccagaaattttcttccgccgtaaaagcaaaaaaagatgcagatcttcgtgaaaaccctaacggggaagacgatcactctcgaggtcgagtcctctgacaccatcgacaatgtcaaggccaagatccaagacaaggaaggaatcccaccggaccagcagcgattgattttcgccggaaagcagctcgaagacggacgtaccttagccgattacaacatccagaaggaatcaacgcttcaccttgtccttcgtctccgtggaggtgctaagaagaggaagaagaagacctacaccaagcctaagaagatcaagcacaagcacaagaaggtcaagctcgctgttcttcagttctacaaggttgatggttcaggtaaggttcagcgtttgaggaaggagtgccctaacgcaacctgtggtgctgggactttcatggcgagtcatttcgatcgtcactactgtggtaagtgtggtctcacctacgtttaccagaaagaaggagctcaggaatgattttcatctcgatctctatcattttgaattgaatactgctttttttttggaatttggaagttgtttttggatgttgtggatcttatgttgaacttgtttgaatttcatatctaggtttttcttatggatatttttatgctctttatttgaattactttcaaatcttattgc

SEQ ID NO: 22623 - protein, 157 aa, Arabidopsis thaliana
  peptide (1)..(157): Ceres Seq. ID no. 12322488
  misc_feature (1)..(74): Pfam Name: Ubiquitin family Pfam Description: Ubiquitin family
  misc_feature (1)..(74): Pfam Name: Ubiquitin family Pfam Description: Ubiquitin family
  misc_feature (1)..(154): Homolog of NCBI NO: 279636 NR Description: ubiquitin / ribosomal protein S27a - tomato
  misc_feature (1)..(154): Homolog of NCBI NO: 28395459 NR Description: ubiquitin/ribosomal fusion protein [Malus x
  misc_feature (1)..(155): Homolog of NCBI NO: 541953 NR Description: ubiquitin/ribosomal protein S27a fusion protein -
  misc_feature (1)..(155): Homolog of NCBI NO: 25294256 NR Description: ubiquitin extension protein [imported] - common
  misc_feature (1)..(154): Homolog of NCBI NO: 25294255 NR Description: ubiquitin extension protein [imported] - potato
  misc_feature (1)..(154): Homolog of NCBI NO: 279636 NR Description: ubiquitin / ribosomal protein S27a - tomato
  misc_feature (1)..(155): Homolog of NCBI NO: 541953 NR Description: ubiquitin/ribosomal protein S27a fusion protein -
  misc_feature (1)..(154): Homolog of NCBI NO: 25294255 NR Description: ubiquitin extension protein [imported] - potato
  misc_feature (1)..(157): Homolog of NCBI NO: 18407264 NR Description: ubiquitin extension protein (UBQ6)
  misc_feature (1)..(156): Homolog of NCBI NO: 15228715 NR Description: ubiquitin extension protein (UBQ5)
  misc_feature (1)..(154): Homolog of NCBI NO: 34581769 NR Description: ubiquitin extension protein [Cucumis sativus]
  misc_feature (1)..(154): Homolog of NCBI NO: 18252349 NR Description: ubiquitin extension protein [Pyrus communis]
  misc_feature (1)..(155): Homolog of NCBI NO: 541954 NR Description: ubiquitin/ribosomal protein S27a fusion protein -
  misc_feature (1)..(155): Homolog of NCBI NO: 25294256 NR Description: ubiquitin extension protein [imported] - common
  misc_feature (1)..(154): Homolog of NCBI NO: 28395459 NR Description: ubiquitin/ribosomal fusion protein [Malus x
  misc_feature (1)..(155): Homolog of NCBI NO: 541954 NR Description: ubiquitin/ribosomal protein S27a fusion protein -
  misc_feature (1)..(154): Homolog of NCBI NO: 18252349 NR Description: ubiquitin extension protein [Pyrus communis]
  misc_feature (1)..(154): Homolog of NCBI NO: 34581769 NR Description: ubiquitin extension protein [Cucumis sativus]
  misc_feature (1)..(156): Homolog of NCBI NO: 15228715 NR Description: ubiquitin extension protein (UBQ5)
  misc_feature (1)..(157): Homolog of NCBI NO: 18407264 NR Description: ubiquitin extension protein (UBQ6)
MQIFVKTLTGKTITLEVESSDTIDNVKAKIQDKEGIPPDQQRLIFAGKQLEDGRTLADYNIQKESTLHLVLRLRGGAKKRKKKTYTKPKKIKHKHKKVKLAVLQFYKVDGSGKVQRLRKECPNATCGAGTFMASHFDRHYCGKCGLTYVYQKEGAQE

SEQ ID NO: 22624 - DNA, 616 bp, Arabidopsis thaliana
  misc_feature (1)..(616): Ceres Seq. ID no. 12330185
  misc_feature: MA Experiment ID: 108668 Result: Up-regulated in Transcription
  misc_feature: MA Experiment 108668 PARAMETER Experiment Name: At_2mM_SA_cDNA_P Parameter: Plant Line Value: WS
  misc_feature: MA Experiment 108668 PARAMETER Experiment Name: At_2mM_SA_cDNA_P Parameter: Timepoint (hr) Value: 6
  misc_feature: MA Experiment 108668 PARAMETER Experiment Name: At_2mM_SA_cDNA_P Parameter: Treatment Value: 2mM SA vs. No Treatment
  misc_feature: MA Experiment ID: 20000090 Result: Up-regulated in Transcription
  misc_feature: MA Experiment ID: 20000113 Result: Up-regulated in Transcription
  misc_feature: MA Experiment 20000113 PARAMETER Experiment Name: At_42deg_Heat_cDNA_P Parameter: Temperature (deg C) Value: 42 vs. 22
  misc_feature: MA Experiment 20000113 PARAMETER Experiment Name: At_42deg_Heat_cDNA_P Parameter: Timepoint (hr) Value: 8
  misc_feature: MA Experiment 20000113 PARAMETER Experiment Name: At_42deg_Heat_cDNA_P Parameter: Tissue Value: Aerial
  misc_feature: MA Experiment ID: 20000182 Result: Up-regulated in Transcription
  misc_feature: MA Experiment 20000182 PARAMETER Experiment Name: At_2mM_SA_P Parameter: Age (day) Value: 14
  misc_feature: MA Experiment 20000182 PARAMETER Experiment Name: At_2mM_SA_P Parameter: Organism Value: A. thaliana
  misc_feature: MA Experiment 20000182 PARAMETER Experiment Name: At_2mM_SA_P Parameter: Plant Line Value: WS
  misc_feature: MA Experiment 20000182 PARAMETER Experiment Name: At_2mM_SA_P Parameter: Timepoint (hr) Value: 6
  misc_feature: MA Experiment 20000182 PARAMETER Experiment Name: At_2mM_SA_P Parameter: Tissue Value: Aerial
  misc_feature: MA Experiment 20000182 PARAMETER Experiment Name: At_2mM_SA_P Parameter: Treatment Value: 2mM SA vs. No Treatment
  misc_feature: MA Experiment ID: 20000224 Result: Down-regulated in Transcription
  misc_feature: MA Experiment ID: 20000227 Result: Down-regulated in Transcription
  misc_feature: MA Experiment 20000227 PARAMETER Experiment Name: At_Root-Tips-vs-Tops_P Parameter: Tissue Value: Root Tips vs. Root Tops
gcttaaagtctctggtcaaatgggaaatagtgtaagaagcaatctaagagacatcagaggacgacgatcgatggatcctcggatgtggcacaaagtcgccgctatttccggtatggctgctcttggtttgggaacttatggtgctcatgtctttaaaccagagaacccttcttacaaacaggtgtggcaaacggcttcactttaccatttggttcacactgctgctcttgtttctgctcctagcaccaaatatcccaacatttttggtggcttgttgactgctggaattgtagccttttccggcacgtgttatatggtagcgctgcgggaggacagaaagttttcgacattggcaccattcggaggctttgcgttcattgctgcatgggcaactttacttttctaaacaatctcataaccatctatattgtcaagtttgtggtcaagcttatcctacatatgaactcactgtttttttttgtttacctaagagattgcttaataacaattctgtgtcgacaaccattaagcatcttcctttacttgttcagtttgttgctaaagggattatgtaaatgacgaccatattaatgtaatcttattaccatacaattta

SEQ ID NO: 22625 - protein, 134 aa, Arabidopsis thaliana
  peptide (1)..(134): Ceres Seq. ID no. 12330186
  misc_feature (29)..(134): Pfam Name: Protein of unknown function (DUF423) Pfam Description: Protein of unknown function (DUF423)
  misc_feature (33)..(112): Homolog of NCBI NO: 7963689 NR Description: unknown [Hordeum vulgare]
  misc_feature (28)..(115): Homolog of NCBI NO: 7963697 NR Description: unknown [Haynaldia villosa]
  misc_feature (28)..(119): Homolog of NCBI NO: 7963694 NR Description: unknown [Psathyrostachys juncea]
  misc_feature (28)..(119): Homolog of NCBI NO: 7963699 NR Description: unknown [Leymus triticoides]
  misc_feature (25)..(125): Homolog of NCBI NO: 7963702 NR Description: unknown [Agropyron cristatum]
  misc_feature (25)..(125): Homolog of NCBI NO: 7963659 NR Description: unknown [Leymus cinereus]
  misc_feature (25)..(134): Homolog of NCBI NO: 40538985 NR Description: expressed protein [Oryza sativa (japonica
  misc_feature (38)..(134): Homolog of NCBI NO: 25411133 NR Description: hypothetical protein At2g04900 [imported] -
  misc_feature (24)..(134): Homolog of NCBI NO: 17065460 NR Description: Unknown protein [Arabidopsis thaliana]
  misc_feature (7)..(134): Homolog of NCBI NO: 18395895 NR Description: expressed protein
LKVSGQMGNSVRSNLRDIRGRRSMDPRMWHKVAAISGMAALGLGTYGAHVFKPENPSYKQVWQTASLYHLVHTAALVSAPSTKYPNIFGGLLTAGIVAFSGTCYMVALREDRKFSTLAPFGGFAFIAAWATLLF

SEQ ID NO: 22626 - protein, 128 aa, Arabidopsis thaliana
  peptide (1)..(128): Ceres Seq. ID no. 12330187
  misc_feature (23)..(128): Pfam Name: Protein of unknown function (DUF423) Pfam Description: Protein of unknown function (DUF423)
  misc_feature (27)..(106): Homolog of NCBI NO: 7963689 NR Description: unknown [Hordeum vulgare]
  misc_feature (22)..(109): Homolog of NCBI NO: 7963697 NR Description: unknown [Haynaldia villosa]
  misc_feature (22)..(113): Homolog of NCBI NO: 7963694 NR Description: unknown [Psathyrostachys juncea]
  misc_feature (22)..(113): Homolog of NCBI NO: 7963699 NR Description: unknown [Leymus triticoides]
  misc_feature (19)..(119): Homolog of NCBI NO: 7963702 NR Description: unknown [Agropyron cristatum]
  misc_feature (19)..(119): Homolog of NCBI NO: 7963659 NR Description: unknown [Leymus cinereus]
  misc_feature (19)..(128): Homolog of NCBI NO: 40538985 NR Description: expressed protein [Oryza sativa (japonica
  misc_feature (32)..(128): Homolog of NCBI NO: 25411133 NR Description: hypothetical protein At2g04900 [imported] -
  misc_feature (18)..(128): Homolog of NCBI NO: 17065460 NR Description: Unknown protein [Arabidopsis thaliana]
  misc_feature (1)..(128): Homolog of NCBI NO: 18395895 NR Description: expressed protein
MGNSVRSNLRDIRGRRSMDPRMWHKVAAISGMAALGLGTYGAHVFKPENPSYKQVWQTASLYHLVHTAALVSAPSTKYPNIFGGLLTAGIVAFSGTCYMVALREDRKFSTLAPFGGFAFIAAWATLLF

SEQ ID NO: 22627 - protein, 111 aa, Arabidopsis thaliana
  peptide (1)..(111): Ceres Seq. ID no. 12330188
  misc_feature (6)..(111): Pfam Name: Protein of unknown function (DUF423) Pfam Description: Protein of unknown function (DUF423)
  misc_feature (10)..(89): Homolog of NCBI NO: 7963689 NR Description: unknown [Hordeum vulgare]
  misc_feature (5)..(92): Homolog of NCBI NO: 7963697 NR Description: unknown [Haynaldia villosa]
  misc_feature (5)..(96): Homolog of NCBI NO: 7963694 NR Description: unknown [Psathyrostachys juncea]
  misc_feature (5)..(96): Homolog of NCBI NO: 7963699 NR Description: unknown [Leymus triticoides]
  misc_feature (2)..(102): Homolog of NCBI NO: 7963702 NR Description: unknown [Agropyron cristatum]
  misc_feature (2)..(102): Homolog of NCBI NO: 7963659 NR Description: unknown [Leymus cinereus]
  misc_feature (2)..(111): Homolog of NCBI NO: 40538985 NR Description: expressed protein [Oryza sativa (japonica
  misc_feature (15)..(111): Homolog of NCBI NO: 25411133 NR Description: hypothetical protein At2g04900 [imported] -
  misc_feature (1)..(111): Homolog of NCBI NO: 17065460 NR Description: Unknown protein [Arabidopsis thaliana]
  misc_feature (1)..(111): Homolog of NCBI NO: 18395895 NR Description: expressed protein
MDPRMWHKVAAISGMAALGLGTYGAHVFKPENPSYKQVWQTASLYHLVHTAALVSAPSTKYPNIFGGLLTAGIVAFSGTCYMVALREDRKFSTLAPFGGFAFIAAWATLLF

SEQ ID NO: 22628 - DNA, 766 bp, Arabidopsis thaliana
  misc_feature (1)..(766): Ceres Seq. ID no. 12338430
  misc_feature: MA Experiment ID: 108434 Result: Down-regulated in Transcription
  misc_feature: MA Experiment 108434 PARAMETER Experiment Name: At_Root_Tips_cDNA_P Parameter: Tissue Value: Root Tips
  misc_feature: MA Experiment ID: 108595 Result: Up-regulated in Transcription
  misc_feature: MA Experiment 108595 PARAMETER Experiment Name: At_Ler-pi_Ovule_cDNA_P Parameter: Plant Line Value: null
  misc_feature: MA Experiment ID: 20000185 Result: Down-regulated in Transcription
  misc_feature: MA Experiment 20000185 PARAMETER Experiment Name: At_Roots__P Parameter: Age (day) Value: 7 vs. 21
  misc_feature: MA Experiment 20000185 PARAMETER Experiment Name: At_Roots__P Parameter: Organism Value: A. thaliana
  misc_feature: MA Experiment 20000185 PARAMETER Experiment Name: At_Roots__P Parameter: Tissue Value: Roots vs. Whole Plant
  misc_feature: MA Experiment ID: 20000234 Result: Down-regulated in Transcription
  misc_feature: MA Experiment 20000234 PARAMETER Experiment Name: At_Siliques_P Parameter: Age (day) Value: 21
  misc_feature: MA Experiment 20000234 PARAMETER Experiment Name: At_Siliques_P Parameter: Organism Value: A. thaliana
  misc_feature: MA Experiment 20000234 PARAMETER Experiment Name: At_Siliques_P Parameter: Plant Line Value: WS
  misc_feature: MA Experiment 20000234 PARAMETER Experiment Name: At_Siliques_P Parameter: Tissue Value: Less Than 5mm Siliques vs. Whole Plant
  misc_feature: MA Experiment ID: 20000264 Result: Down-regulated in Transcription
  misc_feature: MA Experiment 20000264 PARAMETER Experiment Name: At_Open_Flower_P Parameter: Age (day) Value: 21
  misc_feature: MA Experiment 20000264 PARAMETER Experiment Name: At_Open_Flower_P Parameter: Plant Line Value: WS
  misc_feature: MA Experiment 20000264 PARAMETER Experiment Name: At_Open_Flower_P Parameter: Tissue Value: Open Flower vs. Whole Plant
  misc_feature: MA Experiment ID: 20000265 Result: Down-regulated in Transcription
  misc_feature: MA Experiment 20000265 PARAMETER Experiment Name: At_Open_Flower_P Parameter: Age (day) Value: 21
  misc_feature: MA Experiment 20000265 PARAMETER Experiment Name: At_Open_Flower_P Parameter: Plant Line Value: WS
  misc_feature: MA Experiment 20000265 PARAMETER Experiment Name: At_Open_Flower_P Parameter: Tissue Value: Closed Flower vs. Whole Plant
  misc_feature: MA Experiment ID: 20000286 Result: Down-regulated in Transcription
  misc_feature: MA Experiment 20000286 PARAMETER Experiment Name: At_Open_Flower_P Parameter: Age (day) Value: 21
  misc_feature: MA Experiment 20000286 PARAMETER Experiment Name: At_Open_Flower_P Parameter: Plant Line Value: WS
  misc_feature: MA Experiment 20000286 PARAMETER Experiment Name: At_Open_Flower_P Parameter: Tissue Value: Half Open vs. Whole Plant
  misc_feature: MA Experiment ID: 20000438 Result: Down-regulated in Transcription
  misc_feature: MA Experiment 20000438 PARAMETER Experiment Name: At_Shoots__P Parameter: Age (day) Value: 14
  misc_feature: MA Experiment 20000438 PARAMETER Experiment Name: At_Shoots__P Parameter: Tissue Value: Shoots vs. Whole Plant
  misc_feature: MA Experiment ID: 20000439 Result: Down-regulated in Transcription
  misc_feature: MA Experiment 20000439 PARAMETER Experiment Name: At_Roots__P Parameter: Age (day) Value: 14 vs. 21
  misc_feature: MA Experiment 20000439 PARAMETER Experiment Name: At_Roots__P Parameter: Organism Value: A. thaliana
  misc_feature: MA Experiment 20000439 PARAMETER Experiment Name: At_Roots__P Parameter: Tissue Value: Roots vs. Whole Plant
  misc_feature: MA Experiment ID: 20000794 Result: Down-regulated in Transcription
  misc_feature: MA Experiment 20000794 PARAMETER Experiment Name: At_Petals_P Parameter: Age (day) Value: 23-25 days
  misc_feature: MA Experiment 20000794 PARAMETER Experiment Name: At_Petals_P Parameter: Plant Line Value: WS
  misc_feature: MA Experiment 20000794 PARAMETER Experiment Name: At_Petals_P Parameter: Tissue Value: Petals vs. Whole plant
  misc_feature: MA Experiment ID: 20001556 Result: Down-regulated in Transcription
  misc_feature: MA Experiment 20001556 PARAMETER Experiment Name: At_Drought_Soil_Dry_P Parameter: Age (day) Value: 26
  misc_feature: MA Experiment 20001556 PARAMETER Experiment Name: At_Drought_Soil_Dry_P Parameter: Organism Value: A. thaliana
  misc_feature: MA Experiment 20001556 PARAMETER Experiment Name: At_Drought_Soil_Dry_P Parameter: Plant Line Value: WS
  misc_feature: MA Experiment 20001556 PARAMETER Experiment Name: At_Drought_Soil_Dry_P Parameter: Post Timepoint (hr) Value: None
  misc_feature: MA Experiment 20001556 PARAMETER Experiment Name: At_Drought_Soil_Dry_P Parameter: Post-Treatment Value: None
  misc_feature: MA Experiment 20001556 PARAMETER Experiment Name: At_Drought_Soil_Dry_P Parameter: Timepoint (day) Value: 12
  misc_feature: MA Experiment 20001556 PARAMETER Experiment Name: At_Drought_Soil_Dry_P Parameter: Treatment Value: Drought vs. No Drought
  misc_feature: MA Experiment ID: 20001773 Result: Up-regulated in Transcription
  misc_feature: MA Experiment 20001773 PARAMETER Experiment Name: At_Far-red-enriched-adult_P Parameter: Age (day) Value: 30
  misc_feature: MA Experiment 20001773 PARAMETER Experiment Name: At_Far-red-enriched-adult_P Parameter: Light Value: Far-red enriched vs. White
  misc_feature: MA Experiment 20001773 PARAMETER Experiment Name: At_Far-red-enriched-adult_P Parameter: Organism Value: A. thaliana
  misc_feature: MA Experiment 20001773 PARAMETER Experiment Name: At_Far-red-enriched-adult_P Parameter: Plant Line Value: Columbia
  misc_feature: MA Experiment 20001773 PARAMETER Experiment Name: At_Far-red-enriched-adult_P Parameter: Timepoint (hr) Value: 48
  misc_feature: MA Experiment 20001773 PARAMETER Experiment Name: At_Far-red-enriched-adult_P Parameter: Tissue Value: Aerial
  misc_feature: MA Experiment ID: 20001906 Result: Down-regulated in Transcription
  misc_feature: MA Experiment 20001906 PARAMETER Experiment Name: At_Drought_Reproduction_P Parameter: Age (day) Value: 35
  misc_feature: MA Experiment 20001906 PARAMETER Experiment Name: At_Drought_Reproduction_P Parameter: Organism Value: A. thaliana
  misc_feature: MA Experiment 20001906 PARAMETER Experiment Name: At_Drought_Reproduction_P Parameter: Plant Line Value: WS
  misc_feature: MA Experiment 20001906 PARAMETER Experiment Name: At_Drought_Reproduction_P Parameter: Timepoint (day) Value: 5
  misc_feature: MA Experiment 20001906 PARAMETER Experiment Name: At_Drought_Reproduction_P Parameter: Tissue Value: Siliques
  misc_feature: MA Experiment 20001906 PARAMETER Experiment Name: At_Drought_Reproduction_P Parameter: Treatment Value: Drought vs. No Drought
  misc_feature: MA Experiment ID: 20001908 Result: Down-regulated in Transcription
  misc_feature: MA Experiment 20001908 PARAMETER Experiment Name: At_Drought_Reproduction_P Parameter: Age (day) Value: 40
  misc_feature: MA Experiment 20001908 PARAMETER Experiment Name: At_Drought_Reproduction_P Parameter: Organism Value: A. thaliana
  misc_feature: MA Experiment 20001908 PARAMETER Experiment Name: At_Drought_Reproduction_P Parameter: Plant Line Value: WS
  misc_feature: MA Experiment 20001908 PARAMETER Experiment Name: At_Drought_Reproduction_P Parameter: Timepoint (day) Value: 10
  misc_feature: MA Experiment 20001908 PARAMETER Experiment Name: At_Drought_Reproduction_P Parameter: Tissue Value: Siliques
  misc_feature: MA Experiment 20001908 PARAMETER Experiment Name: At_Drought_Reproduction_P Parameter: Treatment Value: Drought vs. No Drought
atggtaacgtgtctttttcattaggcgagactagccaatctaagcaaacagagtcgtctttatatctaaacgaacattttgtgaaagaaagagagactaaggtgaatccatggcgtccaagattgtctcagccatagtatttgtgtttaacctcattgcctttggtttagccgttgctgctgaacaaagaagaagcactgcaagggttgtgcaggacactgaggtgcaatataactactgtgtgtatgactcggacagagctacagggtatggagttggagcctttttgttctcagtggctagtcaaatccttatcatgctcgttagccgttgcttctgttgtggaaagcctctcaagcctggcggttcacgcgctcttgccctcattctcttcattgttagctggatgttcttcttgatagcggagatatgtctattagctggatcggtagagaatgcataccacacaaagtacaggacaatgttcatggacaatcctcctgattgtcaaactctacgtaaaggcgtctttgcagcaggcgcctcattcgtcttcttcaacgccattgtctctcagttctactatttcttctatttctctgctgctgaggcctctctttcaccttactagaggttcttaaccaacaaataagttttattttttttctctctaaatgtgctatttgatatgctaatatcatattttgaggtgggttttctatgtacaactatgatgaaatgttacaactatgacaaaattatttgg

SEQ ID NO: 22629 - protein, 173 aa, Arabidopsis thaliana
  peptide (1)..(173): Ceres Seq. ID no. 12338431
  misc_feature (1)..(169): Homolog of NCBI NO: 18391509 NR Description: expressed protein
  misc_feature (6)..(169): Homolog of NCBI NO: 22748411 NR Description: hypothetical protein [Oryza sativa (japonica
  misc_feature (1)..(172): Homolog of NCBI NO: 38344206 NR Description: OSJNBa0064G10.22 [Oryza sativa (japonica
  misc_feature (1)..(159): Homolog of NCBI NO: 21554630 NR Description: unknown [Arabidopsis thaliana]
  misc_feature (1)..(159): Homolog of NCBI NO: 18407003 NR Description: Expressed protein
  misc_feature (1)..(173): Homolog of NCBI NO: 34394069 NR Description: unknown protein [Oryza sativa (japonica
  misc_feature (1)..(172): Homolog of NCBI NO: 18400781 NR Description: expressed protein
  misc_feature (1)..(173): Homolog of NCBI NO: 18404242 NR Description: expressed protein
  misc_feature (1)..(173): Homolog of NCBI NO: 38016521 NR Description: fiber protein Fb34 [Gossypium barbadense]
  misc_feature (1)..(173): Homolog of NCBI NO: 18416991 NR Description: Expressed protein
MASKIVSAIVFVFNLIAFGLAVAAEQRRSTARVVQDTEVQYNYCVYDSDRATGYGVGAFLFSVASQILIMLVSRCFCCGKPLKPGGSRALALILFIVSWMFFLIAEICLLAGSVENAYHTKYRTMFMDNPPDCQTLRKGVFAAGASFVFFNAIVSQFYYFFYFSAAEASLSPY

SEQ ID NO: 22630 - protein, 104 aa, Arabidopsis thaliana
  peptide (1)..(104): Ceres Seq. ID no. 12338432
  misc_feature (1)..(100): Homolog of NCBI NO: 18391509 NR Description: expressed protein
  misc_feature (1)..(100): Homolog of NCBI NO: 22748411 NR Description: hypothetical protein [Oryza sativa (japonica
  misc_feature (1)..(103): Homolog of NCBI NO: 38344206 NR Description: OSJNBa0064G10.22 [Oryza sativa (japonica
  misc_feature (1)..(90): Homolog of NCBI NO: 21554630 NR Description: unknown [Arabidopsis thaliana]
  misc_feature (1)..(90): Homolog of NCBI NO: 18407003 NR Description: Expressed protein
  misc_feature (1)..(104): Homolog of NCBI NO: 34394069 NR Description: unknown protein [Oryza sativa (japonica
  misc_feature (1)..(103): Homolog of NCBI NO: 18400781 NR Description: expressed protein
  misc_feature (1)..(104): Homolog of NCBI NO: 18404242 NR Description: expressed protein
  misc_feature (1)..(104): Homolog of NCBI NO: 38016521 NR Description: fiber protein Fb34 [Gossypium barbadense]
  misc_feature (1)..(104): Homolog of NCBI NO: 18416991 NR Description: Expressed protein
MLVSRCFCCGKPLKPGGSRALALILFIVSWMFFLIAEICLLAGSVENAYHTKYRTMFMDNPPDCQTLRKGVFAAGASFVFFNAIVSQFYYFFYFSAAEASLSPY

SEQ ID NO: 22631 - DNA, 922 bp, Arabidopsis thaliana
  misc_feature (1)..(922): Ceres Seq. ID no. 12421023
  misc_feature: MA Experiment ID: 20001248 Result: Down-regulated in Transcription
  misc_feature: MA Experiment 20001248 PARAMETER Experiment Name: At_Far-red-induction_P Parameter: Age (day) Value: 7
  misc_feature: MA Experiment 20001248 PARAMETER Experiment Name: At_Far-red-induction_P Parameter: Light Value: Far-red vs. White
  misc_feature: MA Experiment 20001248 PARAMETER Experiment Name: At_Far-red-induction_P Parameter: Organism Value: A. thaliana
  misc_feature: MA Experiment 20001248 PARAMETER Experiment Name: At_Far-red-induction_P Parameter: Plant Line Value: Columbia
  misc_feature: MA Experiment 20001248 PARAMETER Experiment Name: At_Far-red-induction_P Parameter: Timepoint (hr) Value: 4
  misc_feature: MA Experiment 20001248 PARAMETER Experiment Name: At_Far-red-induction_P Parameter: Tissue Value: Whole Plant
agtgccgagaaagataaacaaaatggcggcaatcagaacgatgacgaacatgattctacgcgagttcatccatcatccacttctccttcactcttcatcgaaatcgtgtcaatctcttttaccatgtctccgtctcactcccctaatttctccaattcaccctaattcccggttcgtatccgtccgatgtgcggcatcgacctccggtggaagcggtggtgatcggaaagtctcttcacggttgtcgcaggtgcaacagatgcttcatgaagccgaagagagagctagttccgctggcaatgagcctactcctcaaatcactctagacaatgttacacttaactttgctagaagtggtggtcctggaggccagaatgtgaacaaattgaataccaaagtagatatgcgcttcaatgttaagaacgcgtattggctgagtgacaggatcagagagaaaatcttactgacggagaagaatcggatcaacaaggatggtgaacttgtgatatcttcaaccaaaaccagaacgcagaaaggcaacatcgacgatgcacttgaaaaactacaggcgatcattgatgcggcttcttatgttccacctccaccatcagaagaacagaagaagaaaatagtaaagctggctgcgaaagctgacaataaacgacttaaaagcaaaaaagttctgtcagacaagaaatctgcgagaagaagccgcggtagttacgatgattaaacttaaaaccatacaatggagtccaggttgattctaaagcttttaacttaaaatgattgttattttcttggaatttaatgtaacacaacaatcaaatcatccaataaaaattgcagtatattggattttatgtacaaaccactcttatacaaattatgaacaaaaaaagtatcaaacataacattcctc

SEQ ID NO: 22632 - protein, 243 aa, Arabidopsis thaliana
  peptide (1)..(243): Ceres Seq. ID no. 12421024
  misc_feature (106)..(236): Homolog of NCBI NO: 20306641 NR Description: Similar to immature colon carcinoma transcript 1
  misc_feature (106)..(236): Homolog of NCBI NO: 12833859 NR Description: unnamed protein product [Mus musculus]
  misc_feature (101)..(236): Homolog of NCBI NO: 27690532 NR Description: similar to immature colon carcinoma transcript 1
  misc_feature (85)..(236): Homolog of NCBI NO: 19387848 NR Description: immature colon carcinoma transcript 1 [Mus
  misc_feature (214)..(243): Homolog of NCBI NO: 6630453 NR Description: F23N19.20 [Arabidopsis thaliana]
  misc_feature (109)..(177): Homolog of NCBI NO: 6630453 NR Description: F23N19.20 [Arabidopsis thaliana]
  misc_feature (8)..(108): Homolog of NCBI NO: 22330386 NR Description: unknown protein; protein id: At1g62855.1
  misc_feature (135)..(243): Homolog of NCBI NO: 15221608 NR Description: hypothetical protein; protein id: At1g62850.1
  misc_feature (8)..(243): Homolog of NCBI NO: 27754314 NR Description: unknown protein [Arabidopsis thaliana]
  misc_feature (94)..(236): Homolog of NCBI NO: 4557657 NR Description: immature colon carcinoma transcript 1 [Homo
VPRKINKMAAIRTMTNMILREFIHHPLLLHSSSKSCQSLLPCLRLTPLISPIHPNSRFVSVRCAASTSGGSGGDRKVSSRLSQVQQMLHEAEERASSAGNEPTPQITLDNVTLNFARSGGPGGQNVNKLNTKVDMRFNVKNAYWLSDRIREKILLTEKNRINKDGELVISSTKTRTQKGNIDDALEKLQAIIDAASYVPPPPSEEQKKKIVKLAAKADNKRLKSKKVLSDKKSARRSRGSYDD

SEQ ID NO: 22633 - protein, 236 aa, Arabidopsis thaliana
  peptide (1)..(236): Ceres Seq. ID no. 12421025
  misc_feature (87)..(229): Homolog of NCBI NO: 4557657 NR Description: immature colon carcinoma transcript 1 [Homo
  misc_feature (99)..(229): Homolog of NCBI NO: 20306641 NR Description: Similar to immature colon carcinoma transcript 1
  misc_feature (99)..(229): Homolog of NCBI NO: 12833859 NR Description: unnamed protein product [Mus musculus]
  misc_feature (94)..(229): Homolog of NCBI NO: 27690532 NR Description: similar to immature colon carcinoma transcript 1
  misc_feature (78)..(229): Homolog of NCBI NO: 19387848 NR Description: immature colon carcinoma transcript 1 [Mus
  misc_feature (207)..(236): Homolog of NCBI NO: 6630453 NR Description: F23N19.20 [Arabidopsis thaliana]
  misc_feature (102)..(170): Homolog of NCBI NO: 6630453 NR Description: F23N19.20 [Arabidopsis thaliana]
  misc_feature (1)..(101): Homolog of NCBI NO: 22330386 NR Description: unknown protein; protein id: At1g62855.1
  misc_feature (128)..(236): Homolog of NCBI NO: 15221608 NR Description: hypothetical protein; protein id: At1g62850.1
  misc_feature (1)..(236): Homolog of NCBI NO: 27754314 NR Description: unknown protein [Arabidopsis thaliana]
MAAIRTMTNMILREFIHHPLLLHSSSKSCQSLLPCLRLTPLISPIHPNSRFVSVRCAASTSGGSGGDRKVSSRLSQVQQMLHEAEERASSAGNEPTPQITLDNVTLNFARSGGPGGQNVNKLNTKVDMRFNVKNAYWLSDRIREKILLTEKNRINKDGELVISSTKTRTQKGNIDDALEKLQAIIDAASYVPPPPSEEQKKKIVKLAAKADNKRLKSKKVLSDKKSARRSRGSYDD

SEQ ID NO: 22634 - protein, 230 aa, Arabidopsis thaliana
  peptide (1)..(230): Ceres Seq. ID no. 12421026
  misc_feature (81)..(223): Homolog of NCBI NO: 4557657 NR Description: immature colon carcinoma transcript 1 [Homo
  misc_feature (93)..(223): Homolog of NCBI NO: 20306641 NR Description: Similar to immature colon carcinoma transcript 1
  misc_feature (93)..(223): Homolog of NCBI NO: 12833859 NR Description: unnamed protein product [Mus musculus]
  misc_feature (88)..(223): Homolog of NCBI NO: 27690532 NR Description: similar to immature colon carcinoma transcript 1
  misc_feature (72)..(223): Homolog of NCBI NO: 19387848 NR Description: immature colon carcinoma transcript 1 [Mus
  misc_feature (201)..(230): Homolog of NCBI NO: 6630453 NR Description: F23N19.20 [Arabidopsis thaliana]
  misc_feature (96)..(164): Homolog of NCBI NO: 6630453 NR Description: F23N19.20 [Arabidopsis thaliana]
  misc_feature (1)..(95): Homolog of NCBI NO: 22330386 NR Description: unknown protein; protein id: At1g62855.1
  misc_feature (122)..(230): Homolog of NCBI NO: 15221608 NR Description: hypothetical protein; protein id: At1g62850.1
  misc_feature (1)..(230): Homolog of NCBI NO: 27754314 NR Description: unknown protein [Arabidopsis thaliana]
MTNMILREFIHHPLLLHSSSKSCQSLLPCLRLTPLISPIHPNSRFVSVRCAASTSGGSGGDRKVSSRLSQVQQMLHEAEERASSAGNEPTPQITLDNVTLNFARSGGPGGQNVNKLNTKVDMRFNVKNAYWLSDRIREKILLTEKNRINKDGELVISSTKTRTQKGNIDDALEKLQAIIDAASYVPPPPSEEQKKKIVKLAAKADNKRLKSKKVLSDKKSARRSRGSYDD

SEQ ID NO: 22635 - DNA, 843 bp, Arabidopsis thaliana
  misc_feature (1)..(843): Ceres Seq. ID no. 13499553
  misc_feature: MA Experiment ID: 108461 Result: Up-regulated in Transcription
  misc_feature: MA Experiment 108461 PARAMETER Experiment Name: At_Germinating_Seeds_cDNA_P Parameter: Age (day) Value: 1 vs. 0
  misc_feature: MA Experiment 108461 PARAMETER Experiment Name: At_Germinating_Seeds_cDNA_P Parameter: Tissue Value: Germinating Seeds
  misc_feature: MA Experiment ID: 108595 Result: Down-regulated in Transcription
  misc_feature: MA Experiment 108595 PARAMETER Experiment Name: At_Ler-pi_Ovule_cDNA_P Parameter: Plant Line Value: null
  misc_feature: MA Experiment ID: 20000180 Result: Up-regulated in Transcription
  misc_feature: MA Experiment 20000180 PARAMETER Experiment Name: At_Germinating_Seeds_P Parameter: Age (hr) Value: 24 vs. 0
  misc_feature: MA Experiment 20000180 PARAMETER Experiment Name: At_Germinating_Seeds_P Parameter: Tissue Value: Germinating Seeds
  misc_feature: MA Experiment ID: 20000184 Result: Up-regulated in Transcription
  misc_feature: MA Experiment 20000184 PARAMETER Experiment Name: At_Shoots__P Parameter: Age (day) Value: 7
  misc_feature: MA Experiment 20000184 PARAMETER Experiment Name: At_Shoots__P Parameter: Tissue Value: Shoots vs. Whole Plant
  misc_feature: MA Experiment ID: 20000185 Result: Down-regulated in Transcription
  misc_feature: MA Experiment 20000185 PARAMETER Experiment Name: At_Roots__P Parameter: Age (day) Value: 7 vs. 21
  misc_feature: MA Experiment 20000185 PARAMETER Experiment Name: At_Roots__P Parameter: Organism Value: A. thaliana
  misc_feature: MA Experiment 20000185 PARAMETER Experiment Name: At_Roots__P Parameter: Tissue Value: Roots vs. Whole Plant
  misc_feature: MA Experiment ID: 20000227 Result: Down-regulated in Transcription
  misc_feature: MA Experiment 20000227 PARAMETER Experiment Name: At_Root-Tips-vs-Tops_P Parameter: Tissue Value: Root Tips vs. Root Tops
  misc_feature: MA Experiment ID: 20000439 Result: Down-regulated in Transcription
  misc_feature: MA Experiment 20000439 PARAMETER Experiment Name: At_Roots__P Parameter: Age (day) Value: 14 vs. 21
  misc_feature: MA Experiment 20000439 PARAMETER Experiment Name: At_Roots__P Parameter: Organism Value: A. thaliana
  misc_feature: MA Experiment 20000439 PARAMETER Experiment Name: At_Roots__P Parameter: Tissue Value: Roots vs. Whole Plant
  misc_feature: MA Experiment ID: 20000794 Result: Down-regulated in Transcription
  misc_feature: MA Experiment 20000794 PARAMETER Experiment Name: At_Petals_P Parameter: Age (day) Value: 23-25 days
  misc_feature: MA Experiment 20000794 PARAMETER Experiment Name: At_Petals_P Parameter: Plant Line Value: WS
  misc_feature: MA Experiment 20000794 PARAMETER Experiment Name: At_Petals_P Parameter: Tissue Value: Petals vs. Whole plant
  misc_feature: MA Experiment ID: 20001757 Result: Up-regulated in Transcription
  misc_feature: MA Experiment 20001757 PARAMETER Experiment Name: At_50mM_NH4NO3_L-to-H_P Parameter: Timepoint (hr) Value: 6
  misc_feature: MA Experiment 20001757 PARAMETER Experiment Name: At_50mM_NH4NO3_L-to-H_P Parameter: Tissue Value: Leaf
  misc_feature: MA Experiment 20001757 PARAMETER Experiment Name: At_50mM_NH4NO3_L-to-H_P Parameter: Treatment Value: 50mM NH4NO3 vs 100mM Mannitol
  misc_feature: MA Experiment ID: 20001905 Result: Down-regulated in Transcription
  misc_feature: MA Experiment 20001905 PARAMETER Experiment Name: At_Drought_Reproduction_P Parameter: Age (day) Value: 40
  misc_feature: MA Experiment 20001905 PARAMETER Experiment Name: At_Drought_Reproduction_P Parameter: Organism Value: A. thaliana
  misc_feature: MA Experiment 20001905 PARAMETER Experiment Name: At_Drought_Reproduction_P Parameter: Plant Line Value: WS
  misc_feature: MA Experiment 20001905 PARAMETER Experiment Name: At_Drought_Reproduction_P Parameter: Timepoint (day) Value: 10
  misc_feature: MA Experiment 20001905 PARAMETER Experiment Name: At_Drought_Reproduction_P Parameter: Tissue Value: Rosettes
  misc_feature: MA Experiment 20001905 PARAMETER Experiment Name: At_Drought_Reproduction_P Parameter: Treatment Value: Drought vs. No Drought
attggaggagagaatgagttggtctctctgcagcacccatggggtctcctcttccatagctctcacttatggctttcgccatagaagaagatccaccttccgtattttcgccacctctgacggattagaacccaaggacgacccgccggaatctcctctcccttcctcatcctctgctctcggtaaagacttgaaaaaggttgttaacaagactgctgcaacctttgcccctagagcttccaccgccagtaaaaaccctgctctccctggaactactctttacaaagtttttgaggttcaaggctatgcatcgatgttcctcggaggtgtcctttctttcaacctcctctttccctccagcgaacctgatttatggaggttgatgggcatgtggtccatttggatgttcactattccttctcttcgggcacgagactgtccaagtaaagagaaagaggctcttaactacctctttctcatcgtccccttgctcaatgttgctattcccttcttttggaaatcatttgctcttgtctggtctgctgacacggttgccttctttgctatgtatgcctggaagcttggatggctggaaagaacagagtagggactactcgtgaatcatgatgggattagagcatgaagattctttgtcttttcttccttagaatggtacttcattcagcttatcgtgttaggtacgtgggtttaaggcaaatgaatgtgaacattgctctagaatgatatatgaactagccccttaaggaatatttcttgtaaatcttaaagttctgagatgaattattgttcaaaatacaagtgggagtacatatacgttttgtt

SEQ ID NO: 22636 - protein, 201 aa, Arabidopsis thaliana
  peptide (1)..(201): Ceres Seq. ID no. 13499554
  misc_feature (5)..(201): Homolog of NCBI NO: 18407519 NR Description: expressed protein [Arabidopsis thaliana]
  misc_feature (5)..(197): Homolog of NCBI NO: 25370849 NR Description: hypothetical protein At2g48070 [imported] -
LEERMSWSLCSTHGVSSSIALTYGFRHRRRSTFRIFATSDGLEPKDDPPESPLPSSSSALGKDLKKVVNKTAATFAPRASTASKNPALPGTTLYKVFEVQGYASMFLGGVLSFNLLFPSSEPDLWRLMGMWSIWMFTIPSLRARDCPSKEKEALNYLFLIVPLLNVAIPFFWKSFALVWSADTVAFFAMYAWKLGWLERTE

SEQ ID NO: 22637 - protein, 197 aa, Arabidopsis thaliana
  peptide (1)..(197): Ceres Seq. ID no. 13499555
  misc_feature (1)..(197): Homolog of NCBI NO: 18407519 NR Description: expressed protein [Arabidopsis thaliana]
  misc_feature (1)..(193): Homolog of NCBI NO: 25370849 NR Description: hypothetical protein At2g48070 [imported] -
MSWSLCSTHGVSSSIALTYGFRHRRRSTFRIFATSDGLEPKDDPPESPLPSSSSALGKDLKKVVNKTAATFAPRASTASKNPALPGTTLYKVFEVQGYASMFLGGVLSFNLLFPSSEPDLWRLMGMWSIWMFTIPSLRARDCPSKEKEALNYLFLIVPLLNVAIPFFWKSFALVWSADTVAFFAMYAWKLGWLERTE

SEQ ID NO: 22638 - DNA, 1035 bp, Arabidopsis thaliana
  misc_feature (1)..(1035): Ceres Seq. ID no. 13509220
  misc_feature: MA Experiment ID: 108434 Result: Down-regulated in Transcription
  misc_feature: MA Experiment 108434 PARAMETER Experiment Name: At_Root_Tips_cDNA_P Parameter: Tissue Value: Root Tips
  misc_feature: MA Experiment ID: 108461 Result: Up-regulated in Transcription
  misc_feature: MA Experiment 108461 PARAMETER Experiment Name: At_Germinating_Seeds_cDNA_P Parameter: Age (day) Value: 1 vs. 0
  misc_feature: MA Experiment 108461 PARAMETER Experiment Name: At_Germinating_Seeds_cDNA_P Parameter: Tissue Value: Germinating Seeds
  misc_feature: MA Experiment ID: 108462 Result: Up-regulated in Transcription
  misc_feature: MA Experiment 108462 PARAMETER Experiment Name: At_Germinating_Seeds_cDNA_P Parameter: Age (day) Value: 2 vs. 0
  misc_feature: MA Experiment 108462 PARAMETER Experiment Name: At_Germinating_Seeds_cDNA_P Parameter: Tissue Value: Germinating Seeds
  misc_feature: MA Experiment ID: 108464 Result: Up-regulated in Transcription
  misc_feature: MA Experiment 108464 PARAMETER Experiment Name: At_Germinating_Seeds_cDNA_P Parameter: Age (day) Value: 4 vs. 0
  misc_feature: MA Experiment 108464 PARAMETER Experiment Name: At_Germinating_Seeds_cDNA_P Parameter: Tissue Value: Germinating Seeds
  misc_feature: MA Experiment ID: 108488 Result: Up-regulated in Transcription
  misc_feature: MA Experiment ID: 108489 Result: Down-regulated in Transcription
  misc_feature: MA Experiment ID: 108595 Result: Down-regulated in Transcription
  misc_feature: MA Experiment 108595 PARAMETER Experiment Name: At_Ler-pi_Ovule_cDNA_P Parameter: Plant Line Value: null
  misc_feature: MA Experiment ID: 20000314 Result: Down-regulated in Transcription
  misc_feature: MA Experiment 20000314 PARAMETER Experiment Name: At_14day_Shoots-Roots_Sub_P Parameter: Age (day) Value: 14
  misc_feature: MA Experiment 20000314 PARAMETER Experiment Name: At_14day_Shoots-Roots_Sub_P Parameter: Organism Value: A. thaliana
  misc_feature: MA Experiment 20000314 PARAMETER Experiment Name: At_14day_Shoots-Roots_Sub_P Parameter: Plant Line Value: WS
  misc_feature: MA Experiment 20000314 PARAMETER Experiment Name: At_14day_Shoots-Roots_Sub_P Parameter: Tissue Value: Roots vs. Whole Plant
  misc_feature: MA Experiment ID: 20000315 Result: Up-regulated in Transcription
  misc_feature: MA Experiment 20000315 PARAMETER Experiment Name: At_14day_Shoots-Roots_Sub_P Parameter: Age (day) Value: 14
  misc_feature: MA Experiment 20000315 PARAMETER Experiment Name: At_14day_Shoots-Roots_Sub_P Parameter: Organism Value: A. thaliana
  misc_feature: MA Experiment 20000315 PARAMETER Experiment Name: At_14day_Shoots-Roots_Sub_P Parameter: Plant Line Value: WS
  misc_feature: MA Experiment 20000315 PARAMETER Experiment Name: At_14day_Shoots-Roots_Sub_P Parameter: Tissue Value: Shoots vs. Whole Plant
  misc_feature: MA Experiment ID: 20000328 Result: Up-regulated in Transcription
  misc_feature: MA Experiment 20000328 PARAMETER Experiment Name: At_42deg_Heat_Sub_P Parameter: Age (day) Value: 14
  misc_feature: MA Experiment 20000328 PARAMETER Experiment Name: At_42deg_Heat_Sub_P Parameter: Organism Value: A. thaliana
  misc_feature: MA Experiment 20000328 PARAMETER Experiment Name: At_42deg_Heat_Sub_P Parameter: Plant Line Value: WS
  misc_feature: MA Experiment 20000328 PARAMETER Experiment Name: At_42deg_Heat_Sub_P Parameter: Temperature (deg C) Value: 42 vs. 22
  misc_feature: MA Experiment 20000328 PARAMETER Experiment Name: At_42deg_Heat_Sub_P Parameter: Timepoint (hr) Value: 6
  misc_feature: MA Experiment 20000328 PARAMETER Experiment Name: At_42deg_Heat_Sub_P Parameter: Tissue Value: Aerial
  misc_feature: MA Experiment ID: 20001807 Result: Up-regulated in Transcription
  misc_feature: MA Experiment 20001807 PARAMETER Experiment Name: At_50mM_NH4NO3_L-to-H_Sub_P Parameter: Timepoint (hr) Value: 6
  misc_feature: MA Experiment 20001807 PARAMETER Experiment Name: At_50mM_NH4NO3_L-to-H_Sub_P Parameter: Tissue Value: Leaf
  misc_feature: MA Experiment 20001807 PARAMETER Experiment Name: At_50mM_NH4NO3_L-to-H_Sub_P Parameter: Treatment Value: 50mM NH4NO3 vs 100mM Mannitol
accacccatttcttggcttacaacaacaaatcttaaacgttttactttgtgctgcactactcaacctcaatggccgcctcaacaatggctctctcctcccctgccttcgccggtaaggccgtcaagctttcccccgcggcatctgaagtccttggaagcggccgtgtgacaatgaggaagactgttgccaagccaaagggcccatcaggcagcccatggtacggatctgaccgtgtcaagtacttgggtccattctctggcgaatcaccgagctaccttaccggagagttccccggagactacggatgggacaccgccggactttcagctgaccccgagacattcgcaaggaaccgtgagctagaagttatccacagcaggtgggcaatgctcggagccctaggctgcgtcttccctgagcttttggctaggaacggagtcaagttcggagaggcggtttggttcaaggccggttcacagatcttcagcgatggagggctcgattacttgggaaaccctagcttagttcacgctcagagcattttggccatttgggccactcaagttatcttgatgggagctgttgaaggctacagagtcgcaggaaatgggccattgggagaggccgaggacttgctttaccccggtggcagcttcgacccattgggtcttgctaccgacccagaggctttcgcggagttgaaggtgaaggagctcaagaacggaagattggctatgttctctatgtttggattcttcgttcaagccattgtcactggtaagggaccgatagagaaccttgctgaccatttggccgatccagtcaacaacaacgcatgggccttcgcaaccaactttgttcccggaaagtgagccaagttttatcagtttgtattttgcttttctttcagtcttttgaattcgagtgagagacatgaggagaaagagaaggttgtatgtgatggtttgagactttcagatgtaaatttgcaagactttgtatgatttgtcattaatcaaactcatttttctcta

SEQ ID NO: 22639 - protein, 267 aa, Arabidopsis thaliana
  peptide (1)..(267): Ceres Seq. ID no. 13509221
  misc_feature (65)..(234): Pfam Name: Chlorophyll A-B binding protein Pfam Description: Chlorophyll A-B binding protein
  misc_feature (65)..(234): Pfam Name: Chlorophyll A-B binding protein Pfam Description: Chlorophyll A-B binding protein
  misc_feature (65)..(234): Pfam Name: Chlorophyll A-B binding protein Pfam Description: Chlorophyll A-B binding protein
  misc_feature (1)..(267): Homolog of NCBI NO: 115819 NR Description: Chlorophyll A-B binding protein 1B, chloroplast
  misc_feature (19)..(267): Homolog of NCBI NO: 12324161 NR Description: chlorophyll A-B-binding protein 2 precursor, 5'
  misc_feature (1)..(267): Homolog of NCBI NO: 21592428 NR Description: putative photosystem II type I chlorophyll a b
  misc_feature (1)..(267): Homolog of NCBI NO: 18266039 NR Description: chlorophyll a/b binding protein [Brassica
  misc_feature (1)..(267): Homolog of NCBI NO: 18403549 NR Description: photosystem II type I chlorophyll a /b binding
  misc_feature (1)..(267): Homolog of NCBI NO: 115819 NR Description: Chlorophyll A-B binding protein 1B, chloroplast
  misc_feature (1)..(267): Homolog of NCBI NO: 21592428 NR Description: putative photosystem II type I chlorophyll a b
  misc_feature (1)..(267): Homolog of NCBI NO: 18403549 NR Description: photosystem II type I chlorophyll a /b binding
  misc_feature (1)..(267): Homolog of NCBI NO: 18266039 NR Description: chlorophyll a/b binding protein [Brassica
  misc_feature (1)..(267): Homolog of NCBI NO: 21592428 NR Description: putative photosystem II type I chlorophyll a b
  misc_feature (19)..(267): Homolog of NCBI NO: 12324161 NR Description: chlorophyll A-B-binding protein 2 precursor, 5'
  misc_feature (1)..(267): Homolog of NCBI NO: 115819 NR Description: Chlorophyll A-B binding protein 1B, chloroplast
  misc_feature (1)..(267): Homolog of NCBI NO: 15220615 NR Description: light-harvesting chlorophyll a/b binding protein
  misc_feature (1)..(267): Homolog of NCBI NO: 18397286 NR Description: photosystem II type I chlorophyll a /b binding
  misc_feature (1)..(267): Homolog of NCBI NO: 17473828 NR Description: chlorophyll a/b-binding protein [Arabidopsis
  misc_feature (1)..(267): Homolog of NCBI NO: 18403546 NR Description: photosystem II type I chlorophyll a /b binding
  misc_feature (1)..(267): Homolog of NCBI NO: 115778 NR Description: Chlorophyll A-B binding protein 1, chloroplast
  misc_feature (1)..(267): Homolog of NCBI NO: 15220615 NR Description: light-harvesting chlorophyll a/b binding protein
  misc_feature (1)..(267): Homolog of NCBI NO: 18397286 NR Description: photosystem II type I chlorophyll a /b binding
  misc_feature (1)..(267): Homolog of NCBI NO: 17473828 NR Description: chlorophyll a/b-binding protein [Arabidopsis
  misc_feature (1)..(267): Homolog of NCBI NO: 18403546 NR Description: photosystem II type I chlorophyll a /b binding
  misc_feature (1)..(267): Homolog of NCBI NO: 115778 NR Description: Chlorophyll A-B binding protein 1, chloroplast
  misc_feature (1)..(267): Homolog of NCBI NO: 18403549 NR Description: photosystem II type I chlorophyll a /b binding
  misc_feature (1)..(267): Homolog of NCBI NO: 18266039 NR Description: chlorophyll a/b binding protein [Brassica
  misc_feature (19)..(267): Homolog of NCBI NO: 12324161 NR Description: chlorophyll A-B-binding protein 2 precursor, 5'
  misc_feature (1)..(267): Homolog of NCBI NO: 115778 NR Description: Chlorophyll A-B binding protein 1, chloroplast
  misc_feature (1)..(267): Homolog of NCBI NO: 18403546 NR Description: photosystem II type I chlorophyll a /b binding
  misc_feature (1)..(267): Homolog of NCBI NO: 17473828 NR Description: chlorophyll a/b-binding protein [Arabidopsis
  misc_feature (1)..(267): Homolog of NCBI NO: 18397286 NR Description: photosystem II type I chlorophyll a /b binding
  misc_feature (1)..(267): Homolog of NCBI NO: 15220615 NR Description: light-harvesting chlorophyll a/b binding protein
MAASTMALSSPAFAGKAVKLSPAASEVLGSGRVTMRKTVAKPKGPSGSPWYGSDRVKYLGPFSGESPSYLTGEFPGDYGWDTAGLSADPETFARNRELEVIHSRWAMLGALGCVFPELLARNGVKFGEAVWFKAGSQIFSDGGLDYLGNPSLVHAQSILAIWATQVILMGAVEGYRVAGNGPLGEAEDLLYPGGSFDPLGLATDPEAFAELKVKELKNGRLAMFSMFGFFVQAIVTGKGPIENLADHLADPVNNNAWAFATNFVPGK

SEQ ID NO: 22640 - protein, 262 aa, Arabidopsis thaliana
  peptide (1)..(262): Ceres Seq. ID no. 13509222
  misc_feature (60)..(229): Pfam Name: Chlorophyll A-B binding protein Pfam Description: Chlorophyll A-B binding protein
  misc_feature (60)..(229): Pfam Name: Chlorophyll A-B binding protein Pfam Description: Chlorophyll A-B binding protein
  misc_feature (60)..(229): Pfam Name: Chlorophyll A-B binding protein Pfam Description: Chlorophyll A-B binding protein
  misc_feature (1)..(262): Homolog of NCBI NO: 115819 NR Description: Chlorophyll A-B binding protein 1B, chloroplast
  misc_feature (14)..(262): Homolog of NCBI NO: 12324161 NR Description: chlorophyll A-B-binding protein 2 precursor, 5'
  misc_feature (1)..(262): Homolog of NCBI NO: 21592428 NR Description: putative photosystem II type I chlorophyll a b
  misc_feature (1)..(262): Homolog of NCBI NO: 18266039 NR Description: chlorophyll a/b binding protein [Brassica
  misc_feature (1)..(262): Homolog of NCBI NO: 18403549 NR Description: photosystem II type I chlorophyll a /b binding
  misc_feature (1)..(262): Homolog of NCBI NO: 115819 NR Description: Chlorophyll A-B binding protein 1B, chloroplast
  misc_feature (1)..(262): Homolog of NCBI NO: 21592428 NR Description: putative photosystem II type I chlorophyll a b
  misc_feature (1)..(262): Homolog of NCBI NO: 18403549 NR Description: photosystem II type I chlorophyll a /b binding
  misc_feature (1)..(262): Homolog of NCBI NO: 18266039 NR Description: chlorophyll a/b binding protein [Brassica
  misc_feature (1)..(262): Homolog of NCBI NO: 21592428 NR Description: putative photosystem II type I chlorophyll a b
  misc_feature (14)..(262): Homolog of NCBI NO: 12324161 NR Description: chlorophyll A-B-binding protein 2 precursor, 5'
  misc_feature (1)..(262): Homolog of NCBI NO: 115819 NR Description: Chlorophyll A-B binding protein 1B, chloroplast
  misc_feature (1)..(262): Homolog of NCBI NO: 15220615 NR Description: light-harvesting chlorophyll a/b binding protein
  misc_feature (1)..(262): Homolog of NCBI NO: 18397286 NR Description: photosystem II type I chlorophyll a /b binding
  misc_feature (1)..(262): Homolog of NCBI NO: 17473828 NR Description: chlorophyll a/b-binding protein [Arabidopsis
  misc_feature (1)..(262): Homolog of NCBI NO: 18403546 NR Description: photosystem II type I chlorophyll a /b binding
  misc_feature (1)..(262): Homolog of NCBI NO: 115778 NR Description: Chlorophyll A-B binding protein 1, chloroplast
  misc_feature (1)..(262): Homolog of NCBI NO: 15220615 NR Description: light-harvesting chlorophyll a/b binding protein
  misc_feature (1)..(262): Homolog of NCBI NO: 18397286 NR Description: photosystem II type I chlorophyll a /b binding
  misc_feature (1)..(262): Homolog of NCBI NO: 17473828 NR Description: chlorophyll a/b-binding protein [Arabidopsis
  misc_feature (1)..(262): Homolog of NCBI NO: 18403546 NR Description: photosystem II type I chlorophyll a /b binding
  misc_feature (1)..(262): Homolog of NCBI NO: 115778 NR Description: Chlorophyll A-B binding protein 1, chloroplast
  misc_feature (1)..(262): Homolog of NCBI NO: 18403549 NR Description: photosystem II type I chlorophyll a /b binding
  misc_feature (1)..(262): Homolog of NCBI NO: 18266039 NR Description: chlorophyll a/b binding protein [Brassica
  misc_feature (14)..(262): Homolog of NCBI NO: 12324161 NR Description: chlorophyll A-B-binding protein 2 precursor, 5'
  misc_feature (1)..(262): Homolog of NCBI NO: 115778 NR Description: Chlorophyll A-B binding protein 1, chloroplast
  misc_feature (1)..(262): Homolog of NCBI NO: 18403546 NR Description: photosystem II type I chlorophyll a /b binding
  misc_feature (1)..(262): Homolog of NCBI NO: 17473828 NR Description: chlorophyll a/b-binding protein [Arabidopsis
  misc_feature (1)..(262): Homolog of NCBI NO: 18397286 NR Description: photosystem II type I chlorophyll a /b binding
  misc_feature (1)..(262): Homolog of NCBI NO: 15220615 NR Description: light-harvesting chlorophyll a/b binding protein
MALSSPAFAGKAVKLSPAASEVLGSGRVTMRKTVAKPKGPSGSPWYGSDRVKYLGPFSGESPSYLTGEFPGDYGWDTAGLSADPETFARNRELEVIHSRWAMLGALGCVFPELLARNGVKFGEAVWFKAGSQIFSDGGLDYLGNPSLVHAQSILAIWATQVILMGAVEGYRVAGNGPLGEAEDLLYPGGSFDPLGLATDPEAFAELKVKELKNGRLAMFSMFGFFVQAIVTGKGPIENLADHLADPVNNNAWAFATNFVPGK

SEQ ID NO: 22641 - protein, 233 aa, Arabidopsis thaliana; identical to SEQ ID NO: 21214
  peptide (1)..(233): Ceres Seq. ID no. 13509223
  misc_feature (31)..(200): Pfam Name: Chlorophyll A-B binding protein Pfam Description: Chlorophyll A-B binding protein
  misc_feature (31)..(200): Pfam Name: Chlorophyll A-B binding protein Pfam Description: Chlorophyll A-B binding protein
  misc_feature (31)..(200): Pfam Name: Chlorophyll A-B binding protein Pfam Description: Chlorophyll A-B binding protein
  misc_feature (1)..(233): Homolog of NCBI NO: 115819 NR Description: Chlorophyll A-B binding protein 1B, chloroplast
  misc_feature (1)..(233): Homolog of NCBI NO: 12324161 NR Description: chlorophyll A-B-binding protein 2 precursor, 5'
  misc_feature (1)..(233): Homolog of NCBI NO: 21592428 NR Description: putative photosystem II type I chlorophyll a b
  misc_feature (1)..(233): Homolog of NCBI NO: 18266039 NR Description: chlorophyll a/b binding protein [Brassica
  misc_feature (1)..(233): Homolog of NCBI NO: 18403549 NR Description: photosystem II type I chlorophyll a /b binding
  misc_feature (1)..(233): Homolog of NCBI NO: 115819 NR Description: Chlorophyll A-B binding protein 1B, chloroplast
  misc_feature (1)..(233): Homolog of NCBI NO: 21592428 NR Description: putative photosystem II type I chlorophyll a b
  misc_feature (1)..(233): Homolog of NCBI NO: 18403549 NR Description: photosystem II type I chlorophyll a /b binding
  misc_feature (1)..(233): Homolog of NCBI NO: 18266039 NR Description: chlorophyll a/b binding protein [Brassica
  misc_feature (1)..(233): Homolog of NCBI NO: 21592428 NR Description: putative photosystem II type I chlorophyll a b
  misc_feature (1)..(233): Homolog of NCBI NO: 12324161 NR Description: chlorophyll A-B-binding protein 2 precursor, 5'
  misc_feature (1)..(233): Homolog of NCBI NO: 115819 NR Description: Chlorophyll A-B binding protein 1B, chloroplast
  misc_feature (1)..(233): Homolog of NCBI NO: 15220615 NR Description: light-harvesting chlorophyll a/b binding protein
  misc_feature (1)..(233): Homolog of NCBI NO: 18397286 NR Description: photosystem II type I chlorophyll a /b binding
  misc_feature (1)..(233): Homolog of NCBI NO: 17473828 NR Description: chlorophyll a/b-binding protein [Arabidopsis
  misc_feature (1)..(233): Homolog of NCBI NO: 18403546 NR Description: photosystem II type I chlorophyll a /b binding
  misc_feature (1)..(233): Homolog of NCBI NO: 115778 NR Description: Chlorophyll A-B binding protein 1, chloroplast
  misc_feature (1)..(233): Homolog of NCBI NO: 15220615 NR Description: light-harvesting chlorophyll a/b binding protein
  misc_feature (1)..(233): Homolog of NCBI NO: 18397286 NR Description: photosystem II type I chlorophyll a /b binding
  misc_feature (1)..(233): Homolog of NCBI NO: 17473828 NR Description: chlorophyll a/b-binding protein [Arabidopsis
  misc_feature (1)..(233): Homolog of NCBI NO: 18403546 NR Description: photosystem II type I chlorophyll a /b binding
  misc_feature (1)..(233): Homolog of NCBI NO: 115778 NR Description: Chlorophyll A-B binding protein 1, chloroplast
  misc_feature (1)..(233): Homolog of NCBI NO: 18403549 NR Description: photosystem II type I chlorophyll a /b binding
  misc_feature (1)..(233): Homolog of NCBI NO: 18266039 NR Description: chlorophyll a/b binding protein [Brassica
  misc_feature (1)..(233): Homolog of NCBI NO: 12324161 NR Description: chlorophyll A-B-binding protein 2 precursor, 5'
  misc_feature (1)..(233): Homolog of NCBI NO: 115778 NR Description: Chlorophyll A-B binding protein 1, chloroplast
  misc_feature (1)..(233): Homolog of NCBI NO: 18403546 NR Description: photosystem II type I chlorophyll a /b binding
  misc_feature (1)..(233): Homolog of NCBI NO: 17473828 NR Description: chlorophyll a/b-binding protein [Arabidopsis
  misc_feature (1)..(233): Homolog of NCBI NO: 18397286 NR Description: photosystem II type I chlorophyll a /b binding
  misc_feature (1)..(233): Homolog of NCBI NO: 15220615 NR Description: light-harvesting chlorophyll a/b binding protein

SEQ ID NO: 22642 - DNA, 1076 bp, Arabidopsis thaliana
  misc_feature (1)..(1076): Ceres Seq. ID no. 13588829
  misc_feature: MA Experiment ID: 20000794 Result: Down-regulated in Transcription
  misc_feature: MA Experiment 20000794 PARAMETER Experiment Name: At_Petals_P Parameter: Age (day) Value: 23-25 days
  misc_feature: MA Experiment 20000794 PARAMETER Experiment Name: At_Petals_P Parameter: Plant Line Value: WS
  misc_feature: MA Experiment 20000794 PARAMETER Experiment Name: At_Petals_P Parameter: Tissue Value: Petals vs. Whole plant
  misc_feature: MA Experiment ID: 20001451 Result: Down-regulated in Transcription
  misc_feature: MA Experiment 20001451 PARAMETER Experiment Name: At_Far-red-induction_P Parameter: Age (day) Value: 7
  misc_feature: MA Experiment 20001451 PARAMETER Experiment Name: At_Far-red-induction_P Parameter: Light Value: Far-red vs. White
  misc_feature: MA Experiment 20001451 PARAMETER Experiment Name: At_Far-red-induction_P Parameter: Organism Value: A. thaliana
  misc_feature: MA Experiment 20001451 PARAMETER Experiment Name: At_Far-red-induction_P Parameter: Plant Line Value: Columbia
  misc_feature: MA Experiment 20001451 PARAMETER Experiment Name: At_Far-red-induction_P Parameter: Timepoint (hr) Value: 24
  misc_feature: MA Experiment 20001451 PARAMETER Experiment Name: At_Far-red-induction_P Parameter: Tissue Value: Whole Plant
  misc_feature: MA Experiment ID: 20001557 Result: Up-regulated in Transcription
  misc_feature: MA Experiment 20001557 PARAMETER Experiment Name: At_Drought_Soil_Dry_P Parameter: Age (day) Value: 27
  misc_feature: MA Experiment 20001557 PARAMETER Experiment Name: At_Drought_Soil_Dry_P Parameter: Organism Value: A. thaliana
  misc_feature: MA Experiment 20001557 PARAMETER Experiment Name: At_Drought_Soil_Dry_P Parameter: Plant Line Value: WS
  misc_feature: MA Experiment 20001557 PARAMETER Experiment Name: At_Drought_Soil_Dry_P Parameter: Post Timepoint (hr) Value: 3
  misc_feature: MA Experiment 20001557 PARAMETER Experiment Name: At_Drought_Soil_Dry_P Parameter: Post-Treatment Value: Re-Water vs. No Drought
  misc_feature: MA Experiment 20001557 PARAMETER Experiment Name: At_Drought_Soil_Dry_P Parameter: Timepoint (day) Value: 13
  misc_feature: MA Experiment 20001557 PARAMETER Experiment Name: At_Drought_Soil_Dry_P Parameter: Treatment Value: Drought vs. No Drought
  misc_feature: MA Experiment ID: 20001558 Result: Up-regulated in Transcription
  misc_feature: MA Experiment 20001558 PARAMETER Experiment Name: At_Drought_Soil_Dry_P Parameter: Age (day) Value: 27
  misc_feature: MA Experiment 20001558 PARAMETER Experiment Name: At_Drought_Soil_Dry_P Parameter: Organism Value: A. thaliana
  misc_feature: MA Experiment 20001558 PARAMETER Experiment Name: At_Drought_Soil_Dry_P Parameter: Plant Line Value: WS
  misc_feature: MA Experiment 20001558 PARAMETER Experiment Name: At_Drought_Soil_Dry_P Parameter: Post Timepoint (hr) Value: 6
  misc_feature: MA Experiment 20001558 PARAMETER Experiment Name: At_Drought_Soil_Dry_P Parameter: Post-Treatment Value: Re-Water vs. No Drought
  misc_feature: MA Experiment 20001558 PARAMETER Experiment Name: At_Drought_Soil_Dry_P Parameter: Timepoint (day) Value: 13
  misc_feature: MA Experiment 20001558 PARAMETER Experiment Name: At_Drought_Soil_Dry_P Parameter: Treatment Value: Drought vs. No Drought
  misc_feature: MA Experiment ID: 20001757 Result: Up-regulated in Transcription
  misc_feature: MA Experiment 20001757 PARAMETER Experiment Name: At_50mM_NH4NO3_L-to-H_P Parameter: Timepoint (hr) Value: 6
  misc_feature: MA Experiment 20001757 PARAMETER Experiment Name: At_50mM_NH4NO3_L-to-H_P Parameter: Tissue Value: Leaf
  misc_feature: MA Experiment 20001757 PARAMETER Experiment Name: At_50mM_NH4NO3_L-to-H_P Parameter: Treatment Value: 50mM NH4NO3 vs 100mM Mannitol
aacacgagcttaccgattctcttcgtctcaacatttagggtttcagagatcggctgattttcacatccacaagtatggcgactcaaatcagcaagaagagaaagtttgtagcggatggtgtattctacgctgaattgaatgaggttctcacaagagagctagcagaggatggttactctggtgttgaggttagggttactccaatgaggactgagattatcatcagagctactcgtactcagaatgttcttggtgagaaggggaggagaattagggaattgacatctcttgtccagaagagattcaagtttccagttgacagtgttgagctctatgctgagaaggttaacaacagaggtctctgtgccattgctcaggctgagtctctacgttacaagcttctcggtggtcttgctgttcgcagggcctgttatggtgttttgagatttgttatggagagtggagctaagggatgtgaggtcatcgtgagtggaaagctccgtgctgcacgtgctaagtccatgaagttcaaggatggttacatggtttcatctggtcaaccaactaaggaatacatcgatgctgcagtgagacatgttttgctcagacagggggtgttgggaatcaaggtgaagatcatgcttgactgggaccctacgggcaaatcaggaccaaagacaccattgcctgatgttgtgatcattcatgctcctaaagatgatgttgtctactctgcacctgctcaggctgctgctccagttactcttgtgcaagaagctccactcacaaccgtagattaccctgagatgattcctccagtggcctagagaagaccttttttactattactccatgggattttgttctttttgttataacttttctacttttgacactctctagtcgtatctcttatatcctccaagcagacaagttttttctcatgttgtttcttaacctatgtcaagttttctggaggttgaatgcttttagttccatgatttttttgttcttaagactcgtaataagaaaaagaatgacgacaacaatgcctggtatttgatgttgttactttg

SEQ ID NO: 22643 - protein, 250 aa, Arabidopsis thaliana [sequence omitted]

SEQ ID NO: 22644 - protein, 207 aa, Arabidopsis thaliana
  peptide (1)..(207): Ceres Seq. ID no. 15220913
  misc_feature (61)..(145): Pfam Name: Ribosomal protein S3, C-terminal domain Pfam Description: Ribosomal protein S3, C-terminal domain
  misc_feature (61)..(145): Pfam Name: Ribosomal protein S3, C-terminal domain Pfam Description: Ribosomal protein S3, C-terminal domain
  misc_feature (61)..(145): Pfam Name: Ribosomal protein S3, C-terminal domain Pfam Description: Ribosomal protein S3, C-terminal domain
  misc_feature (1)..(179): Homolog of NCBI NO: 27735393 NR Description: Similar to ribosomal protein S3 [Xenopus laevis]
  misc_feature (1)..(206): Homolog of NCBI NO: 2500399 NR Description: 40S ribosomal protein S3
  misc_feature (1)..(179): Homolog of NCBI NO: 15718687 NR Description: ribosomal protein S3; 40S ribosomal protein S3
  misc_feature (1)..(179): Homolog of NCBI NO: 12847921 NR Description: unnamed protein product [Mus musculus]
  misc_feature (1)..(185): Homolog of NCBI NO: 133940 NR Description: 40S ribosomal protein S3A (S1A)
  misc_feature (1)..(179): Homolog of NCBI NO: 27735393 NR Description: Similar to ribosomal protein S3 [Xenopus laevis]
  misc_feature (1)..(179): Homolog of NCBI NO: 15718687 NR Description: ribosomal protein S3; 40S ribosomal protein S3
  misc_feature (1)..(185): Homolog of NCBI NO: 133940 NR Description: 40S ribosomal protein S3A (S1A)
  misc_feature (1)..(179): Homolog of NCBI NO: 12847921 NR Description: unnamed protein product [Mus musculus]
  misc_feature (1)..(179): Homolog of NCBI NO: 15718687 NR Description: ribosomal protein S3; 40S ribosomal protein S3
  misc_feature (1)..(206): Homolog of NCBI NO: 2500399 NR Description: 40S ribosomal protein S3
  misc_feature (1)..(179): Homolog of NCBI NO: 27735393 NR Description: Similar to ribosomal protein S3 [Xenopus laevis]
  misc_feature (1)..(207): Homolog of NCBI NO: 15225107 NR Description: 40S ribosomal protein S3 (RPS3A) [Arabidopsis
  misc_feature (1)..(204): Homolog of NCBI NO: 15232352 NR Description: 40S ribosomal protein S3 (RPS3B) [Arabidopsis
  misc_feature (1)..(207): Homolog of NCBI NO: 15238533 NR Description: 40S ribosomal protein S3 (RPS3C) [Arabidopsis
  misc_feature (1)..(186): Homolog of NCBI NO: 14192875 NR Description: Putative 40S ribosomal protein; contains
  misc_feature (1)..(180): Homolog of NCBI NO: 22204124 NR Description: putative 40S ribosomal protein S3 [Triticum
  misc_feature (1)..(207): Homolog of NCBI NO: 15225107 NR Description: 40S ribosomal protein S3 (RPS3A) [Arabidopsis
  misc_feature (1)..(204): Homolog of NCBI NO: 15232352 NR Description: 40S ribosomal protein S3 (RPS3B) [Arabidopsis
  misc_feature (1)..(207): Homolog of NCBI NO: 15238533 NR Description: 40S ribosomal protein S3 (RPS3C) [Arabidopsis
  misc_feature (1)..(186): Homolog of NCBI NO: 14192875 NR Description: Putative 40S ribosomal protein; contains
  misc_feature (1)..(180): Homolog of NCBI NO: 22204124 NR Description: putative 40S ribosomal protein S3 [Triticum
  misc_feature (1)..(185): Homolog of NCBI NO: 133940 NR Description: 40S ribosomal protein S3A (S1A)
  misc_feature (1)..(179): Homolog of NCBI NO: 12847921 NR Description: unnamed protein product [Mus musculus]
  misc_feature (1)..(206): Homolog of NCBI NO: 2500399 NR Description: 40S ribosomal protein S3
  misc_feature (1)..(180): Homolog of NCBI NO: 22204124 NR Description: putative 40S ribosomal protein S3 [Triticum
  misc_feature (1)..(186): Homolog of NCBI NO: 14192875 NR Description: Putative 40S ribosomal protein; contains
  misc_feature (1)..(207): Homolog of NCBI NO: 15238533 NR Description: 40S ribosomal protein S3 (RPS3C) [Arabidopsis
  misc_feature (1)..(204): Homolog of NCBI NO: 15232352 NR Description: 40S ribosomal protein S3 (RPS3B) [Arabidopsis
  misc_feature (1)..(207): Homolog of NCBI NO: 15225107 NR Description: 40S ribosomal protein S3 (RPS3A) [Arabidopsis
MRTEIIIRATRTQNVLGEKGRRIRELTSLVQKRFKFPVDSVELYAEKVNNRGLCAIAQAESLRYKLLGGLAVRRACYGVLRFVMESGAKGCEVIVSGKLRAARAKSMKFKDGYMVSSGQPTKEYIDAAVRHVLLRQGVLGIKVKIMLDWDPTGKSGPKTPLPDVVIIHAPKDDVVYSAPAQAAAPVTLVQEAPLTTVDYPEMIPPVA

SEQ ID NO: 22645 - DNA, 1710 bp, Arabidopsis thaliana
  misc_feature (1)..(1710): Ceres Seq. ID no. 13494221
  misc_feature: MA Experiment ID: 108488 Result: Down-regulated in Transcription
  misc_feature: MA Experiment ID: 108489 Result: Up-regulated in Transcription
  misc_feature: MA Experiment ID: 108561 Result: Up-regulated in Transcription
  misc_feature: MA Experiment 108561 PARAMETER Experiment Name: At_100uM_ABA_cDNA_P Parameter: Timepoint (hr) Value: 6
  misc_feature: MA Experiment 108561 PARAMETER Experiment Name: At_100uM_ABA_cDNA_P Parameter: Tissue Value: Aerial
  misc_feature: MA Experiment 108561 PARAMETER Experiment Name: At_100uM_ABA_cDNA_P Parameter: Treatment Value: 100uM ABA vs. No Treatment
  misc_feature: MA Experiment ID: 108595 Result: Up-regulated in Transcription
  misc_feature: MA Experiment 108595 PARAMETER Experiment Name: At_Ler-pi_Ovule_cDNA_P Parameter: Plant Line Value: null
  misc_feature: MA Experiment ID: 20000070 Result: Up-regulated in Transcription
  misc_feature: MA Experiment 20000070 PARAMETER Experiment Name: At_100uM_ABA_Mutants_cDNA_P Parameter: Plant Line Value: CS24
  misc_feature: MA Experiment 20000070 PARAMETER Experiment Name: At_100uM_ABA_Mutants_cDNA_P Parameter: Timepoint (hr) Value: 6
  misc_feature: MA Experiment 20000070 PARAMETER Experiment Name: At_100uM_ABA_Mutants_cDNA_P Parameter: Tissue Value: Aerial
  misc_feature: MA Experiment 20000070 PARAMETER Experiment Name: At_100uM_ABA_Mutants_cDNA_P Parameter: Treatment Value: 100uM ABA vs. No Treatment
  misc_feature: MA Experiment ID: 20000071 Result: Up-regulated in Transcription
  misc_feature: MA Experiment 20000071 PARAMETER Experiment Name: At_100uM_ABA_Mutants_cDNA_P Parameter: Plant Line Value: CS8104
  misc_feature: MA Experiment 20000071 PARAMETER Experiment Name: At_100uM_ABA_Mutants_cDNA_P Parameter: Timepoint (hr) Value: 6
  misc_feature: MA Experiment 20000071 PARAMETER Experiment Name: At_100uM_ABA_Mutants_cDNA_P Parameter: Tissue Value: Aerial
  misc_feature: MA Experiment 20000071 PARAMETER Experiment Name: At_100uM_ABA_Mutants_cDNA_P Parameter: Treatment Value: 100uM ABA vs. No Treatment
  misc_feature: MA Experiment ID: 20000072 Result: Up-regulated in Transcription
  misc_feature: MA Experiment 20000072 PARAMETER Experiment Name: At_100uM_ABA_Mutants_cDNA_P Parameter: Plant Line Value: CS8105
  misc_feature: MA Experiment 20000072 PARAMETER Experiment Name: At_100uM_ABA_Mutants_cDNA_P Parameter: Timepoint (hr) Value: 6
  misc_feature: MA Experiment 20000072 PARAMETER Experiment Name: At_100uM_ABA_Mutants_cDNA_P Parameter: Tissue Value: Aerial
  misc_feature: MA Experiment 20000072 PARAMETER Experiment Name: At_100uM_ABA_Mutants_cDNA_P Parameter: Treatment Value: 100uM ABA vs. No Treatment
  misc_feature: MA Experiment ID: 20000086 Result: Up-regulated in Transcription
  misc_feature: MA Experiment 20000086 PARAMETER Experiment Name: At_100uM_ABA_Mutants_cDNA_P Parameter: Plant Line Value: CS22
  misc_feature: MA Experiment 20000086 PARAMETER Experiment Name: At_100uM_ABA_Mutants_cDNA_P Parameter: Timepoint (hr) Value: 6
  misc_feature: MA Experiment 20000086 PARAMETER Experiment Name: At_100uM_ABA_Mutants_cDNA_P Parameter: Tissue Value: Aerial
  misc_feature: MA Experiment 20000086 PARAMETER Experiment Name: At_100uM_ABA_Mutants_cDNA_P Parameter: Treatment Value: 100uM ABA vs. No Treatment
  misc_feature: MA Experiment ID: 20000179 Result: Up-regulated in Transcription
  misc_feature: MA Experiment 20000179 PARAMETER Experiment Name: At_Germinating_Seeds_P Parameter: Age (hr) Value: 6 vs. 0
  misc_feature: MA Experiment 20000179 PARAMETER Experiment Name: At_Germinating_Seeds_P Parameter: Tissue Value: Germinating Seeds
  misc_feature: MA Experiment ID: 20000184 Result: Down-regulated in Transcription
  misc_feature: MA Experiment 20000184 PARAMETER Experiment Name: At_Shoots__P Parameter: Age (day) Value: 7
  misc_feature: MA Experiment 20000184 PARAMETER Experiment Name: At_Shoots__P Parameter: Tissue Value: Shoots vs. Whole Plant
  misc_feature: MA Experiment ID: 20000227 Result: Down-regulated in Transcription
  misc_feature: MA Experiment 20000227 PARAMETER Experiment Name: At_Root-Tips-vs-Tops_P Parameter: Tissue Value: Root Tips vs. Root Tops
  misc_feature: MA Experiment ID: 20000234 Result: Down-regulated in Transcription
  misc_feature: MA Experiment 20000234 PARAMETER Experiment Name: At_Siliques_P Parameter: Age (day) Value: 21
  misc_feature: MA Experiment 20000234 PARAMETER Experiment Name: At_Siliques_P Parameter: Organism Value: A. thaliana
  misc_feature: MA Experiment 20000234 PARAMETER Experiment Name: At_Siliques_P Parameter: Plant Line Value: WS
  misc_feature: MA Experiment 20000234 PARAMETER Experiment Name: At_Siliques_P Parameter: Tissue Value: Less Than 5mm Siliques vs. Whole Plant
  misc_feature: MA Experiment ID: 20000235 Result: Down-regulated in Transcription
  misc_feature: MA Experiment 20000235 PARAMETER Experiment Name: At_Siliques_P Parameter: Age (day) Value: 21
  misc_feature: MA Experiment 20000235 PARAMETER Experiment Name: At_Siliques_P Parameter: Organism Value: A. thaliana
  misc_feature: MA Experiment 20000235 PARAMETER Experiment Name: At_Siliques_P Parameter: Plant Line Value: WS
  misc_feature: MA Experiment 20000235 PARAMETER Experiment Name: At_Siliques_P Parameter: Tissue Value: 5-10mm Siliques vs. Whole Plant
  misc_feature: MA Experiment ID: 20000265 Result: Down-regulated in Transcription
  misc_feature: MA Experiment 20000265 PARAMETER Experiment Name: At_Open_Flower_P Parameter: Age (day) Value: 21
  misc_feature: MA Experiment 20000265 PARAMETER Experiment Name: At_Open_Flower_P Parameter: Plant Line Value: WS
  misc_feature: MA Experiment 20000265 PARAMETER Experiment Name: At_Open_Flower_P Parameter: Tissue Value: Closed Flower vs. Whole Plant
  misc_feature: MA Experiment ID: 20000437 Result: Up-regulated in Transcription
  misc_feature: MA Experiment 20000437 PARAMETER Experiment Name: At_Drought_P Parameter: Age (day) Value: 8
  misc_feature: MA Experiment 20000437 PARAMETER Experiment Name: At_Drought_P Parameter: Organism Value: A. thaliana
  misc_feature: MA Experiment 20000437 PARAMETER Experiment Name: At_Drought_P Parameter: Plant Line Value: WS
  misc_feature: MA Experiment 20000437 PARAMETER Experiment Name: At_Drought_P Parameter: Timepoint (hr) Value: 24
  misc_feature: MA Experiment 20000437 PARAMETER Experiment Name: At_Drought_P Parameter: Tissue Value: Whole Plant
  misc_feature: MA Experiment 20000437 PARAMETER Experiment Name: At_Drought_P Parameter: Treatment Value: Drought vs. No Drought
  misc_feature: MA Experiment ID: 20000438 Result: Down-regulated in Transcription
  misc_feature: MA Experiment 20000438 PARAMETER Experiment Name: At_Shoots__P Parameter: Age (day) Value: 14
  misc_feature: MA Experiment 20000438 PARAMETER Experiment Name: At_Shoots__P Parameter: Tissue Value: Shoots vs. Whole Plant
  misc_feature: MA Experiment ID: 20000495 Result: Up-regulated in Transcription
  misc_feature: MA Experiment 20000495 PARAMETER Experiment Name: At_Guard_Cells_P Parameter: Harvest Date Value: 8/2/2002
  misc_feature: MA Experiment 20000495 PARAMETER Experiment Name: At_Guard_Cells_P Parameter: Organism Value: A. thaliana
  misc_feature: MA Experiment 20000495 PARAMETER Experiment Name: At_Guard_Cells_P Parameter: Tissue Value: Guard Cells vs. Leaves
  misc_feature: MA Experiment ID: 20000527 Result: Down-regulated in Transcription
  misc_feature: MA Experiment 20000527 PARAMETER Experiment Name: At_10percent_PEG_P Parameter: Age (day) Value: 20
  misc_feature: MA Experiment 20000527 PARAMETER Experiment Name: At_10percent_PEG_P Parameter: Organism Value: A. thaliana
  misc_feature: MA Experiment 20000527 PARAMETER Experiment Name: At_10percent_PEG_P Parameter: Plant Line Value: WS
  misc_feature: MA Experiment 20000527 PARAMETER Experiment Name: At_10percent_PEG_P Parameter: Timepoint (day) Value: 20
  misc_feature: MA Experiment 20000527 PARAMETER Experiment Name: At_10percent_PEG_P Parameter: Tissue Value: Whole Plant
  misc_feature: MA Experiment 20000527 PARAMETER Experiment Name: At_10percent_PEG_P Parameter: Treatment Value: 10percent PEG vs. No Treatment
  misc_feature: MA Experiment ID: 20000794 Result: Up-regulated in Transcription
  misc_feature: MA Experiment 20000794 PARAMETER Experiment Name: At_Petals_P Parameter: Age (day) Value: 23-25 days
  misc_feature: MA Experiment 20000794 PARAMETER Experiment Name: At_Petals_P Parameter: Plant Line Value: WS
  misc_feature: MA Experiment 20000794 PARAMETER Experiment Name: At_Petals_P Parameter: Tissue Value: Petals vs. Whole plant
  misc_feature: MA Experiment ID: 20001555 Result: Up-regulated in Transcription
  misc_feature: MA Experiment 20001555 PARAMETER Experiment Name: At_Drought_Soil_Dry_P Parameter: Age (day) Value: 24
  misc_feature: MA Experiment 20001555 PARAMETER Experiment Name: At_Drought_Soil_Dry_P Parameter: Organism Value: A. thaliana
  misc_feature: MA Experiment 20001555 PARAMETER Experiment Name: At_Drought_Soil_Dry_P Parameter: Plant Line Value: WS
  misc_feature: MA Experiment 20001555 PARAMETER Experiment Name: At_Drought_Soil_Dry_P Parameter: Post Timepoint (hr) Value: None
  misc_feature: MA Experiment 20001555 PARAMETER Experiment Name: At_Drought_Soil_Dry_P Parameter: Post-Treatment Value: None
  misc_feature: MA Experiment 20001555 PARAMETER Experiment Name: At_Drought_Soil_Dry_P Parameter: Timepoint (day) Value: 10
  misc_feature: MA Experiment 20001555 PARAMETER Experiment Name: At_Drought_Soil_Dry_P Parameter: Treatment Value: Drought vs. No Drought
  misc_feature: MA Experiment ID: 20001556 Result: Up-regulated in Transcription
  misc_feature: MA Experiment 20001556 PARAMETER Experiment Name: At_Drought_Soil_Dry_P Parameter: Age (day) Value: 26
  misc_feature: MA Experiment 20001556 PARAMETER Experiment Name: At_Drought_Soil_Dry_P Parameter: Organism Value: A. thaliana
  misc_feature: MA Experiment 20001556 PARAMETER Experiment Name: At_Drought_Soil_Dry_P Parameter: Plant Line Value: WS
  misc_feature: MA Experiment 20001556 PARAMETER Experiment Name: At_Drought_Soil_Dry_P Parameter: Post Timepoint (hr) Value: None
  misc_feature: MA Experiment 20001556 PARAMETER Experiment Name: At_Drought_Soil_Dry_P Parameter: Post-Treatment Value: None
  misc_feature: MA Experiment 20001556 PARAMETER Experiment Name: At_Drought_Soil_Dry_P Parameter: Timepoint (day) Value: 12
  misc_feature: MA Experiment 20001556 PARAMETER Experiment Name: At_Drought_Soil_Dry_P Parameter: Treatment Value: Drought vs. No Drought
  misc_feature: MA Experiment ID: 20001557 Result: Up-regulated in Transcription
  misc_feature: MA Experiment 20001557 PARAMETER Experiment Name: At_Drought_Soil_Dry_P Parameter: Age (day) Value: 27
  misc_feature: MA Experiment 20001557 PARAMETER Experiment Name: At_Drought_Soil_Dry_P Parameter: Organism Value: A. thaliana
  misc_feature: MA Experiment 20001557 PARAMETER Experiment Name: At_Drought_Soil_Dry_P Parameter: Plant Line Value: WS
  misc_feature: MA Experiment 20001557 PARAMETER Experiment Name: At_Drought_Soil_Dry_P Parameter: Post Timepoint (hr) Value: 3
  misc_feature: MA Experiment 20001557 PARAMETER Experiment Name: At_Drought_Soil_Dry_P Parameter: Post-Treatment Value: Re-Water vs. No Drought
  misc_feature: MA Experiment 20001557 PARAMETER Experiment Name: At_Drought_Soil_Dry_P Parameter: Timepoint (day) Value: 13
  misc_feature: MA Experiment 20001557 PARAMETER Experiment Name: At_Drought_Soil_Dry_P Parameter: Treatment Value: Drought vs. No Drought
  misc_feature: MA Experiment ID: 20001559 Result: Up-regulated in Transcription
  misc_feature: MA Experiment 20001559 PARAMETER Experiment Name: At_Drought_Soil_Dry_P Parameter: Age (day) Value: 28
  misc_feature: MA Experiment 20001559 PARAMETER Experiment Name: At_Drought_Soil_Dry_P Parameter: Organism Value: A. thaliana
  misc_feature: MA Experiment 20001559 PARAMETER Experiment Name: At_Drought_Soil_Dry_P Parameter: Plant Line Value: WS
  misc_feature: MA Experiment 20001559 PARAMETER Experiment Name: At_Drought_Soil_Dry_P Parameter: Post Timepoint (hr) Value: 29
  misc_feature: MA Experiment 20001559 PARAMETER Experiment Name: At_Drought_Soil_Dry_P Parameter: Post-Treatment Value: Re-Water vs. No Drought
  misc_feature: MA Experiment 20001559 PARAMETER Experiment Name: At_Drought_Soil_Dry_P Parameter: Timepoint (day) Value: 14
  misc_feature: MA Experiment 20001559 PARAMETER Experiment Name: At_Drought_Soil_Dry_P Parameter: Treatment Value: Drought vs. No Drought
  misc_feature: MA Experiment ID: 20001904 Result: Up-regulated in Transcription
  misc_feature: MA Experiment 20001904 PARAMETER Experiment Name: At_Drought_Reproduction_P Parameter: Age (day) Value: 37
  misc_feature: MA Experiment 20001904 PARAMETER Experiment Name: At_Drought_Reproduction_P Parameter: Organism Value: A. thaliana
  misc_feature: MA Experiment 20001904 PARAMETER Experiment Name: At_Drought_Reproduction_P Parameter: Plant Line Value: WS
  misc_feature: MA Experiment 20001904 PARAMETER Experiment Name: At_Drought_Reproduction_P Parameter: Timepoint (day) Value: 7
  misc_feature: MA Experiment 20001904 PARAMETER Experiment Name: At_Drought_Reproduction_P Parameter: Tissue Value: Rosettes
  misc_feature: MA Experiment 20001904 PARAMETER Experiment Name: At_Drought_Reproduction_P Parameter: Treatment Value: Drought vs. No Drought
  misc_feature: MA Experiment ID: 20001905 Result: Up-regulated in Transcription
  misc_feature: MA Experiment 20001905 PARAMETER Experiment Name: At_Drought_Reproduction_P Parameter: Age (day) Value: 40
  misc_feature: MA Experiment 20001905 PARAMETER Experiment Name: At_Drought_Reproduction_P Parameter: Organism Value: A. thaliana
  misc_feature: MA Experiment 20001905 PARAMETER Experiment Name: At_Drought_Reproduction_P Parameter: Plant Line Value: WS
  misc_feature: MA Experiment 20001905 PARAMETER Experiment Name: At_Drought_Reproduction_P Parameter: Timepoint (day) Value: 10
  misc_feature: MA Experiment 20001905 PARAMETER Experiment Name: At_Drought_Reproduction_P Parameter: Tissue Value: Rosettes
  misc_feature: MA Experiment 20001905 PARAMETER Experiment Name: At_Drought_Reproduction_P Parameter: Treatment Value: Drought vs. No Drought
  misc_feature: MA Experiment ID: 20001906 Result: Up-regulated in Transcription
  misc_feature: MA Experiment 20001906 PARAMETER Experiment Name: At_Drought_Reproduction_P Parameter: Age (day) Value: 35
  misc_feature: MA Experiment 20001906 PARAMETER Experiment Name: At_Drought_Reproduction_P Parameter: Organism Value: A. thaliana
  misc_feature: MA Experiment 20001906 PARAMETER Experiment Name: At_Drought_Reproduction_P Parameter: Plant Line Value: WS
  misc_feature: MA Experiment 20001906 PARAMETER Experiment Name: At_Drought_Reproduction_P Parameter: Timepoint (day) Value: 5
  misc_feature: MA Experiment 20001906 PARAMETER Experiment Name: At_Drought_Reproduction_P Parameter: Tissue Value: Siliques
  misc_feature: MA Experiment 20001906 PARAMETER Experiment Name: At_Drought_Reproduction_P Parameter: Treatment Value: Drought vs. No Drought
  misc_feature: MA Experiment ID: 20001908 Result: Up-regulated in Transcription
  misc_feature: MA Experiment 20001908 PARAMETER Experiment Name: At_Drought_Reproduction_P Parameter: Age (day) Value: 40
  misc_feature: MA Experiment 20001908 PARAMETER Experiment Name: At_Drought_Reproduction_P Parameter: Organism Value: A. thaliana
  misc_feature: MA Experiment 20001908 PARAMETER Experiment Name: At_Drought_Reproduction_P Parameter: Plant Line Value: WS
  misc_feature: MA Experiment 20001908 PARAMETER Experiment Name: At_Drought_Reproduction_P Parameter: Timepoint (day) Value: 10
  misc_feature: MA Experiment 20001908 PARAMETER Experiment Name: At_Drought_Reproduction_P Parameter: Tissue Value: Siliques
  misc_feature: MA Experiment 20001908 PARAMETER Experiment Name: At_Drought_Reproduction_P Parameter: Treatment Value: Drought vs. No Drought
  misc_feature: MA Experiment ID: 20001911 Result: Up-regulated in Transcription
  misc_feature: MA Experiment 20001911 PARAMETER Experiment Name: At_Drought_Reproduction_P Parameter: Age (day) Value: 40
  misc_feature: MA Experiment 20001911 PARAMETER Experiment Name: At_Drought_Reproduction_P Parameter: Organism Value: A. thaliana
  misc_feature: MA Experiment 20001911 PARAMETER Experiment Name: At_Drought_Reproduction_P Parameter: Plant Line Value: WS
  misc_feature: MA Experiment 20001911 PARAMETER Experiment Name: At_Drought_Reproduction_P Parameter: Timepoint (day) Value: 10
  misc_feature: MA Experiment 20001911 PARAMETER Experiment Name: At_Drought_Reproduction_P Parameter: Tissue Value: Flowers
  misc_feature: MA Experiment 20001911 PARAMETER Experiment Name: At_Drought_Reproduction_P Parameter: Treatment Value: Drought vs. No Drought
tgaaccttgtagatggtatattctttgaggatattttgatttacttttacttgttcttttgagagagacttcaataaagtttaagtttatatcttttttttttctatttatatttccttgtccccatgtgatttcatttatccccttttcttggaatttacaagcttaatcaaccgagaggcatatcatcaataaggattaaacctgtgtggaaattttgttacaatctactctgtattgaaacttgtttcggtatagtttcctcgtatcaaaggttataccaccatctctctggtatcaggtttctgatcagaagcagcttaaagagcatagtggtgttgcagtttagatggcagtatcagctgattaccaagttaagtttcctgaaagtggtgatctctactctatactagcagctgaagggattgagtttcttttgtcgcatagtggagaggtgccgttggaatatattcatggtaagacgatttgtctcttcttctctgcaatctggtgcaggccctgcaaggacttcactccagagctgataaaactctacgaaaatcttcagaaccgaggagaagaactcgagatcatctttgtctcatttgatcatgatatgacttcattctatgaacatttctggtgcatgccatggcttgcagttcccttcaatttaagcctactcaacaaattaagggacaagtacggaatttctcgtatcccgtcactggttcctctatattcagatgaaatctcagtcgctgaagatgtaattggtctaattgaagactatggttctgaagcctttcctttcactaaaaagcgaaaagaagaactcaaagccatcgatgactccaaacgccttggaggacagttggagaaactccttactcacgagtcccgaaattacgttgttgccagaaatggaagcaaggtgctagtttctaaacttgtgggaaagaccatagggttgtactttggtgcacactggtgtccgcctttccgatctttcacttctcaactcgtagatgtgtacaatgagctggcgactacagataaaggctcctttgaagtcatcttaatttcaacagacagagactcaagagagtttaacatcaacatgaccaacatgccatggcttgcaataccttatgaggacagaacaagacaagatctttgtagaatcttcaacgtcaaactcatacctgcattggtcatcataggacccgaagagaaaacagtgaccacaaacgcgagagagatggtatcattgtatggatcaaggagttttccgttcacggaatcaaggattgttgagttaaaagcttgtttgaagaaggaaggtgattcacttccaaggaaagtgaaagataacaagcatgaacacgagctaaaactggatatggcgaaagcttatgtgtgtgatttctgtaagaagcaaggcaggttttgggcgttttcttgcaatgcttgtgattatgatcttcatcctacatgtgtggaagaagaagaagcattattggtttagcaaaagagacggtcgtcgtgatttgtctgaaagattttgtaatattagtagacaaagaatcgtgatatgtaatgttgtcatgtaaaactcaaagttgaggaattaggatcaacattgtaattatatcttctgtttgtacaattaacatgcttatttcattaataaaattatattctgttttt

SEQ ID NO: 22646 - protein, 392 aa, Arabidopsis thaliana
  peptide (1)..(392): Ceres Seq. ID no. 13494222
  misc_feature (46)..(83): Pfam Name: Thioredoxin Pfam Description: Thioredoxin
  misc_feature (189)..(392): Homolog of NCBI NO: 7486675 NR Description: hypothetical protein F8F16.60 - Arabidopsis
  misc_feature (8)..(375): Homolog of NCBI NO: 21592996 NR Description: PDI-like protein [Arabidopsis thaliana]
  misc_feature (17)..(333): Homolog of NCBI NO: 23304737 NR Description: PDI-like protein [Quercus suber]
  misc_feature (17)..(387): Homolog of NCBI NO: 21592996 NR Description: PDI-like protein [Arabidopsis thaliana]
  misc_feature (13)..(357): Homolog of NCBI NO: 38567893 NR Description: OSJNBa0060N03.13 [Oryza sativa (japonica
  misc_feature (1)..(196): Homolog of NCBI NO: 7488267 NR Description: protein kinase homolog F8F16.70 - Arabidopsis
  misc_feature (1)..(388): Homolog of NCBI NO: 18406743 NR Description: expressed protein [Arabidopsis thaliana]
  misc_feature (13)..(390): Homolog of NCBI NO: 4056568 NR Description: PDI-like protein [Zea mays]
  misc_feature (8)..(375): Homolog of NCBI NO: 18406743 NR Description: expressed protein [Arabidopsis thaliana]
  misc_feature (1)..(392): Homolog of NCBI NO: 18417767 NR Description: receptor kinase -related [Arabidopsis thaliana]
MAVSADYQVKFPESGDLYSILAAEGIEFLLSHSGEVPLEYIHGKTICLFFSAIWCRPCKDFTPELIKLYENLQNRGEELEIIFVSFDHDMTSFYEHFWCMPWLAVPFNLSLLNKLRDKYGISRIPSLVPLYSDEISVAEDVIGLIEDYGSEAFPFTKKRKEELKAIDDSKRLGGQLEKLLTHESRNYVVARNGSKVLVSKLVGKTIGLYFGAHWCPPFRSFTSQLVDVYNELATTDKGSFEVILISTDRDSREFNINMTNMPWLAIPYEDRTRQDLCRIFNVKLIPALVIIGPEEKTVTTNAREMVSLYGSRSFPFTESRIVELKACLKKEGDSLPRKVKDNKHEHELKLDMAKAYVCDFCKKQGRFWAFSCNACDYDLHPTCVEEEEALLV

SEQ ID NO: 22647 - protein, 303 aa, Arabidopsis thaliana
  peptide (1)..(303): Ceres Seq. ID no. 13494223
  misc_feature (117)..(154): Pfam Name: Thioredoxin Pfam Description: Thioredoxin
  misc_feature (1)..(286): Homolog of NCBI NO: 21592996 NR Description: PDI-like protein [Arabidopsis thaliana]
  misc_feature (1)..(286): Homolog of NCBI NO: 18406743 NR Description: expressed protein [Arabidopsis thaliana]
  misc_feature (1)..(244): Homolog of NCBI NO: 23304737 NR Description: PDI-like protein [Quercus suber]
  misc_feature (1)..(301): Homolog of NCBI NO: 4056568 NR Description: PDI-like protein [Zea mays]
  misc_feature (1)..(298): Homolog of NCBI NO: 21592996 NR Description: PDI-like protein [Arabidopsis thaliana]
  misc_feature (1)..(299): Homolog of NCBI NO: 18406743 NR Description: expressed protein [Arabidopsis thaliana]
  misc_feature (1)..(268): Homolog of NCBI NO: 38567893 NR Description: OSJNBa0060N03.13 [Oryza sativa (japonica
  misc_feature (1)..(107): Homolog of NCBI NO: 7488267 NR Description: protein kinase homolog F8F16.70 - Arabidopsis
  misc_feature (100)..(303): Homolog of NCBI NO: 7486675 NR Description: hypothetical protein F8F16.60 - Arabidopsis
  misc_feature (1)..(303): Homolog of NCBI NO: 18417767 NR Description: receptor kinase -related [Arabidopsis thaliana]
MTSFYEHFWCMPWLAVPFNLSLLNKLRDKYGISRIPSLVPLYSDEISVAEDVIGLIEDYGSEAFPFTKKRKEELKAIDDSKRLGGQLEKLLTHESRNYVVARNGSKVLVSKLVGKTIGLYFGAHWCPPFRSFTSQLVDVYNELATTDKGSFEVILISTDRDSREFNINMTNMPWLAIPYEDRTRQDLCRIFNVKLIPALVIIGPEEKTVTTNAREMVSLYGSRSFPFTESRIVELKACLKKEGDSLPRKVKDNKHEHELKLDMAKAYVCDFCKKQGRFWAFSCNACDYDLHPTCVEEEEALLV

SEQ ID NO: 22648 - protein, 293 aa, Arabidopsis thaliana
  peptide (1)..(293): Ceres Seq. ID no. 13494224
  misc_feature (107)..(144): Pfam Name: Thioredoxin Pfam Description: Thioredoxin
  misc_feature (1)..(276): Homolog of NCBI NO: 21592996 NR Description: PDI-like protein [Arabidopsis thaliana]
  misc_feature (1)..(276): Homolog of NCBI NO: 18406743 NR Description: expressed protein [Arabidopsis thaliana]
  misc_feature (1)..(234): Homolog of NCBI NO: 23304737 NR Description: PDI-like protein [Quercus suber]
  misc_feature (1)..(291): Homolog of NCBI NO: 4056568 NR Description: PDI-like protein [Zea mays]
  misc_feature (1)..(288): Homolog of NCBI NO: 21592996 NR Description: PDI-like protein [Arabidopsis thaliana]
  misc_feature (1)..(289): Homolog of NCBI NO: 18406743 NR Description: expressed protein [Arabidopsis thaliana]
  misc_feature (1)..(258): Homolog of NCBI NO: 38567893 NR Description: OSJNBa0060N03.13 [Oryza sativa (japonica
  misc_feature (1)..(97): Homolog of NCBI NO: 7488267 NR Description: protein kinase homolog F8F16.70 - Arabidopsis
  misc_feature (90)..(293): Homolog of NCBI NO: 7486675 NR Description: hypothetical protein F8F16.60 - Arabidopsis
  misc_feature (1)..(293): Homolog of NCBI NO: 18417767 NR Description: receptor kinase -related [Arabidopsis thaliana]
MPWLAVPFNLSLLNKLRDKYGISRIPSLVPLYSDEISVAEDVIGLIEDYGSEAFPFTKKRKEELKAIDDSKRLGGQLEKLLTHESRNYVVARNGSKVLVSKLVGKTIGLYFGAHWCPPFRSFTSQLVDVYNELATTDKGSFEVILISTDRDSREFNINMTNMPWLAIPYEDRTRQDLCRIFNVKLIPALVIIGPEEKTVTTNAREMVSLYGSRSFPFTESRIVELKACLKKEGDSLPRKVKDNKHEHELKLDMAKAYVCDFCKKQGRFWAFSCNACDYDLHPTCVEEEEALLV

SEQ ID NO: 22649 - DNA, 873 bp, Arabidopsis thaliana
  misc_feature (1)..(873): Ceres Seq. ID no. 12322589
  misc_feature: MA Experiment ID: 20000171 Result: Up-regulated in Transcription
  misc_feature: MA Experiment 20000171 PARAMETER Experiment Name: At_42deg_Heat_P Parameter: Age (day) Value: 14
  misc_feature: MA Experiment 20000171 PARAMETER Experiment Name: At_42deg_Heat_P Parameter: Organism Value: A. thaliana
  misc_feature: MA Experiment 20000171 PARAMETER Experiment Name: At_42deg_Heat_P Parameter: Plant Line Value: WS
  misc_feature: MA Experiment 20000171 PARAMETER Experiment Name: At_42deg_Heat_P Parameter: Temperature (deg C) Value: 42 vs. 22
  misc_feature: MA Experiment 20000171 PARAMETER Experiment Name: At_42deg_Heat_P Parameter: Timepoint (hr) Value: 1
  misc_feature: MA Experiment 20000171 PARAMETER Experiment Name: At_42deg_Heat_P Parameter: Tissue Value: Aerial
  misc_feature: MA Experiment ID: 20000173 Result: Up-regulated in Transcription
  misc_feature: MA Experiment 20000173 PARAMETER Experiment Name: At_42deg_Heat_P Parameter: Age (day) Value: 14
  misc_feature: MA Experiment 20000173 PARAMETER Experiment Name: At_42deg_Heat_P Parameter: Organism Value: A. thaliana
  misc_feature: MA Experiment 20000173 PARAMETER Experiment Name: At_42deg_Heat_P Parameter: Plant Line Value: WS
  misc_feature: MA Experiment 20000173 PARAMETER Experiment Name: At_42deg_Heat_P Parameter: Temperature (deg C) Value: 42 vs. 22
  misc_feature: MA Experiment 20000173 PARAMETER Experiment Name: At_42deg_Heat_P Parameter: Timepoint (hr) Value: 6
  misc_feature: MA Experiment 20000173 PARAMETER Experiment Name: At_42deg_Heat_P Parameter: Tissue Value: Aerial
  misc_feature: MA Experiment ID: 20000234 Result: Up-regulated in Transcription
  misc_feature: MA Experiment 20000234 PARAMETER Experiment Name: At_Siliques_P Parameter: Age (day) Value: 21
  misc_feature: MA Experiment 20000234 PARAMETER Experiment Name: At_Siliques_P Parameter: Organism Value: A. thaliana
  misc_feature: MA Experiment 20000234 PARAMETER Experiment Name: At_Siliques_P Parameter: Plant Line Value: WS
  misc_feature: MA Experiment 20000234 PARAMETER Experiment Name: At_Siliques_P Parameter: Tissue Value: Less Than 5mm Siliques vs. Whole Plant
aaaaaattagttcgtcgaagcatcgagaaaatgatcgtactttctgttggttccgcttcttcatctccgatcgtcgtcgtcttttccgtcgcgcttcttctgttctacttctctgaaacttctctaggagctccttgtcccatcaatggcttgccaatcgtgaggaatattagtgaccttcctcaggataactatggaagaccaggtctttcccacatgactgttgctggctccgtattgcatggaatgaaagaggttgaaatatggcttcagacatttgctccaggttcagagacaccaattcacaggcactcctgtgaagaggtttttgttgtcctaaagggcagtggtactctgtatctcgctgaaacacatggaaatttccctgggaaaccaatcgaatttccaatctttgccaacagtacaattcatattccgatcaatgatgctcatcaggtcaaaaacaccggtcatgaggacctgcaggtgttggttatcatatctcggccgcctattaaaatcttcatctacgaagactggtttatgccacacactgctgcaaggctgaagttcccttactattgggatgagcaatgcattcaagaatcacaaaaagacgagctttaaagcaaagtccgaggctaaaagcaagcacaacctttagatagtaaaatcatagttgaggttttgtgacactacgtagatactggtaaattggcaaggattttacatgaatgttgttgttaccagaaagtaaataaatgttcaatctttgatgttcttaagtaagtgagtcctattggtcatgaaaatatgtaagtgtgcacatcttgattgcatttgcgataaatttatagagtttcactcacttct

SEQ ID NO: 22650 - protein, 208 aa, Arabidopsis thaliana
  peptide (1)..(208): Ceres Seq. ID no. 12322590
  misc_feature (43)..(208): Pfam Name: Auxin binding protein Pfam Description: Auxin binding protein
  misc_feature (26)..(208): Homolog of NCBI NO: 461449 NR Description: AUXIN-BINDING PROTEIN T85 PRECURSOR (ABP)
  misc_feature (22)..(208): Homolog of NCBI NO: 1843533 NR Description: auxin binding protein [Malus x domestica]
  misc_feature (11)..(208): Homolog of NCBI NO: 7442015 NR Description: auxin-binding protein precursor - radish
  misc_feature (11)..(208): Homolog of NCBI NO: 22122224 NR Description: susceptible endoplasmic reticulum auxin-binding
  misc_feature (11)..(208): Homolog of NCBI NO: 22122216 NR Description: resistant endoplasmic reticulum auxin-binding
  misc_feature (11)..(208): Homolog of NCBI NO: 22122220 NR Description: susceptible endoplasmic reticulum auxin-binding
  misc_feature (11)..(208): Homolog of NCBI NO: 22122222 NR Description: susceptible endoplasmic reticulum auxin-binding
  misc_feature (11)..(208): Homolog of NCBI NO: 22122218 NR Description: resistant endoplasmic reticulum auxin-binding
  misc_feature (11)..(208): Homolog of NCBI NO: 21592915 NR Description: auxin-binding protein 1 precursor [Arabidopsis
  misc_feature (11)..(208): Homolog of NCBI NO: 15236229 NR Description: auxin-binding protein 1 precursor
KKLVRRSIEKMIVLSVGSASSSPIVVVFSVALLLFYFSETSLGAPCPINGLPIVRNISDLPQDNYGRPGLSHMTVAGSVLHGMKEVEIWLQTFAPGSETPIHRHSCEEVFVVLKGSGTLYLAETHGNFPGKPIEFPIFANSTIHIPINDAHQVKNTGHEDLQVLVIISRPPIKIFIYEDWFMPHTAARLKFPYYWDEQCIQESQKDEL

SEQ ID NO: 22651 - protein, 198 aa, Arabidopsis thaliana
  peptide (1)..(198): Ceres Seq. ID no. 12322591
  misc_feature (33)..(198): Pfam Name: Auxin binding protein Pfam Description: Auxin binding protein
  misc_feature (16)..(198): Homolog of NCBI NO: 461449 NR Description: AUXIN-BINDING PROTEIN T85 PRECURSOR (ABP)
  misc_feature (12)..(198): Homolog of NCBI NO: 1843533 NR Description: auxin binding protein [Malus x domestica]
  misc_feature (1)..(198): Homolog of NCBI NO: 7442015 NR Description: auxin-binding protein precursor - radish
  misc_feature (1)..(198): Homolog of NCBI NO: 22122224 NR Description: susceptible endoplasmic reticulum auxin-binding
  misc_feature (1)..(198): Homolog of NCBI NO: 22122216 NR Description: resistant endoplasmic reticulum auxin-binding
  misc_feature (1)..(198): Homolog of NCBI NO: 22122220 NR Description: susceptible endoplasmic reticulum auxin-binding
  misc_feature (1)..(198): Homolog of NCBI NO: 22122222 NR Description: susceptible endoplasmic reticulum auxin-binding
  misc_feature (1)..(198): Homolog of NCBI NO: 22122218 NR Description: resistant endoplasmic reticulum auxin-binding
  misc_feature (1)..(198): Homolog of NCBI NO: 21592915 NR Description: auxin-binding protein 1 precursor [Arabidopsis
  misc_feature (1)..(198): Homolog of NCBI NO: 15236229 NR Description: auxin-binding protein 1 precursor
MIVLSVGSASSSPIVVVFSVALLLFYFSETSLGAPCPINGLPIVRNISDLPQDNYGRPGLSHMTVAGSVLHGMKEVEIWLQTFAPGSETPIHRHSCEEVFVVLKGSGTLYLAETHGNFPGKPIEFPIFANSTIHIPINDAHQVKNTGHEDLQVLVIISRPPIKIFIYEDWFMPHTAARLKFPYYWDEQCIQESQKDEL

SEQ ID NO: 22652 - protein, 136 aa, Arabidopsis thaliana
  peptide (1)..(136): Ceres Seq. ID no. 12322592
  misc_feature (1)..(136): Pfam Name: Auxin binding protein Pfam Description: Auxin binding protein
  misc_feature (1)..(136): Homolog of NCBI NO: 461449 NR Description: AUXIN-BINDING PROTEIN T85 PRECURSOR (ABP)
  misc_feature (1)..(136): Homolog of NCBI NO: 1843533 NR Description: auxin binding protein [Malus x domestica]
  misc_feature (1)..(136): Homolog of NCBI NO: 7442015 NR Description: auxin-binding protein precursor - radish
  misc_feature (1)..(136): Homolog of NCBI NO: 22122224 NR Description: susceptible endoplasmic reticulum auxin-binding
  misc_feature (1)..(136): Homolog of NCBI NO: 22122216 NR Description: resistant endoplasmic reticulum auxin-binding
  misc_feature (1)..(136): Homolog of NCBI NO: 22122220 NR Description: susceptible endoplasmic reticulum auxin-binding
  misc_feature (1)..(136): Homolog of NCBI NO: 22122222 NR Description: susceptible endoplasmic reticulum auxin-binding
  misc_feature (1)..(136): Homolog of NCBI NO: 22122218 NR Description: resistant endoplasmic reticulum auxin-binding
  misc_feature (1)..(136): Homolog of NCBI NO: 21592915 NR Description: auxin-binding protein 1 precursor [Arabidopsis
  misc_feature (1)..(136): Homolog of NCBI NO: 15236229 NR Description: auxin-binding protein 1 precursor
MTVAGSVLHGMKEVEIWLQTFAPGSETPIHRHSCEEVFVVLKGSGTLYLAETHGNFPGKPIEFPIFANSTIHIPINDAHQVKNTGHEDLQVLVIISRPPIKIFIYEDWFMPHTAARLKFPYYWDEQCIQESQKDEL

SEQ ID NO: 22653 - DNA, 700 bp, Arabidopsis thaliana
  misc_feature (1)..(700): Ceres Seq. ID no. 12385656
  misc_feature: MA Experiment ID: 108434 Result: Up-regulated in Transcription
  misc_feature: MA Experiment 108434 PARAMETER Experiment Name: At_Root_Tips_cDNA_P Parameter: Tissue Value: Root Tips
  misc_feature: MA Experiment ID: 20000495 Result: Down-regulated in Transcription
  misc_feature: MA Experiment 20000495 PARAMETER Experiment Name: At_Guard_Cells_P Parameter: Harvest Date Value: 8/2/2002
  misc_feature: MA Experiment 20000495 PARAMETER Experiment Name: At_Guard_Cells_P Parameter: Organism Value: A. thaliana
  misc_feature: MA Experiment 20000495 PARAMETER Experiment Name: At_Guard_Cells_P Parameter: Tissue Value: Guard Cells vs. Leaves
cagagaaaaagtttgcagtgagaaggagattgattaatcgatctgagaaagatgggagattcggagtcatttgttgggaaaaattggaatggattgaaggatttctggagtgataggttatcatttttcgaaaattacaccagattcaccaaacgcgacgcgcctcttccttcttggtcttcctccgacgtcgaggaattcattgcctccgatcccgttcatggacccaccctgaaaacggctagggaagctgtgacgtttggtgttaccggagctgcacttggagctgtctctactgctgcttttgcctggaaatactccaggagtccacatggtgctgcattgtccttcttaggaggaggtgtttttggttggacctttgggcaagaggtcgccaaccacacactgcaactctacaagttggacacaatggcagcccaagttaagttcatggaatggtgggaacgtaagtctcaataaaggtcctgaatctaaaacgaagacgtgtgctgctttctcgtccagagtatcttcttgggaacaacatgaaatgctgattatccatccatttccagactttcgcctttgaaactttttctattctcactcttggaacatgtttgccttgtcttaataatacaacatgcctcatgaatgttttgaagatttgagaaaatgaattcaaagaaaccaaatggtc

SEQ ID NO: 22654 - protein, 142 aa, Arabidopsis thaliana
  peptide (1)..(142): Ceres Seq. ID no. 12385657
  misc_feature (1)..(142): Homolog of NCBI NO: 18390902 NR Description: expressed protein
MGDSESFVGKNWNGLKDFWSDRLSFFENYTRFTKRDAPLPSWSSSDVEEFIASDPVHGPTLKTAREAVTFGVTGAALGAVSTAAFAWKYSRSPHGAALSFLGGGVFGWTFGQEVANHTLQLYKLDTMAAQVKFMEWWERKSQ

SEQ ID NO: 22655 - DNA, 1371 bp, Arabidopsis thaliana
  misc_feature (1)..(1371): Ceres Seq. ID no. 12330189
  misc_feature: MA Experiment ID: 108434 Result: Down-regulated in Transcription
  misc_feature: MA Experiment 108434 PARAMETER Experiment Name: At_Root_Tips_cDNA_P Parameter: Tissue Value: Root Tips
  misc_feature: MA Experiment ID: 108463 Result: Up-regulated in Transcription
  misc_feature: MA Experiment 108463 PARAMETER Experiment Name: At_Germinating_Seeds_cDNA_P Parameter: Age (day) Value: 3 vs. 0
  misc_feature: MA Experiment 108463 PARAMETER Experiment Name: At_Germinating_Seeds_cDNA_P Parameter: Tissue Value: Germinating Seeds
  misc_feature: MA Experiment ID: 108464 Result: Up-regulated in Transcription
  misc_feature: MA Experiment 108464 PARAMETER Experiment Name: At_Germinating_Seeds_cDNA_P Parameter: Age (day) Value: 4 vs. 0
  misc_feature: MA Experiment 108464 PARAMETER Experiment Name: At_Germinating_Seeds_cDNA_P Parameter: Tissue Value: Germinating Seeds
  misc_feature: MA Experiment ID: 108585 Result: Up-regulated in Transcription
  misc_feature: MA Experiment 108585 PARAMETER Experiment Name: At_5mM_NaNP_cDNA_P Parameter: Timepoint (hr) Value: 6
  misc_feature: MA Experiment 108585 PARAMETER Experiment Name: At_5mM_NaNP_cDNA_P Parameter: Tissue Value: Aerial
  misc_feature: MA Experiment 108585 PARAMETER Experiment Name: At_5mM_NaNP_cDNA_P Parameter: Treatment Value: null
  misc_feature: MA Experiment ID: 108595 Result: Down-regulated in Transcription
  misc_feature: MA Experiment 108595 PARAMETER Experiment Name: At_Ler-pi_Ovule_cDNA_P Parameter: Plant Line Value: null
  misc_feature: MA Experiment ID: 20000069 Result: Down-regulated in Transcription
  misc_feature: MA Experiment 20000069 PARAMETER Experiment Name: At_100uM_ABA_Mutants_cDNA_P Parameter: Plant Line Value: CS23
  misc_feature: MA Experiment 20000069 PARAMETER Experiment Name: At_100uM_ABA_Mutants_cDNA_P Parameter: Timepoint (hr) Value: 6
  misc_feature: MA Experiment 20000069 PARAMETER Experiment Name: At_100uM_ABA_Mutants_cDNA_P Parameter: Tissue Value: Aerial
  misc_feature: MA Experiment 20000069 PARAMETER Experiment Name: At_100uM_ABA_Mutants_cDNA_P Parameter: Treatment Value: 100uM ABA vs. No Treatment
  misc_feature: MA Experiment ID: 20000087 Result: Down-regulated in Transcription
  misc_feature: MA Experiment 20000087 PARAMETER Experiment Name: At_100uM_ABA_Mutants_cDNA_P Parameter: Plant Line Value: WS
  misc_feature: MA Experiment 20000087 PARAMETER Experiment Name: At_100uM_ABA_Mutants_cDNA_P Parameter: Timepoint (hr) Value: 6
  misc_feature: MA Experiment 20000087 PARAMETER Experiment Name: At_100uM_ABA_Mutants_cDNA_P Parameter: Tissue Value: Aerial
  misc_feature: MA Experiment 20000087 PARAMETER Experiment Name: At_100uM_ABA_Mutants_cDNA_P Parameter: Treatment Value: 100uM ABA vs. No Treatment
  misc_feature: MA Experiment ID: 20000089 Result: Down-regulated in Transcription
  misc_feature: MA Experiment ID: 20000090 Result: Down-regulated in Transcription
  misc_feature: MA Experiment ID: 20000111 Result: Up-regulated in Transcription
  misc_feature: MA Experiment 20000111 PARAMETER Experiment Name: At_42deg_Heat_cDNA_P Parameter: Temperature (deg C) Value: 42 vs. 22
  misc_feature: MA Experiment 20000111 PARAMETER Experiment Name: At_42deg_Heat_cDNA_P Parameter: Timepoint (hr) Value: 6
  misc_feature: MA Experiment 20000111 PARAMETER Experiment Name: At_42deg_Heat_cDNA_P Parameter: Tissue Value: Aerial
  misc_feature: MA Experiment ID: 20000113 Result: Up-regulated in Transcription
  misc_feature: MA Experiment 20000113 PARAMETER Experiment Name: At_42deg_Heat_cDNA_P Parameter: Temperature (deg C) Value: 42 vs. 22
  misc_feature: MA Experiment 20000113 PARAMETER Experiment Name: At_42deg_Heat_cDNA_P Parameter: Timepoint (hr) Value: 8
  misc_feature: MA Experiment 20000113 PARAMETER Experiment Name: At_42deg_Heat_cDNA_P Parameter: Tissue Value: Aerial
  misc_feature: MA Experiment ID: 20000117 Result: Down-regulated in Transcription
  misc_feature: MA Experiment 20000117 PARAMETER Experiment Name: At_100uM_ABA_Mutants_cDNA_P Parameter: Plant Line Value: Columbia
  misc_feature: MA Experiment 20000117 PARAMETER Experiment Name: At_100uM_ABA_Mutants_cDNA_P Parameter: Timepoint (hr) Value: 6
  misc_feature: MA Experiment 20000117 PARAMETER Experiment Name: At_100uM_ABA_Mutants_cDNA_P Parameter: Tissue Value: Aerial
  misc_feature: MA Experiment 20000117 PARAMETER Experiment Name: At_100uM_ABA_Mutants_cDNA_P Parameter: Treatment Value: 100uM ABA vs. No Treatment
  misc_feature: MA Experiment ID: 20000173 Result: Up-regulated in Transcription
  misc_feature: MA Experiment 20000173 PARAMETER Experiment Name: At_42deg_Heat_P Parameter: Age (day) Value: 14
  misc_feature: MA Experiment 20000173 PARAMETER Experiment Name: At_42deg_Heat_P Parameter: Organism Value: A. thaliana
  misc_feature: MA Experiment 20000173 PARAMETER Experiment Name: At_42deg_Heat_P Parameter: Plant Line Value: WS
  misc_feature: MA Experiment 20000173 PARAMETER Experiment Name: At_42deg_Heat_P Parameter: Temperature (deg C) Value: 42 vs. 22
  misc_feature: MA Experiment 20000173 PARAMETER Experiment Name: At_42deg_Heat_P Parameter: Timepoint (hr) Value: 6
  misc_feature: MA Experiment 20000173 PARAMETER Experiment Name: At_42deg_Heat_P Parameter: Tissue Value: Aerial
  misc_feature: MA Experiment ID: 20000265 Result: Down-regulated in Transcription
  misc_feature: MA Experiment 20000265 PARAMETER Experiment Name: At_Open_Flower_P Parameter: Age (day) Value: 21
  misc_feature: MA Experiment 20000265 PARAMETER Experiment Name: At_Open_Flower_P Parameter: Plant Line Value: WS
  misc_feature: MA Experiment 20000265 PARAMETER Experiment Name: At_Open_Flower_P Parameter: Tissue Value: Closed Flower vs. Whole Plant
  misc_feature: MA Experiment ID: 20001248 Result: Down-regulated in Transcription
  misc_feature: MA Experiment 20001248 PARAMETER Experiment Name: At_Far-red-induction_P Parameter: Age (day) Value: 7
  misc_feature: MA Experiment 20001248 PARAMETER Experiment Name: At_Far-red-induction_P Parameter: Light Value: Far-red vs. White
  misc_feature: MA Experiment 20001248 PARAMETER Experiment Name: At_Far-red-induction_P Parameter: Organism Value: A. thaliana
  misc_feature: MA Experiment 20001248 PARAMETER Experiment Name: At_Far-red-induction_P Parameter: Plant Line Value: Columbia
  misc_feature: MA Experiment 20001248 PARAMETER Experiment Name: At_Far-red-induction_P Parameter: Timepoint (hr) Value: 4
  misc_feature: MA Experiment 20001248 PARAMETER Experiment Name: At_Far-red-induction_P Parameter: Tissue Value: Whole Plant
  misc_feature: MA Experiment ID: 20001451 Result: Down-regulated in Transcription
  misc_feature: MA Experiment 20001451 PARAMETER Experiment Name: At_Far-red-induction_P Parameter: Age (day) Value: 7
  misc_feature: MA Experiment 20001451 PARAMETER Experiment Name: At_Far-red-induction_P Parameter: Light Value: Far-red vs. White
  misc_feature: MA Experiment 20001451 PARAMETER Experiment Name: At_Far-red-induction_P Parameter: Organism Value: A. thaliana
  misc_feature: MA Experiment 20001451 PARAMETER Experiment Name: At_Far-red-induction_P Parameter: Plant Line Value: Columbia
  misc_feature: MA Experiment 20001451 PARAMETER Experiment Name: At_Far-red-induction_P Parameter: Timepoint (hr) Value: 24
  misc_feature: MA Experiment 20001451 PARAMETER Experiment Name: At_Far-red-induction_P Parameter: Tissue Value: Whole Plant
aatatatacgaaacgtaccacaaatttctaactaaagcattcatagtctctcgaaagcctcttttcagaaccgaagctctttactttcgtccaccgggaaatatgccagtcgacgtagcctcaccggccggaaaaaccgtctgcgtcaccggagctggtggatacatcgcttcttggattgttaagatacttctcgagagaggttacacagtcaaaggaaccgtacggaatccagatgatccgaagaacacacatttgagagaactagaaggaggaaaggagagactgattctgtgcaaagcagatcttcaggactacgaggctcttaaggcggcgattgatggttgcgacggcgtctttcacacggcttctcctgtcaccgacgatccggaacaaatggtggagccggccgtgaatggagccaagtttgtaattaatgctgcggctgaggccaaggtcaagcgcgtggtcatcacctcctccattggtgccgtctacatggacccgaaccgtgaccctgaggctgtcgttgacgaaagttgttggagtgatcttgacttctgcaaaaacaccaagaattggtattgttacggcaagatggtggcggaacaagcggcgtgggagacagcaaaggagaaaggtgttgacttggtggtgttgaatccggtgctggttcttggaccgccgttacagccgacgatcaacgccagtctttaccacgtcctcaaatatctaaccggctcggctaagacttatgctaatttgactcaagcttatgtggatgttcgcgatgtcgcgctggctcatgttctggtctatgaggcaccctcggcctccggacgttatctcctagccgagagtgctcgccaccgcggggaagttgttgagattctggctaagctattcccggagtatcctcttccgaccaagtgcaaggacgagaagaaccctagagccaagccatacaaattcactaaccagaagattaaggacttaggcttagagttcacttccaccaagcaaagcctctacgacacagtcaagagcttacaagagaaaggccatcttgctcctcctcctcctcctccttcagcatcgcaagaatccgtggaaaatggcattaagatcgggtcttgaaaagcttattaattccctcaagtatcccccttaagtatccttaaccattgaagttgcttttgtttgttgtctctggttatgtgaaacctctgtttcaatatgtctcgtctggttatgaatctgtacactcagttctttggccaaaccgtttgatggattttgtagtcaagtcttcatgtttgatcctatgtaatagattacacttaagtaaacaacttcatttttattctatgc

SEQ ID NO: 22656 - protein, 378 aa, Arabidopsis thaliana
  peptide (1)..(378): Ceres Seq. ID no. 12330190
  misc_feature (43)..(275): Pfam Name: 3-beta hydroxysteroid dehydrogenase/isomerase family Pfam Description: 3-beta hydroxysteroid dehydrogenase/isomerase
  misc_feature (35)..(366): Homolog of NCBI NO: 7431407 NR Description: cinnamoyl-CoA reductase (EC 1.2.1.44) CCR - cider
  misc_feature (41)..(371): Homolog of NCBI NO: 25140434 NR Description: cinnamoyl CoA reductase [Solanum tuberosum]
  misc_feature (35)..(371): Homolog of NCBI NO: 7239228 NR Description: cinnamoyl CoA reductase; CCR [Populus tremuloides]
  misc_feature (35)..(371): Homolog of NCBI NO: 2960364 NR Description: cinnamoyl CoA reductase [Populus balsamifera
  misc_feature (35)..(371): Homolog of NCBI NO: 9998901 NR Description: cinnamoyl-CoA reductase [Populus balsamifera
  misc_feature (44)..(370): Homolog of NCBI NO: 12407990 NR Description: cinnamoyl CoA reductase CCR2 [Arabidopsis
  misc_feature (44)..(370): Homolog of NCBI NO: 15220833 NR Description: cinnamoyl CoA reductase, putative
  misc_feature (35)..(370): Homolog of NCBI NO: 21592757 NR Description: cinnamoyl CoA reductase, putative [Arabidopsis
  misc_feature (35)..(378): Homolog of NCBI NO: 12034897 NR Description: cinnamoyl CoA reductase isoform 1 [Arabidopsis
  misc_feature (35)..(378): Homolog of NCBI NO: 15218377 NR Description: cinnamoyl CoA reductase, puitative
NIYETYHKFLTKAFIVSRKPLFRTEALYFRPPGNMPVDVASPAGKTVCVTGAGGYIASWIVKILLERGYTVKGTVRNPDDPKNTHLRELEGGKERLILCKADLQDYEALKAAIDGCDGVFHTASPVTDDPEQMVEPAVNGAKFVINAAAEAKVKRVVITSSIGAVYMDPNRDPEAVVDESCWSDLDFCKNTKNWYCYGKMVAEQAAWETAKEKGVDLVVLNPVLVLGPPLQPTINASLYHVLKYLTGSAKTYANLTQAYVDVRDVALAHVLVYEAPSASGRYLLAESARHRGEVVEILAKLFPEYPLPTKCKDEKNPRAKPYKFTNQKIKDLGLEFTSTKQSLYDTVKSLQEKGHLAPPPPPPSASQESVENGIKIGS

SEQ ID NO: 22657 - protein, 344 aa, Arabidopsis thaliana
  peptide (1)..(344): Ceres Seq. ID no. 12330191
  misc_feature (9)..(241): Pfam Name: 3-beta hydroxysteroid dehydrogenase/isomerase family Pfam Description: 3-beta hydroxysteroid dehydrogenase/isomerase
  misc_feature (1)..(332): Homolog of NCBI NO: 7431407 NR Description: cinnamoyl-CoA reductase (EC 1.2.1.44) CCR - cider
  misc_feature (7)..(337): Homolog of NCBI NO: 25140434 NR Description: cinnamoyl CoA reductase [Solanum tuberosum]
  misc_feature (1)..(337): Homolog of NCBI NO: 7239228 NR Description: cinnamoyl CoA reductase; CCR [Populus tremuloides]
  misc_feature (1)..(337): Homolog of NCBI NO: 2960364 NR Description: cinnamoyl CoA reductase [Populus balsamifera
  misc_feature (1)..(337): Homolog of NCBI NO: 9998901 NR Description: cinnamoyl-CoA reductase [Populus balsamifera
  misc_feature (10)..(336): Homolog of NCBI NO: 12407990 NR Description: cinnamoyl CoA reductase CCR2 [Arabidopsis
  misc_feature (10)..(336): Homolog of NCBI NO: 15220833 NR Description: cinnamoyl CoA reductase, putative
  misc_feature (1)..(336): Homolog of NCBI NO: 21592757 NR Description: cinnamoyl CoA reductase, putative [Arabidopsis
  misc_feature (1)..(344): Homolog of NCBI NO: 12034897 NR Description: cinnamoyl CoA reductase isoform 1 [Arabidopsis
  misc_feature (1)..(344): Homolog of NCBI NO: 15218377 NR Description: cinnamoyl CoA reductase, puitative
MPVDVASPAGKTVCVTGAGGYIASWIVKILLERGYTVKGTVRNPDDPKNTHLRELEGGKERLILCKADLQDYEALKAAIDGCDGVFHTASPVTDDPEQMVEPAVNGAKFVINAAAEAKVKRVVITSSIGAVYMDPNRDPEAVVDESCWSDLDFCKNTKNWYCYGKMVAEQAAWETAKEKGVDLVVLNPVLVLGPPLQPTINASLYHVLKYLTGSAKTYANLTQAYVDVRDVALAHVLVYEAPSASGRYLLAESARHRGEVVEILAKLFPEYPLPTKCKDEKNPRAKPYKFTNQKIKDLGLEFTSTKQSLYDTVKSLQEKGHLAPPPPPPSASQESVENGIKIGS

SEQ ID NO: 22658 - protein, 246 aa, Arabidopsis thaliana
  peptide (1)..(246): Ceres Seq. ID no. 12330192
  misc_feature (1)..(143): Pfam Name: 3-beta hydroxysteroid dehydrogenase/isomerase family Pfam Description: 3-beta hydroxysteroid dehydrogenase/isomerase
  misc_feature (1)..(234): Homolog of NCBI NO: 7431407 NR Description: cinnamoyl-CoA reductase (EC 1.2.1.44) CCR - cider
  misc_feature (1)..(239): Homolog of NCBI NO: 25140434 NR Description: cinnamoyl CoA reductase [Solanum tuberosum]
  misc_feature (1)..(239): Homolog of NCBI NO: 7239228 NR Description: cinnamoyl CoA reductase; CCR [Populus tremuloides]
  misc_feature (1)..(239): Homolog of NCBI NO: 2960364 NR Description: cinnamoyl CoA reductase [Populus balsamifera
  misc_feature (1)..(239): Homolog of NCBI NO: 9998901 NR Description: cinnamoyl-CoA reductase [Populus balsamifera
  misc_feature (1)..(238): Homolog of NCBI NO: 12407990 NR Description: cinnamoyl CoA reductase CCR2 [Arabidopsis
  misc_feature (1)..(238): Homolog of NCBI NO: 15220833 NR Description: cinnamoyl CoA reductase, putative
  misc_feature (1)..(238): Homolog of NCBI NO: 21592757 NR Description: cinnamoyl CoA reductase, putative [Arabidopsis
  misc_feature (1)..(246): Homolog of NCBI NO: 12034897 NR Description: cinnamoyl CoA reductase isoform 1 [Arabidopsis
  misc_feature (1)..(246): Homolog of NCBI NO: 15218377 NR Description: cinnamoyl CoA reductase, puitative
MVEPAVNGAKFVINAAAEAKVKRVVITSSIGAVYMDPNRDPEAVVDESCWSDLDFCKNTKNWYCYGKMVAEQAAWETAKEKGVDLVVLNPVLVLGPPLQPTINASLYHVLKYLTGSAKTYANLTQAYVDVRDVALAHVLVYEAPSASGRYLLAESARHRGEVVEILAKLFPEYPLPTKCKDEKNPRAKPYKFTNQKIKDLGLEFTSTKQSLYDTVKSLQEKGHLAPPPPPPSASQESVENGIKIGS

SEQ ID NO: 22659 - DNA, 1367 bp, Arabidopsis thaliana
  misc_feature (1)..(1367): Ceres Seq. ID no. 12334633
  misc_feature: MA Experiment ID: 108433 Result: Up-regulated in Transcription
  misc_feature: MA Experiment 108433 PARAMETER Experiment Name: At_rhl_Mutant2_cDNA_P Parameter: Age (day) Value: 7
  misc_feature: MA Experiment 108433 PARAMETER Experiment Name: At_rhl_Mutant2_cDNA_P Parameter: Organism Value: A. thaliana
  misc_feature: MA Experiment 108433 PARAMETER Experiment Name: At_rhl_Mutant2_cDNA_P Parameter: Plant Line Value: rhl Mutant vs. wt landsburg
  misc_feature: MA Experiment 108433 PARAMETER Experiment Name: At_rhl_Mutant2_cDNA_P Parameter: Tissue Value: Roots
  misc_feature: MA Experiment ID: 108434 Result: Down-regulated in Transcription
  misc_feature: MA Experiment 108434 PARAMETER Experiment Name: At_Root_Tips_cDNA_P Parameter: Tissue Value: Root Tips
  misc_feature: MA Experiment ID: 108488 Result: Down-regulated in Transcription
  misc_feature: MA Experiment ID: 108573 Result: Up-regulated in Transcription
  misc_feature: MA Experiment 108573 PARAMETER Experiment Name: At_Drought_cDNA_P Parameter: Timepoint (hr) Value: 6
  misc_feature: MA Experiment 108573 PARAMETER Experiment Name: At_Drought_cDNA_P Parameter: Tissue Value: Aerial
  misc_feature: MA Experiment 108573 PARAMETER Experiment Name: At_Drought_cDNA_P Parameter: Treatment Value: Drought vs. No Drought
  misc_feature: MA Experiment ID: 108579 Result: Down-regulated in Transcription
  misc_feature: MA Experiment 108579 PARAMETER Experiment Name: At_4deg_Cold_cDNA_P Parameter: Temperature (deg C) Value: 4 vs. 22
  misc_feature: MA Experiment 108579 PARAMETER Experiment Name: At_4deg_Cold_cDNA_P Parameter: Timepoint (hr) Value: 6
  misc_feature: MA Experiment 108579 PARAMETER Experiment Name: At_4deg_Cold_cDNA_P Parameter: Tissue Value: Aerial
  misc_feature: MA Experiment ID: 20000069 Result: Up-regulated in Transcription
  misc_feature: MA Experiment 20000069 PARAMETER Experiment Name: At_100uM_ABA_Mutants_cDNA_P Parameter: Plant Line Value: CS23
  misc_feature: MA Experiment 20000069 PARAMETER Experiment Name: At_100uM_ABA_Mutants_cDNA_P Parameter: Timepoint (hr) Value: 6
  misc_feature: MA Experiment 20000069 PARAMETER Experiment Name: At_100uM_ABA_Mutants_cDNA_P Parameter: Tissue Value: Aerial
  misc_feature: MA Experiment 20000069 PARAMETER Experiment Name: At_100uM_ABA_Mutants_cDNA_P Parameter: Treatment Value: 100uM ABA vs. No Treatment
  misc_feature: MA Experiment ID: 20000070 Result: Up-regulated in Transcription
  misc_feature: MA Experiment 20000070 PARAMETER Experiment Name: At_100uM_ABA_Mutants_cDNA_P Parameter: Plant Line Value: CS24
  misc_feature: MA Experiment 20000070 PARAMETER Experiment Name: At_100uM_ABA_Mutants_cDNA_P Parameter: Timepoint (hr) Value: 6
  misc_feature: MA Experiment 20000070 PARAMETER Experiment Name: At_100uM_ABA_Mutants_cDNA_P Parameter: Tissue Value: Aerial
  misc_feature: MA Experiment 20000070 PARAMETER Experiment Name: At_100uM_ABA_Mutants_cDNA_P Parameter: Treatment Value: 100uM ABA vs. No Treatment
  misc_feature: MA Experiment ID: 20000071 Result: Up-regulated in Transcription
  misc_feature: MA Experiment 20000071 PARAMETER Experiment Name: At_100uM_ABA_Mutants_cDNA_P Parameter: Plant Line Value: CS8104
  misc_feature: MA Experiment 20000071 PARAMETER Experiment Name: At_100uM_ABA_Mutants_cDNA_P Parameter: Timepoint (hr) Value: 6
  misc_feature: MA Experiment 20000071 PARAMETER Experiment Name: At_100uM_ABA_Mutants_cDNA_P Parameter: Tissue Value: Aerial
  misc_feature: MA Experiment 20000071 PARAMETER Experiment Name: At_100uM_ABA_Mutants_cDNA_P Parameter: Treatment Value: 100uM ABA vs. No Treatment
  misc_feature: MA Experiment ID: 20000086 Result: Up-regulated in Transcription
  misc_feature: MA Experiment 20000086 PARAMETER Experiment Name: At_100uM_ABA_Mutants_cDNA_P Parameter: Plant Line Value: CS22
  misc_feature: MA Experiment 20000086 PARAMETER Experiment Name: At_100uM_ABA_Mutants_cDNA_P Parameter: Timepoint (hr) Value: 6
  misc_feature: MA Experiment 20000086 PARAMETER Experiment Name: At_100uM_ABA_Mutants_cDNA_P Parameter: Tissue Value: Aerial
  misc_feature: MA Experiment 20000086 PARAMETER Experiment Name: At_100uM_ABA_Mutants_cDNA_P Parameter: Treatment Value: 100uM ABA vs. No Treatment
  misc_feature: MA Experiment ID: 20000088 Result: Up-regulated in Transcription
  misc_feature: MA Experiment 20000088 PARAMETER Experiment Name: At_100uM_ABA_Mutants_cDNA_P Parameter: Plant Line Value: Landsberg
  misc_feature: MA Experiment 20000088 PARAMETER Experiment Name: At_100uM_ABA_Mutants_cDNA_P Parameter: Timepoint (hr) Value: 6
  misc_feature: MA Experiment 20000088 PARAMETER Experiment Name: At_100uM_ABA_Mutants_cDNA_P Parameter: Tissue Value: Aerial
  misc_feature: MA Experiment 20000088 PARAMETER Experiment Name: At_100uM_ABA_Mutants_cDNA_P Parameter: Treatment Value: 100uM ABA vs. No Treatment
  misc_feature: MA Experiment ID: 20000117 Result: Up-regulated in Transcription
  misc_feature: MA Experiment 20000117 PARAMETER Experiment Name: At_100uM_ABA_Mutants_cDNA_P Parameter: Plant Line Value: Columbia
  misc_feature: MA Experiment 20000117 PARAMETER Experiment Name: At_100uM_ABA_Mutants_cDNA_P Parameter: Timepoint (hr) Value: 6
  misc_feature: MA Experiment 20000117 PARAMETER Experiment Name: At_100uM_ABA_Mutants_cDNA_P Parameter: Tissue Value: Aerial
  misc_feature: MA Experiment 20000117 PARAMETER Experiment Name: At_100uM_ABA_Mutants_cDNA_P Parameter: Treatment Value: 100uM ABA vs. No Treatment
  misc_feature: MA Experiment ID: 20000315 Result: Down-regulated in Transcription
  misc_feature: MA Experiment 20000315 PARAMETER Experiment Name: At_14day_Shoots-Roots_Sub_P Parameter: Age (day) Value: 14
  misc_feature: MA Experiment 20000315 PARAMETER Experiment Name: At_14day_Shoots-Roots_Sub_P Parameter: Organism Value: A. thaliana
  misc_feature: MA Experiment 20000315 PARAMETER Experiment Name: At_14day_Shoots-Roots_Sub_P Parameter: Plant Line Value: WS
  misc_feature: MA Experiment 20000315 PARAMETER Experiment Name: At_14day_Shoots-Roots_Sub_P Parameter: Tissue Value: Shoots vs. Whole Plant
  misc_feature: MA Experiment ID: 20000329 Result: Down-regulated in Transcription
  misc_feature: MA Experiment 20000329 PARAMETER Experiment Name: At_4deg_Cold_Sub_P Parameter: Age (day) Value: 14
  misc_feature: MA Experiment 20000329 PARAMETER Experiment Name: At_4deg_Cold_Sub_P Parameter: Organism Value: A. thaliana
  misc_feature: MA Experiment 20000329 PARAMETER Experiment Name: At_4deg_Cold_Sub_P Parameter: Plant Line Value: WS
  misc_feature: MA Experiment 20000329 PARAMETER Experiment Name: At_4deg_Cold_Sub_P Parameter: Temperature (deg C) Value: 4 vs. 22
  misc_feature: MA Experiment 20000329 PARAMETER Experiment Name: At_4deg_Cold_Sub_P Parameter: Timepoint (hr) Value: 6
  misc_feature: MA Experiment 20000329 PARAMETER Experiment Name: At_4deg_Cold_Sub_P Parameter: Tissue Value: Aerial
  misc_feature: MA Experiment ID: 20000438 Result: Down-regulated in Transcription
  misc_feature: MA Experiment 20000438 PARAMETER Experiment Name: At_Shoots__P Parameter: Age (day) Value: 14
  misc_feature: MA Experiment 20000438 PARAMETER Experiment Name: At_Shoots__P Parameter: Tissue Value: Shoots vs. Whole Plant
  misc_feature: MA Experiment ID: 20000440 Result: Down-regulated in Transcription
  misc_feature: MA Experiment 20000440 PARAMETER Experiment Name: At_Closed-Flower__Sub_P Parameter: Tissue Value: Closed Flower vs. Whole Plant
  misc_feature: MA Experiment ID: 20000794 Result: Up-regulated in Transcription
  misc_feature: MA Experiment 20000794 PARAMETER Experiment Name: At_Petals_P Parameter: Age (day) Value: 23-25 days
  misc_feature: MA Experiment 20000794 PARAMETER Experiment Name: At_Petals_P Parameter: Plant Line Value: WS
  misc_feature: MA Experiment 20000794 PARAMETER Experiment Name: At_Petals_P Parameter: Tissue Value: Petals vs. Whole plant
  misc_feature: MA Experiment ID: 20001450 Result: Up-regulated in Transcription
  misc_feature: MA Experiment 20001450 PARAMETER Experiment Name: At_Far-red-induction_P Parameter: Age (day) Value: 7
  misc_feature: MA Experiment 20001450 PARAMETER Experiment Name: At_Far-red-induction_P Parameter: Light Value: Far-red vs. White
  misc_feature: MA Experiment 20001450 PARAMETER Experiment Name: At_Far-red-induction_P Parameter: Organism Value: A. thaliana
  misc_feature: MA Experiment 20001450 PARAMETER Experiment Name: At_Far-red-induction_P Parameter: Plant Line Value: Columbia
  misc_feature: MA Experiment 20001450 PARAMETER Experiment Name: At_Far-red-induction_P Parameter: Timepoint (hr) Value: 8
  misc_feature: MA Experiment 20001450 PARAMETER Experiment Name: At_Far-red-induction_P Parameter: Tissue Value: Whole Plant
  misc_feature: MA Experiment ID: 20001451 Result: Up-regulated in Transcription
  misc_feature: MA Experiment 20001451 PARAMETER Experiment Name: At_Far-red-induction_P Parameter: Age (day) Value: 7
  misc_feature: MA Experiment 20001451 PARAMETER Experiment Name: At_Far-red-induction_P Parameter: Light Value: Far-red vs. White
  misc_feature: MA Experiment 20001451 PARAMETER Experiment Name: At_Far-red-induction_P Parameter: Organism Value: A. thaliana
  misc_feature: MA Experiment 20001451 PARAMETER Experiment Name: At_Far-red-induction_P Parameter: Plant Line Value: Columbia
  misc_feature: MA Experiment 20001451 PARAMETER Experiment Name: At_Far-red-induction_P Parameter: Timepoint (hr) Value: 24
  misc_feature: MA Experiment 20001451 PARAMETER Experiment Name: At_Far-red-induction_P Parameter: Tissue Value: Whole Plant
  misc_feature: MA Experiment ID: 20001557 Result: Down-regulated in Transcription
  misc_feature: MA Experiment 20001557 PARAMETER Experiment Name: At_Drought_Soil_Dry_P Parameter: Age (day) Value: 27
  misc_feature: MA Experiment 20001557 PARAMETER Experiment Name: At_Drought_Soil_Dry_P Parameter: Organism Value: A. thaliana
  misc_feature: MA Experiment 20001557 PARAMETER Experiment Name: At_Drought_Soil_Dry_P Parameter: Plant Line Value: WS
  misc_feature: MA Experiment 20001557 PARAMETER Experiment Name: At_Drought_Soil_Dry_P Parameter: Post Timepoint (hr) Value: 3
  misc_feature: MA Experiment 20001557 PARAMETER Experiment Name: At_Drought_Soil_Dry_P Parameter: Post-Treatment Value: Re-Water vs. No Drought
  misc_feature: MA Experiment 20001557 PARAMETER Experiment Name: At_Drought_Soil_Dry_P Parameter: Timepoint (day) Value: 13
  misc_feature: MA Experiment 20001557 PARAMETER Experiment Name: At_Drought_Soil_Dry_P Parameter: Treatment Value: Drought vs. No Drought
  misc_feature: MA Experiment ID: 20001558 Result: Down-regulated in Transcription
  misc_feature: MA Experiment 20001558 PARAMETER Experiment Name: At_Drought_Soil_Dry_P Parameter: Age (day) Value: 27
  misc_feature: MA Experiment 20001558 PARAMETER Experiment Name: At_Drought_Soil_Dry_P Parameter: Organism Value: A. thaliana
  misc_feature: MA Experiment 20001558 PARAMETER Experiment Name: At_Drought_Soil_Dry_P Parameter: Plant Line Value: WS
  misc_feature: MA Experiment 20001558 PARAMETER Experiment Name: At_Drought_Soil_Dry_P Parameter: Post Timepoint (hr) Value: 6
  misc_feature: MA Experiment 20001558 PARAMETER Experiment Name: At_Drought_Soil_Dry_P Parameter: Post-Treatment Value: Re-Water vs. No Drought
  misc_feature: MA Experiment 20001558 PARAMETER Experiment Name: At_Drought_Soil_Dry_P Parameter: Timepoint (day) Value: 13
  misc_feature: MA Experiment 20001558 PARAMETER Experiment Name: At_Drought_Soil_Dry_P Parameter: Treatment Value: Drought vs. No Drought
aagcctctctctgtctcttcctagaaaagaaaactttgtaccttttccaaagtctaagcaaatcattgtttttgattactggaactcgttgagggattgagaaaaaaataatcagaagagaaagatccatggctgataattgtatcagacttcttcactcagcctctgttttcttctgtttagggcttctaatttcatccttcaacttgttgcagggtattgcagctgaaaatctttccaagcagaaactgacctcatggattcttcagaatgagattgtaaaggaagtcaatgagaatccaaacgctggatggaaagcttctttcaatgatcggtttgcaaacgccactgttgcagagtttaagcgccttcttggtgttaaaccaacaccaaagacggaatttttgggtgtgcctattgtaagccatgatatatctttgaagcttccaaaagaatttgatgctagaaccgcttggtcacagtgcaccagtattggaaggatcttagatcagggtcactgtggttcttgctgggcctttggtgctgttgaatcactgtctgacagattctgcatcaaatataacatgaatgtttctttatctgtcaatgatcttttagcatgttgtggattcctttgcggtcaaggttgtaatggtggatacccaattgctgcgtggcggtactttaagcaccacggtgtagtcactgaagagtgtgatccatacttcgacaatactggttgctcgcacccgggatgtgaacccgcttaccctacaccaaaatgtgcaaggaaatgtgttagcggaaaccagctttggcgtgaatcaaaacattatggtgttagtgcgtacaaggtcagatctcaccctgatgacattatggcagaagtttacaaaaatggacctgttgaggttgccttcactgtttacgaggactttgcgcattacaaatctggagtgtacaagcacataacaggtactaacattggaggtcatgctgttaaacttattggctggggaacttctgatgacggtgaagattattggttgcttgcaaatcaatggaaccgaagctggggtgatgatgggtacttcaagatcaggagaggaacaaacgaatgtggcattgaacatggtgttgtagctggtttaccttcagacaggaacgtagttaaaggtattactacttcagatgatcttcttgtttcctcattttaaacaggaatatgtgtctctactctgtaatacataatttcccactgtgttgttgttaccaatgaaataaaacgactttcaacccaaaaagaagtctattgtatataccatttagctttttgttcatattcaatataatgtgttgttgttttc

SEQ ID NO: 22660 - protein, 362 aa, Arabidopsis thaliana
  peptide (1)..(362): Ceres Seq. ID no. 12334634
  misc_feature (106)..(341): Pfam Name: Papain family cysteine protease Pfam Description: Papain family cysteine protease
  misc_feature (1)..(126): Homolog of NCBI NO: 18378945 NR Description: cathepsin B-like cysteine protease, putative
  misc_feature (129)..(361): Homolog of NCBI NO: 18378945 NR Description: cathepsin B-like cysteine protease, putative
  misc_feature (20)..(361): Homolog of NCBI NO: 14582576 NR Description: cathepsin B-like cysteine proteinase [Ipomoea
  misc_feature (18)..(358): Homolog of NCBI NO: 609175 NR Description: cathepsin B-like cysteine proteinase [Nicotiana
  misc_feature (12)..(361): Homolog of NCBI NO: 30678927 NR Description: cathepsin B-like cysteine protease, putative
  misc_feature (12)..(361): Homolog of NCBI NO: 18411686 NR Description: cathepsin B-like cysteine protease, putative
  misc_feature (20)..(361): Homolog of NCBI NO: 38639325 NR Description: cathepsin B-like cysteine proteinase [Solanum
  misc_feature (18)..(358): Homolog of NCBI NO: 2129942 NR Description: cathepsin B-like cysteine proteinase (EC
  misc_feature (1)..(361): Homolog of NCBI NO: 2317912 NR Description: cathepsin B-like cysteine proteinase [Arabidopsis
  misc_feature (1)..(362): Homolog of NCBI NO: 18378947 NR Description: Expressed protein
MADNCIRLLHSASVFFCLGLLISSFNLLQGIAAENLSKQKLTSWILQNEIVKEVNENPNAGWKASFNDRFANATVAEFKRLLGVKPTPKTEFLGVPIVSHDISLKLPKEFDARTAWSQCTSIGRILDQGHCGSCWAFGAVESLSDRFCIKYNMNVSLSVNDLLACCGFLCGQGCNGGYPIAAWRYFKHHGVVTEECDPYFDNTGCSHPGCEPAYPTPKCARKCVSGNQLWRESKHYGVSAYKVRSHPDDIMAEVYKNGPVEVAFTVYEDFAHYKSGVYKHITGTNIGGHAVKLIGWGTSDDGEDYWLLANQWNRSWGDDGYFKIRRGTNECGIEHGVVAGLPSDRNVVKGITTSDDLLVSSF

SEQ ID NO: 22661 - protein, 210 aa, Arabidopsis thaliana
  peptide (1)..(210): Ceres Seq. ID no. 12334635
  misc_feature (1)..(189): Pfam Name: Papain family cysteine protease Pfam Description: Papain family cysteine protease
  misc_feature (1)..(209): Homolog of NCBI NO: 6165885 NR Description: cathepsin B-like cysteine proteinase [Ipomoea
  misc_feature (1)..(209): Homolog of NCBI NO: 14582576 NR Description: cathepsin B-like cysteine proteinase [Ipomoea
  misc_feature (1)..(206): Homolog of NCBI NO: 2129942 NR Description: cathepsin B-like cysteine proteinase (EC
  misc_feature (1)..(206): Homolog of NCBI NO: 609175 NR Description: cathepsin B-like cysteine proteinase [Nicotiana
  misc_feature (1)..(209): Homolog of NCBI NO: 38639325 NR Description: cathepsin B-like cysteine proteinase [Solanum
  misc_feature (1)..(209): Homolog of NCBI NO: 30678927 NR Description: cathepsin B-like cysteine protease, putative
  misc_feature (1)..(209): Homolog of NCBI NO: 18411686 NR Description: cathepsin B-like cysteine protease, putative
  misc_feature (1)..(209): Homolog of NCBI NO: 18378945 NR Description: cathepsin B-like cysteine protease, putative
  misc_feature (1)..(209): Homolog of NCBI NO: 2317912 NR Description: cathepsin B-like cysteine proteinase [Arabidopsis
  misc_feature (1)..(210): Homolog of NCBI NO: 18378947 NR Description: Expressed protein
MNVSLSVNDLLACCGFLCGQGCNGGYPIAAWRYFKHHGVVTEECDPYFDNTGCSHPGCEPAYPTPKCARKCVSGNQLWRESKHYGVSAYKVRSHPDDIMAEVYKNGPVEVAFTVYEDFAHYKSGVYKHITGTNIGGHAVKLIGWGTSDDGEDYWLLANQWNRSWGDDGYFKIRRGTNECGIEHGVVAGLPSDRNVVKGITTSDDLLVSSF

SEQ ID NO: 22662 - DNA, 1576 bp, Arabidopsis thaliana
  misc_feature (1)..(1576): Ceres Seq. ID no. 13487662
  misc_feature: MA Experiment ID: 108463 Result: Up-regulated in Transcription
  misc_feature: MA Experiment 108463 PARAMETER Experiment Name: At_Germinating_Seeds_cDNA_P Parameter: Age (day) Value: 3 vs. 0
  misc_feature: MA Experiment 108463 PARAMETER Experiment Name: At_Germinating_Seeds_cDNA_P Parameter: Tissue Value: Germinating Seeds
  misc_feature: MA Experiment ID: 108464 Result: Up-regulated in Transcription
  misc_feature: MA Experiment 108464 PARAMETER Experiment Name: At_Germinating_Seeds_cDNA_P Parameter: Age (day) Value: 4 vs. 0
  misc_feature: MA Experiment 108464 PARAMETER Experiment Name: At_Germinating_Seeds_cDNA_P Parameter: Tissue Value: Germinating Seeds
  misc_feature: MA Experiment ID: 108572 Result: Up-regulated in Transcription
  misc_feature: MA Experiment 108572 PARAMETER Experiment Name: At_Drought_cDNA_P Parameter: Timepoint (hr) Value: 1
  misc_feature: MA Experiment 108572 PARAMETER Experiment Name: At_Drought_cDNA_P Parameter: Tissue Value: Aerial
  misc_feature: MA Experiment 108572 PARAMETER Experiment Name: At_Drought_cDNA_P Parameter: Treatment Value: Drought vs. No Drought
  misc_feature: MA Experiment ID: 108573 Result: Up-regulated in Transcription
  misc_feature: MA Experiment 108573 PARAMETER Experiment Name: At_Drought_cDNA_P Parameter: Timepoint (hr) Value: 6
  misc_feature: MA Experiment 108573 PARAMETER Experiment Name: At_Drought_cDNA_P Parameter: Tissue Value: Aerial
  misc_feature: MA Experiment 108573 PARAMETER Experiment Name: At_Drought_cDNA_P Parameter: Treatment Value: Drought vs. No Drought
  misc_feature: MA Experiment ID: 108576 Result: Up-regulated in Transcription
  misc_feature: MA Experiment 108576 PARAMETER Experiment Name: At_42deg_Heat_cDNA_P Parameter: Temperature (deg C) Value: 42 vs. 22
  misc_feature: MA Experiment 108576 PARAMETER Experiment Name: At_42deg_Heat_cDNA_P Parameter: Timepoint (hr) Value: 1
  misc_feature: MA Experiment 108576 PARAMETER Experiment Name: At_42deg_Heat_cDNA_P Parameter: Tissue Value: Aerial
  misc_feature: MA Experiment ID: 108579 Result: Down-regulated in Transcription
  misc_feature: MA Experiment 108579 PARAMETER Experiment Name: At_4deg_Cold_cDNA_P Parameter: Temperature (deg C) Value: 4 vs. 22
  misc_feature: MA Experiment 108579 PARAMETER Experiment Name: At_4deg_Cold_cDNA_P Parameter: Timepoint (hr) Value: 6
  misc_feature: MA Experiment 108579 PARAMETER Experiment Name: At_4deg_Cold_cDNA_P Parameter: Tissue Value: Aerial
  misc_feature: MA Experiment ID: 108595 Result: Down-regulated in Transcription
  misc_feature: MA Experiment 108595 PARAMETER Experiment Name: At_Ler-pi_Ovule_cDNA_P Parameter: Plant Line Value: null
  misc_feature: MA Experiment ID: 20000069 Result: Up-regulated in Transcription
  misc_feature: MA Experiment 20000069 PARAMETER Experiment Name: At_100uM_ABA_Mutants_cDNA_P Parameter: Plant Line Value: CS23
  misc_feature: MA Experiment 20000069 PARAMETER Experiment Name: At_100uM_ABA_Mutants_cDNA_P Parameter: Timepoint (hr) Value: 6
  misc_feature: MA Experiment 20000069 PARAMETER Experiment Name: At_100uM_ABA_Mutants_cDNA_P Parameter: Tissue Value: Aerial
  misc_feature: MA Experiment 20000069 PARAMETER Experiment Name: At_100uM_ABA_Mutants_cDNA_P Parameter: Treatment Value: 100uM ABA vs. No Treatment
  misc_feature: MA Experiment ID: 20000070 Result: Up-regulated in Transcription
  misc_feature: MA Experiment 20000070 PARAMETER Experiment Name: At_100uM_ABA_Mutants_cDNA_P Parameter: Plant Line Value: CS24
  misc_feature: MA Experiment 20000070 PARAMETER Experiment Name: At_100uM_ABA_Mutants_cDNA_P Parameter: Timepoint (hr) Value: 6
  misc_feature: MA Experiment 20000070 PARAMETER Experiment Name: At_100uM_ABA_Mutants_cDNA_P Parameter: Tissue Value: Aerial
  misc_feature: MA Experiment 20000070 PARAMETER Experiment Name: At_100uM_ABA_Mutants_cDNA_P Parameter: Treatment Value: 100uM ABA vs. No Treatment
  misc_feature: MA Experiment ID: 20000071 Result: Up-regulated in Transcription
  misc_feature: MA Experiment 20000071 PARAMETER Experiment Name: At_100uM_ABA_Mutants_cDNA_P Parameter: Plant Line Value: CS8104
  misc_feature: MA Experiment 20000071 PARAMETER Experiment Name: At_100uM_ABA_Mutants_cDNA_P Parameter: Timepoint (hr) Value: 6
  misc_feature: MA Experiment 20000071 PARAMETER Experiment Name: At_100uM_ABA_Mutants_cDNA_P Parameter: Tissue Value: Aerial
  misc_feature: MA Experiment 20000071 PARAMETER Experiment Name: At_100uM_ABA_Mutants_cDNA_P Parameter: Treatment Value: 100uM ABA vs. No Treatment
  misc_feature: MA Experiment ID: 20000086 Result: Up-regulated in Transcription
  misc_feature: MA Experiment 20000086 PARAMETER Experiment Name: At_100uM_ABA_Mutants_cDNA_P Parameter: Plant Line Value: CS22
  misc_feature: MA Experiment 20000086 PARAMETER Experiment Name: At_100uM_ABA_Mutants_cDNA_P Parameter: Timepoint (hr) Value: 6
  misc_feature: MA Experiment 20000086 PARAMETER Experiment Name: At_100uM_ABA_Mutants_cDNA_P Parameter: Tissue Value: Aerial
  misc_feature: MA Experiment 20000086 PARAMETER Experiment Name: At_100uM_ABA_Mutants_cDNA_P Parameter: Treatment Value: 100uM ABA vs. No Treatment
  misc_feature: MA Experiment ID: 20000117 Result: Up-regulated in Transcription
  misc_feature: MA Experiment 20000117 PARAMETER Experiment Name: At_100uM_ABA_Mutants_cDNA_P Parameter: Plant Line Value: Columbia
  misc_feature: MA Experiment 20000117 PARAMETER Experiment Name: At_100uM_ABA_Mutants_cDNA_P Parameter: Timepoint (hr) Value: 6
  misc_feature: MA Experiment 20000117 PARAMETER Experiment Name: At_100uM_ABA_Mutants_cDNA_P Parameter: Tissue Value: Aerial
  misc_feature: MA Experiment 20000117 PARAMETER Experiment Name: At_100uM_ABA_Mutants_cDNA_P Parameter: Treatment Value: 100uM ABA vs. No Treatment
  misc_feature: MA Experiment ID: 20000224 Result: Down-regulated in Transcription
  misc_feature: MA Experiment ID: 20000234 Result: Down-regulated in Transcription
  misc_feature: MA Experiment 20000234 PARAMETER Experiment Name: At_Siliques_P Parameter: Age (day) Value: 21
  misc_feature: MA Experiment 20000234 PARAMETER Experiment Name: At_Siliques_P Parameter: Organism Value: A. thaliana
  misc_feature: MA Experiment 20000234 PARAMETER Experiment Name: At_Siliques_P Parameter: Plant Line Value: WS
  misc_feature: MA Experiment 20000234 PARAMETER Experiment Name: At_Siliques_P Parameter: Tissue Value: Less Than 5mm Siliques vs. Whole Plant
  misc_feature: MA Experiment ID: 20000286 Result: Down-regulated in Transcription
  misc_feature: MA Experiment 20000286 PARAMETER Experiment Name: At_Open_Flower_P Parameter: Age (day) Value: 21
  misc_feature: MA Experiment 20000286 PARAMETER Experiment Name: At_Open_Flower_P Parameter: Plant Line Value: WS
  misc_feature: MA Experiment 20000286 PARAMETER Experiment Name: At_Open_Flower_P Parameter: Tissue Value: Half Open vs. Whole Plant
  misc_feature: MA Experiment ID: 20001248 Result: Up-regulated in Transcription
  misc_feature: MA Experiment 20001248 PARAMETER Experiment Name: At_Far-red-induction_P Parameter: Age (day) Value: 7
  misc_feature: MA Experiment 20001248 PARAMETER Experiment Name: At_Far-red-induction_P Parameter: Light Value: Far-red vs. White
  misc_feature: MA Experiment 20001248 PARAMETER Experiment Name: At_Far-red-induction_P Parameter: Organism Value: A. thaliana
  misc_feature: MA Experiment 20001248 PARAMETER Experiment Name: At_Far-red-induction_P Parameter: Plant Line Value: Columbia
  misc_feature: MA Experiment 20001248 PARAMETER Experiment Name: At_Far-red-induction_P Parameter: Timepoint (hr) Value: 4
  misc_feature: MA Experiment 20001248 PARAMETER Experiment Name: At_Far-red-induction_P Parameter: Tissue Value: Whole Plant
  misc_feature: MA Experiment ID: 20001450 Result: Up-regulated in Transcription
  misc_feature: MA Experiment 20001450 PARAMETER Experiment Name: At_Far-red-induction_P Parameter: Age (day) Value: 7
  misc_feature: MA Experiment 20001450 PARAMETER Experiment Name: At_Far-red-induction_P Parameter: Light Value: Far-red vs. White
  misc_feature: MA Experiment 20001450 PARAMETER Experiment Name: At_Far-red-induction_P Parameter: Organism Value: A. thaliana
  misc_feature: MA Experiment 20001450 PARAMETER Experiment Name: At_Far-red-induction_P Parameter: Plant Line Value: Columbia
  misc_feature: MA Experiment 20001450 PARAMETER Experiment Name: At_Far-red-induction_P Parameter: Timepoint (hr) Value: 8
  misc_feature: MA Experiment 20001450 PARAMETER Experiment Name: At_Far-red-induction_P Parameter: Tissue Value: Whole Plant
  misc_feature: MA Experiment ID: 20001451 Result: Up-regulated in Transcription
  misc_feature: MA Experiment 20001451 PARAMETER Experiment Name: At_Far-red-induction_P Parameter: Age (day) Value: 7
  misc_feature: MA Experiment 20001451 PARAMETER Experiment Name: At_Far-red-induction_P Parameter: Light Value: Far-red vs. White
  misc_feature: MA Experiment 20001451 PARAMETER Experiment Name: At_Far-red-induction_P Parameter: Organism Value: A. thaliana
  misc_feature: MA Experiment 20001451 PARAMETER Experiment Name: At_Far-red-induction_P Parameter: Plant Line Value: Columbia
  misc_feature: MA Experiment 20001451 PARAMETER Experiment Name: At_Far-red-induction_P Parameter: Timepoint (hr) Value: 24
  misc_feature: MA Experiment 20001451 PARAMETER Experiment Name: At_Far-red-induction_P Parameter: Tissue Value: Whole Plant
  misc_feature: MA Experiment ID: 20001556 Result: Down-regulated in Transcription
  misc_feature: MA Experiment 20001556 PARAMETER Experiment Name: At_Drought_Soil_Dry_P Parameter: Age (day) Value: 26
  misc_feature: MA Experiment 20001556 PARAMETER Experiment Name: At_Drought_Soil_Dry_P Parameter: Organism Value: A. thaliana
  misc_feature: MA Experiment 20001556 PARAMETER Experiment Name: At_Drought_Soil_Dry_P Parameter: Plant Line Value: WS
  misc_feature: MA Experiment 20001556 PARAMETER Experiment Name: At_Drought_Soil_Dry_P Parameter: Post Timepoint (hr) Value: None
  misc_feature: MA Experiment 20001556 PARAMETER Experiment Name: At_Drought_Soil_Dry_P Parameter: Post-Treatment Value: None
  misc_feature: MA Experiment 20001556 PARAMETER Experiment Name: At_Drought_Soil_Dry_P Parameter: Timepoint (day) Value: 12
  misc_feature: MA Experiment 20001556 PARAMETER Experiment Name: At_Drought_Soil_Dry_P Parameter: Treatment Value: Drought vs. No Drought
  misc_feature: MA Experiment ID: 20001560 Result: Down-regulated in Transcription
  misc_feature: MA Experiment 20001560 PARAMETER Experiment Name: At_Drought_Soil_Dry_P Parameter: Age (day) Value: 28
  misc_feature: MA Experiment 20001560 PARAMETER Experiment Name: At_Drought_Soil_Dry_P Parameter: Organism Value: A. thaliana
  misc_feature: MA Experiment 20001560 PARAMETER Experiment Name: At_Drought_Soil_Dry_P Parameter: Plant Line Value: WS
  misc_feature: MA Experiment 20001560 PARAMETER Experiment Name: At_Drought_Soil_Dry_P Parameter: Post Timepoint (hr) Value: None
  misc_feature: MA Experiment 20001560 PARAMETER Experiment Name: At_Drought_Soil_Dry_P Parameter: Post-Treatment Value: None
  misc_feature: MA Experiment 20001560 PARAMETER Experiment Name: At_Drought_Soil_Dry_P Parameter: Timepoint (day) Value: 14
  misc_feature: MA Experiment 20001560 PARAMETER Experiment Name: At_Drought_Soil_Dry_P Parameter: Treatment Value: Drought vs. No Drought
acaaagatcatcacagccaattttagaaaacttctgacggaaaataaaaagagaggatttatttttatctttctgtgttaccggagaatagagacggtaccttttcactgttgacttaacggagaagatggcgactgtgccggagataaagataatgagaagcgagagcttaggtcatcggagtgacgtgtcgagcccggaagctaagctagggatgcgtgtggaagatctctgggatgagcagaaaccacagctcagtcctaacgagaagctcaacgcttgctttgagagcatccctgtctctgctttccctctctcttctgattcacaagatattgagataagatcagacacaagtttggctgaagctgttcagacactatcgaaattcaaggtcttgagcgcgcctgttgtagatgttgatgcgcctgaagatgccagttggattgatcgctacatcggtattgtggaatttccaggcattgttgtctggcttttgcatcagttggagccaccatctccaaggagccctgctgttgcagcttcaaatggattttctcatgatttcaccaccgatgttctggataacggagattcagcagtaacttctggaaacttctttgaggtccttacttcttcagagctatacgagaacaccaaggttcgagatatctctggaacattccgctgggcaccgttcctggctctgcagaaagagaactcctttttgaccatgctgttacttctttctaagtacaaaatgaagagcatcccggtggttgatttaggtgtagctaagattgagaacattatcacacaatcaggagttatacatatgctggcagaatgcgcggggcttctctggtttgaggattggggaatcaaaactctctctgaagtaggtcttcccattatgtcaaaggatcatatcataaagatctatgaggatgaaccagttcttcaggcattcaagctgatgaggagaaagagaatcggaggcatacctgtcattgaaaggaatagcgagaagccagtaggcaacattagccttagagatgttcaatttctcctcactgcacctgagatttaccatgactacaggtcaatcacaacgaagaacttcttagtatctgttagagagcatcttgagaagtgcggggatacatcagctcctatcatgagtggtgtgattgcttgcacgaagaaccatacactaaaggaactgatcttgatgttagacgccgagaagatccataggatatatgttgtggatgagtttggtaaccttgaaggactcatcactcttagagacatcattgcaagacttgtccatgagccatccggctattttggagatttctttgatggcgttatgcctcttcccgaaaactaccgagtctgagaggaaagtggtagtctttcttcggtaaattgtcttttgtttggtgataatgcttctgtctgtttgtgctaaagttctcgaaattgtgttatattaaacgttaagagaaataagaaaagaagaaagagcctgtctttgagtgaatttgtctgaaatacagtaactcttaagatt

SEQ ID NO: 22663 - protein, 424 aa, Arabidopsis thaliana
  peptide (1)..(424): Ceres Seq. ID no. 15220484
  misc_feature (63)..(124): Pfam Name: CBS domain Pfam Description: CBS domain
  misc_feature (33)..(128): Homolog of NCBI NO: 34912162 NR Description: P0712E02.24 [Oryza sativa (japonica
  misc_feature (163)..(416): Homolog of NCBI NO: 34912162 NR Description: P0712E02.24 [Oryza sativa (japonica
  misc_feature (18)..(128): Homolog of NCBI NO: 25404839 NR Description: hypothetical protein T17F3.17 [imported] -
  misc_feature (137)..(408): Homolog of NCBI NO: 25404839 NR Description: hypothetical protein T17F3.17 [imported] -
  misc_feature (23)..(424): Homolog of NCBI NO: 19386799 NR Description: OJ1485_B09.7 [Oryza sativa (japonica
  misc_feature (23)..(128): Homolog of NCBI NO: 38346640 NR Description: OSJNBa0072D21.10 [Oryza sativa (japonica
  misc_feature (148)..(424): Homolog of NCBI NO: 38346640 NR Description: OSJNBa0072D21.10 [Oryza sativa (japonica
  misc_feature (23)..(424): Homolog of NCBI NO: 32364482 NR Description: AKIN gamma [Medicago truncatula]
  misc_feature (1)..(424): Homolog of NCBI NO: 15228397 NR Description: CBS domain containing protein [Arabidopsis
  misc_feature (1)..(424): Homolog of NCBI NO: 21592917 NR Description: unknown [Arabidopsis thaliana]
MATVPEIKIMRSESLGHRSDVSSPEAKLGMRVEDLWDEQKPQLSPNEKLNACFESIPVSAFPLSSDSQDIEIRSDTSLAEAVQTLSKFKVLSAPVVDVDAPEDASWIDRYIGIVEFPGIVVWLLHQLEPPSPRSPAVAASNGFSHDFTTDVLDNGDSAVTSGNFFEVLTSSELYENTKVRDISGTFRWAPFLALQKENSFLTMLLLLSKYKMKSIPVVDLGVAKIENIITQSGVIHMLAECAGLLWFEDWGIKTLSEVGLPIMSKDHIIKIYEDEPVLQAFKLMRRKRIGGIPVIERNSEKPVGNISLRDVQFLLTAPEIYHDYRSITTKNFLVSVREHLEKCGDTSAPIMSGVIACTKNHTLKELILMLDAEKIHRIYVVDEFGNLEGLITLRDIIARLVHEPSGYFGDFFDGVMPLPENYRV

SEQ ID NO: 22664 - protein, 415 aa, Arabidopsis thaliana
  peptide (1)..(415): Ceres Seq. ID no. 15220485
  misc_feature (54)..(115): Pfam Name: CBS domain Pfam Description: CBS domain
  misc_feature (24)..(119): Homolog of NCBI NO: 34912162 NR Description: P0712E02.24 [Oryza sativa (japonica
  misc_feature (154)..(407): Homolog of NCBI NO: 34912162 NR Description: P0712E02.24 [Oryza sativa (japonica
  misc_feature (9)..(119): Homolog of NCBI NO: 25404839 NR Description: hypothetical protein T17F3.17 [imported] -
  misc_feature (128)..(399): Homolog of NCBI NO: 25404839 NR Description: hypothetical protein T17F3.17 [imported] -
  misc_feature (14)..(415): Homolog of NCBI NO: 19386799 NR Description: OJ1485_B09.7 [Oryza sativa (japonica
  misc_feature (14)..(119): Homolog of NCBI NO: 38346640 NR Description: OSJNBa0072D21.10 [Oryza sativa (japonica
  misc_feature (139)..(415): Homolog of NCBI NO: 38346640 NR Description: OSJNBa0072D21.10 [Oryza sativa (japonica
  misc_feature (14)..(415): Homolog of NCBI NO: 32364482 NR Description: AKIN gamma [Medicago truncatula]
  misc_feature (1)..(415): Homolog of NCBI NO: 15228397 NR Description: CBS domain containing protein [Arabidopsis
  misc_feature (1)..(415): Homolog of NCBI NO: 21592917 NR Description: unknown [Arabidopsis thaliana]
MRSESLGHRSDVSSPEAKLGMRVEDLWDEQKPQLSPNEKLNACFESIPVSAFPLSSDSQDIEIRSDTSLAEAVQTLSKFKVLSAPVVDVDAPEDASWIDRYIGIVEFPGIVVWLLHQLEPPSPRSPAVAASNGFSHDFTTDVLDNGDSAVTSGNFFEVLTSSELYENTKVRDISGTFRWAPFLALQKENSFLTMLLLLSKYKMKSIPVVDLGVAKIENIITQSGVIHMLAECAGLLWFEDWGIKTLSEVGLPIMSKDHIIKIYEDEPVLQAFKLMRRKRIGGIPVIERNSEKPVGNISLRDVQFLLTAPEIYHDYRSITTKNFLVSVREHLEKCGDTSAPIMSGVIACTKNHTLKELILMLDAEKIHRIYVVDEFGNLEGLITLRDIIARLVHEPSGYFGDFFDGVMPLPENYRV

SEQ ID NO: 22665 - protein, 395 aa, Arabidopsis thaliana
  peptide (1)..(395): Ceres Seq. ID no. 15220486
  misc_feature (34)..(95): Pfam Name: CBS domain Pfam Description: CBS domain
  misc_feature (4)..(99): Homolog of NCBI NO: 34912162 NR Description: P0712E02.24 [Oryza sativa (japonica
  misc_feature (134)..(387): Homolog of NCBI NO: 34912162 NR Description: P0712E02.24 [Oryza sativa (japonica
  misc_feature (1)..(99): Homolog of NCBI NO: 25404839 NR Description: hypothetical protein T17F3.17 [imported] -
  misc_feature (108)..(379): Homolog of NCBI NO: 25404839 NR Description: hypothetical protein T17F3.17 [imported] -
  misc_feature (1)..(395): Homolog of NCBI NO: 19386799 NR Description: OJ1485_B09.7 [Oryza sativa (japonica
  misc_feature (1)..(99): Homolog of NCBI NO: 38346640 NR Description: OSJNBa0072D21.10 [Oryza sativa (japonica
  misc_feature (119)..(395): Homolog of NCBI NO: 38346640 NR Description: OSJNBa0072D21.10 [Oryza sativa (japonica
  misc_feature (1)..(395): Homolog of NCBI NO: 32364482 NR Description: AKIN gamma [Medicago truncatula]
  misc_feature (1)..(395): Homolog of NCBI NO: 15228397 NR Description: CBS domain containing protein [Arabidopsis
  misc_feature (1)..(395): Homolog of NCBI NO: 21592917 NR Description: unknown [Arabidopsis thaliana]
MRVEDLWDEQKPQLSPNEKLNACFESIPVSAFPLSSDSQDIEIRSDTSLAEAVQTLSKFKVLSAPVVDVDAPEDASWIDRYIGIVEFPGIVVWLLHQLEPPSPRSPAVAASNGFSHDFTTDVLDNGDSAVTSGNFFEVLTSSELYENTKVRDISGTFRWAPFLALQKENSFLTMLLLLSKYKMKSIPVVDLGVAKIENIITQSGVIHMLAECAGLLWFEDWGIKTLSEVGLPIMSKDHIIKIYEDEPVLQAFKLMRRKRIGGIPVIERNSEKPVGNISLRDVQFLLTAPEIYHDYRSITTKNFLVSVREHLEKCGDTSAPIMSGVIACTKNHTLKELILMLDAEKIHRIYVVDEFGNLEGLITLRDIIARLVHEPSGYFGDFFDGVMPLPENYRV

SEQ ID NO: 22666 - DNA, 1066 bp, Arabidopsis thaliana
  misc_feature (1)..(1066): Ceres Seq. ID no. 12334585
  misc_feature: MA Experiment ID: 108595 Result: Down-regulated in Transcription
  misc_feature: MA Experiment 108595 PARAMETER Experiment Name: At_Ler-pi_Ovule_cDNA_P Parameter: Plant Line Value: null
  misc_feature: MA Experiment ID: 108668 Result: Down-regulated in Transcription
  misc_feature: MA Experiment 108668 PARAMETER Experiment Name: At_2mM_SA_cDNA_P Parameter: Plant Line Value: WS
  misc_feature: MA Experiment 108668 PARAMETER Experiment Name: At_2mM_SA_cDNA_P Parameter: Timepoint (hr) Value: 6
  misc_feature: MA Experiment 108668 PARAMETER Experiment Name: At_2mM_SA_cDNA_P Parameter: Treatment Value: 2mM SA vs. No Treatment
acttaaagatgataagtactgtactgtactgtctaatgtctatcctctcttaaggcttcgtttcaaattcttcaatcgtcctttagaaatcctcaaaatatccacaattttcctctctttacccagaagatttcatcagaacctcttcgccattaatggttacagcgatgttttgtgcatcatcttctccaattacatctcctctctacccaaaagcttataaattttctcaaacaaaatcgaattcgaagagattttcctctctgcgtgcttcgttgcctgtttctgataacaagcttcttaaatttgaatacacaccatggcttattgttggacttggtaaccctggattaaagtattacggaacaaggcataatattggttttgagatgattgatcatatagctcgagcaacggatatttctatgaacacaattcagtccaaggctttagttgggataggttctgttggagaagttccgattttgttggttaaacctcaaggatacatgaatttcagtggtgaatcggttgggccgttagctgcttactaccaaatacccttacgtcacattcttatgatatatgatgacatgggtttgtctaatggtgtcttgagacttcaaccaaaaggtgggcatagccaacacaatggattgaagaatgtgacagaacatttaaatggttgtcgcggctatccccgcttatcaatcggaattggaaatccaccaggtaacatggatatgaaagcgtttcttctccagaaattcagccccttggagcgcaaacagatggatgagggactggaacaaggtgttgaaggtgtgaagacacttgttgaagagggatttagtgactcaatatctcgattcaatttggggcagaaatacaagtttcacacagtttgattccttgacatttgcctcatcatgatacctcctgtcacagcaacagtagtaacacccatagtccaacattgttcttatccttggtctttgtttagctgataggtaatattgtaacatttgtattctctaagatcaattttatttatttatattttgtc

SEQ ID NO: 22667 - protein, 250 aa, Arabidopsis thaliana
  peptide (1)..(250): Ceres Seq. ID no. 12334586
  misc_feature (20)..(240): Homolog of NCBI NO: 26453108 NR Description: unknown protein [Arabidopsis thaliana]
  misc_feature (20)..(240): Homolog of NCBI NO: 30685853 NR Description: expressed protein [Arabidopsis thaliana]
  misc_feature (53)..(250): Homolog of NCBI NO: 30687503 NR Description: expressed protein [Arabidopsis thaliana]
  misc_feature (52)..(248): Homolog of NCBI NO: 40889732 NR Description: Chain A, Structure Of The Chloroplast Group Ii
  misc_feature (52)..(250): Homolog of NCBI NO: 40889731 NR Description: Chain A, Structure Of The Group Ii Intron
  misc_feature (52)..(250): Homolog of NCBI NO: 40889730 NR Description: Chain A, Crystal Structure Of The Chloroplast
  misc_feature (1)..(250): Homolog of NCBI NO: 6752919 NR Description: CRS2 [Zea mays]
  misc_feature (16)..(250): Homolog of NCBI NO: 15237280 NR Description: CRS2-like protein; protein id: At5g16140.1
  misc_feature (5)..(250): Homolog of NCBI NO: 26451849 NR Description: putative CRS2 [Arabidopsis thaliana]
  misc_feature (5)..(250): Homolog of NCBI NO: 15240875 NR Description: CRS2 -like protein; protein id: At5g38290.1
MVTAMFCASSSPITSPLYPKAYKFSQTKSNSKRFSSLRASLPVSDNKLLKFEYTPWLIVGLGNPGLKYYGTRHNIGFEMIDHIARATDISMNTIQSKALVGIGSVGEVPILLVKPQGYMNFSGESVGPLAAYYQIPLRHILMIYDDMGLSNGVLRLQPKGGHSQHNGLKNVTEHLNGCRGYPRLSIGIGNPPGNMDMKAFLLQKFSPLERKQMDEGLEQGVEGVKTLVEEGFSDSISRFNLGQKYKFHTV

SEQ ID NO: 22668 - protein, 246 aa, Arabidopsis thaliana
  peptide (1)..(246): Ceres Seq. ID no. 12334587
  misc_feature (16)..(236): Homolog of NCBI NO: 26453108 NR Description: unknown protein [Arabidopsis thaliana]
  misc_feature (16)..(236): Homolog of NCBI NO: 30685853 NR Description: expressed protein [Arabidopsis thaliana]
  misc_feature (49)..(246): Homolog of NCBI NO: 30687503 NR Description: expressed protein [Arabidopsis thaliana]
  misc_feature (48)..(244): Homolog of NCBI NO: 40889732 NR Description: Chain A, Structure Of The Chloroplast Group Ii
  misc_feature (48)..(246): Homolog of NCBI NO: 40889731 NR Description: Chain A, Structure Of The Group Ii Intron
  misc_feature (48)..(246): Homolog of NCBI NO: 40889730 NR Description: Chain A, Crystal Structure Of The Chloroplast
  misc_feature (1)..(246): Homolog of NCBI NO: 6752919 NR Description: CRS2 [Zea mays]
  misc_feature (12)..(246): Homolog of NCBI NO: 15237280 NR Description: CRS2-like protein; protein id: At5g16140.1
  misc_feature (1)..(246): Homolog of NCBI NO: 26451849 NR Description: putative CRS2 [Arabidopsis thaliana]
  misc_feature (1)..(246): Homolog of NCBI NO: 15240875 NR Description: CRS2 -like protein; protein id: At5g38290.1
MFCASSSPITSPLYPKAYKFSQTKSNSKRFSSLRASLPVSDNKLLKFEYTPWLIVGLGNPGLKYYGTRHNIGFEMIDHIARATDISMNTIQSKALVGIGSVGEVPILLVKPQGYMNFSGESVGPLAAYYQIPLRHILMIYDDMGLSNGVLRLQPKGGHSQHNGLKNVTEHLNGCRGYPRLSIGIGNPPGNMDMKAFLLQKFSPLERKQMDEGLEQGVEGVKTLVEEGFSDSISRFNLGQKYKFHTV

SEQ ID NO: 22669 - protein, 172 aa, Arabidopsis thaliana
  peptide (1)..(172): Ceres Seq. ID no. 12334588
  misc_feature (1)..(162): Homolog of NCBI NO: 26453108 NR Description: unknown protein [Arabidopsis thaliana]
  misc_feature (1)..(162): Homolog of NCBI NO: 30685853 NR Description: expressed protein [Arabidopsis thaliana]
  misc_feature (1)..(172): Homolog of NCBI NO: 30687503 NR Description: expressed protein [Arabidopsis thaliana]
  misc_feature (1)..(170): Homolog of NCBI NO: 40889732 NR Description: Chain A, Structure Of The Chloroplast Group Ii
  misc_feature (1)..(172): Homolog of NCBI NO: 40889731 NR Description: Chain A, Structure Of The Group Ii Intron
  misc_feature (1)..(172): Homolog of NCBI NO: 40889730 NR Description: Chain A, Crystal Structure Of The Chloroplast
  misc_feature (1)..(172): Homolog of NCBI NO: 6752919 NR Description: CRS2 [Zea mays]
  misc_feature (1)..(172): Homolog of NCBI NO: 15237280 NR Description: CRS2-like protein; protein id: At5g16140.1
  misc_feature (1)..(172): Homolog of NCBI NO: 26451849 NR Description: putative CRS2 [Arabidopsis thaliana]
  misc_feature (1)..(172): Homolog of NCBI NO: 15240875 NR Description: CRS2 -like protein; protein id: At5g38290.1
MIDHIARATDISMNTIQSKALVGIGSVGEVPILLVKPQGYMNFSGESVGPLAAYYQIPLRHILMIYDDMGLSNGVLRLQPKGGHSQHNGLKNVTEHLNGCRGYPRLSIGIGNPPGNMDMKAFLLQKFSPLERKQMDEGLEQGVEGVKTLVEEGFSDSISRFNLGQKYKFHTV

SEQ ID NO: 22670 - DNA, 1236 bp, Arabidopsis thaliana
  misc_feature (1)..(1236): Ceres Seq. ID no. 12334589
  misc_feature: MA Experiment ID: 108435 Result: Up-regulated in Transcription
  misc_feature: MA Experiment 108435 PARAMETER Experiment Name: At_stm_Mutants_cDNA_P Parameter: Plant Line Value: wt Landsburg vs stm
  misc_feature: MA Experiment 108435 PARAMETER Experiment Name: At_stm_Mutants_cDNA_P Parameter: Tissue Value: Shoot Apical Meristem Region
  misc_feature: MA Experiment ID: 108461 Result: Up-regulated in Transcription
  misc_feature: MA Experiment 108461 PARAMETER Experiment Name: At_Germinating_Seeds_cDNA_P Parameter: Age (day) Value: 1 vs. 0
  misc_feature: MA Experiment 108461 PARAMETER Experiment Name: At_Germinating_Seeds_cDNA_P Parameter: Tissue Value: Germinating Seeds
  misc_feature: MA Experiment ID: 108462 Result: Up-regulated in Transcription
  misc_feature: MA Experiment 108462 PARAMETER Experiment Name: At_Germinating_Seeds_cDNA_P Parameter: Age (day) Value: 2 vs. 0
  misc_feature: MA Experiment 108462 PARAMETER Experiment Name: At_Germinating_Seeds_cDNA_P Parameter: Tissue Value: Germinating Seeds
  misc_feature: MA Experiment ID: 108463 Result: Up-regulated in Transcription
  misc_feature: MA Experiment 108463 PARAMETER Experiment Name: At_Germinating_Seeds_cDNA_P Parameter: Age (day) Value: 3 vs. 0
  misc_feature: MA Experiment 108463 PARAMETER Experiment Name: At_Germinating_Seeds_cDNA_P Parameter: Tissue Value: Germinating Seeds
  misc_feature: MA Experiment ID: 108464 Result: Up-regulated in Transcription
  misc_feature: MA Experiment 108464 PARAMETER Experiment Name: At_Germinating_Seeds_cDNA_P Parameter: Age (day) Value: 4 vs. 0
  misc_feature: MA Experiment 108464 PARAMETER Experiment Name: At_Germinating_Seeds_cDNA_P Parameter: Tissue Value: Germinating Seeds
  misc_feature: MA Experiment ID: 108488 Result: Down-regulated in Transcription
  misc_feature: MA Experiment ID: 108489 Result: Up-regulated in Transcription
  misc_feature: MA Experiment ID: 108501 Result: Down-regulated in Transcription
  misc_feature: MA Experiment 108501 PARAMETER Experiment Name: At_ap2_floral_buds_cDNA_P Parameter: Plant Line Value: ap2 (Ler.)
  misc_feature: MA Experiment 108501 PARAMETER Experiment Name: At_ap2_floral_buds_cDNA_P Parameter: Tissue Value: Closed Flower
  misc_feature: MA Experiment ID: 108572 Result: Up-regulated in Transcription
  misc_feature: MA Experiment 108572 PARAMETER Experiment Name: At_Drought_cDNA_P Parameter: Timepoint (hr) Value: 1
  misc_feature: MA Experiment 108572 PARAMETER Experiment Name: At_Drought_cDNA_P Parameter: Tissue Value: Aerial
  misc_feature: MA Experiment 108572 PARAMETER Experiment Name: At_Drought_cDNA_P Parameter: Treatment Value: Drought vs. No Drought
  misc_feature: MA Experiment ID: 108573 Result: Up-regulated in Transcription
  misc_feature: MA Experiment 108573 PARAMETER Experiment Name: At_Drought_cDNA_P Parameter: Timepoint (hr) Value: 6
  misc_feature: MA Experiment 108573 PARAMETER Experiment Name: At_Drought_cDNA_P Parameter: Tissue Value: Aerial
  misc_feature: MA Experiment 108573 PARAMETER Experiment Name: At_Drought_cDNA_P Parameter: Treatment Value: Drought vs. No Drought
  misc_feature: MA Experiment ID: 108585 Result: Up-regulated in Transcription
  misc_feature: MA Experiment 108585 PARAMETER Experiment Name: At_5mM_NaNP_cDNA_P Parameter: Timepoint (hr) Value: 6
  misc_feature: MA Experiment 108585 PARAMETER Experiment Name: At_5mM_NaNP_cDNA_P Parameter: Tissue Value: Aerial
  misc_feature: MA Experiment 108585 PARAMETER Experiment Name: At_5mM_NaNP_cDNA_P Parameter: Treatment Value: null
  misc_feature: MA Experiment ID: 108594 Result: Up-regulated in Transcription
  misc_feature: MA Experiment 108594 PARAMETER Experiment Name: At_Ler-rhl_Root_cDNA_P Parameter: Plant Line Value: null
  misc_feature: MA Experiment ID: 108595 Result: Down-regulated in Transcription
  misc_feature: MA Experiment 108595 PARAMETER Experiment Name: At_Ler-pi_Ovule_cDNA_P Parameter: Plant Line Value: null
  misc_feature: MA Experiment ID: 108605 Result: Up-regulated in Transcription
  misc_feature: MA Experiment 108605 PARAMETER Experiment Name: At_100uM_ABA_cDNA_P Parameter: Timepoint (hr) Value: 6
  misc_feature: MA Experiment 108605 PARAMETER Experiment Name: At_100uM_ABA_cDNA_P Parameter: Tissue Value: Aerial
  misc_feature: MA Experiment 108605 PARAMETER Experiment Name: At_100uM_ABA_cDNA_P Parameter: Treatment Value: 100uM ABA vs. No Treatment
  misc_feature: MA Experiment ID: 108668 Result: Up-regulated in Transcription
  misc_feature: MA Experiment 108668 PARAMETER Experiment Name: At_2mM_SA_cDNA_P Parameter: Plant Line Value: WS
  misc_feature: MA Experiment 108668 PARAMETER Experiment Name: At_2mM_SA_cDNA_P Parameter: Timepoint (hr) Value: 6
  misc_feature: MA Experiment 108668 PARAMETER Experiment Name: At_2mM_SA_cDNA_P Parameter: Treatment Value: 2mM SA vs. No Treatment
  misc_feature: MA Experiment ID: 20000069 Result: Down-regulated in Transcription
  misc_feature: MA Experiment 20000069 PARAMETER Experiment Name: At_100uM_ABA_Mutants_cDNA_P Parameter: Plant Line Value: CS23
  misc_feature: MA Experiment 20000069 PARAMETER Experiment Name: At_100uM_ABA_Mutants_cDNA_P Parameter: Timepoint (hr) Value: 6
  misc_feature: MA Experiment 20000069 PARAMETER Experiment Name: At_100uM_ABA_Mutants_cDNA_P Parameter: Tissue Value: Aerial
  misc_feature: MA Experiment 20000069 PARAMETER Experiment Name: At_100uM_ABA_Mutants_cDNA_P Parameter: Treatment Value: 100uM ABA vs. No Treatment
  misc_feature: MA Experiment ID: 20000070 Result: Down-regulated in Transcription
  misc_feature: MA Experiment 20000070 PARAMETER Experiment Name: At_100uM_ABA_Mutants_cDNA_P Parameter: Plant Line Value: CS24
  misc_feature: MA Experiment 20000070 PARAMETER Experiment Name: At_100uM_ABA_Mutants_cDNA_P Parameter: Timepoint (hr) Value: 6
  misc_feature: MA Experiment 20000070 PARAMETER Experiment Name: At_100uM_ABA_Mutants_cDNA_P Parameter: Tissue Value: Aerial
  misc_feature: MA Experiment 20000070 PARAMETER Experiment Name: At_100uM_ABA_Mutants_cDNA_P Parameter: Treatment Value: 100uM ABA vs. No Treatment
  misc_feature: MA Experiment ID: 20000071 Result: Down-regulated in Transcription
  misc_feature: MA Experiment 20000071 PARAMETER Experiment Name: At_100uM_ABA_Mutants_cDNA_P Parameter: Plant Line Value: CS8104
  misc_feature: MA Experiment 20000071 PARAMETER Experiment Name: At_100uM_ABA_Mutants_cDNA_P Parameter: Timepoint (hr) Value: 6
  misc_feature: MA Experiment 20000071 PARAMETER Experiment Name: At_100uM_ABA_Mutants_cDNA_P Parameter: Tissue Value: Aerial
  misc_feature: MA Experiment 20000071 PARAMETER Experiment Name: At_100uM_ABA_Mutants_cDNA_P Parameter: Treatment Value: 100uM ABA vs. No Treatment
  misc_feature: MA Experiment ID: 20000086 Result: Down-regulated in Transcription
  misc_feature: MA Experiment 20000086 PARAMETER Experiment Name: At_100uM_ABA_Mutants_cDNA_P Parameter: Plant Line Value: CS22
  misc_feature: MA Experiment 20000086 PARAMETER Experiment Name: At_100uM_ABA_Mutants_cDNA_P Parameter: Timepoint (hr) Value: 6
  misc_feature: MA Experiment 20000086 PARAMETER Experiment Name: At_100uM_ABA_Mutants_cDNA_P Parameter: Tissue Value: Aerial
  misc_feature: MA Experiment 20000086 PARAMETER Experiment Name: At_100uM_ABA_Mutants_cDNA_P Parameter: Treatment Value: 100uM ABA vs. No Treatment
  misc_feature: MA Experiment ID: 20000087 Result: Down-regulated in Transcription
  misc_feature: MA Experiment 20000087 PARAMETER Experiment Name: At_100uM_ABA_Mutants_cDNA_P Parameter: Plant Line Value: WS
  misc_feature: MA Experiment 20000087 PARAMETER Experiment Name: At_100uM_ABA_Mutants_cDNA_P Parameter: Timepoint (hr) Value: 6
  misc_feature: MA Experiment 20000087 PARAMETER Experiment Name: At_100uM_ABA_Mutants_cDNA_P Parameter: Tissue Value: Aerial
  misc_feature: MA Experiment 20000087 PARAMETER Experiment Name: At_100uM_ABA_Mutants_cDNA_P Parameter: Treatment Value: 100uM ABA vs. No Treatment
  misc_feature: MA Experiment ID: 20000088 Result: Down-regulated in Transcription
  misc_feature: MA Experiment 20000088 PARAMETER Experiment Name: At_100uM_ABA_Mutants_cDNA_P Parameter: Plant Line Value: Landsberg
  misc_feature: MA Experiment 20000088 PARAMETER Experiment Name: At_100uM_ABA_Mutants_cDNA_P Parameter: Timepoint (hr) Value: 6
  misc_feature: MA Experiment 20000088 PARAMETER Experiment Name: At_100uM_ABA_Mutants_cDNA_P Parameter: Tissue Value: Aerial
  misc_feature: MA Experiment 20000088 PARAMETER Experiment Name: At_100uM_ABA_Mutants_cDNA_P Parameter: Treatment Value: 100uM ABA vs. No Treatment
  misc_feature: MA Experiment ID: 20000089 Result: Down-regulated in Transcription
  misc_feature: MA Experiment ID: 20000090 Result: Down-regulated in Transcription
  misc_feature: MA Experiment ID: 20000112 Result: Up-regulated in Transcription
  misc_feature: MA Experiment 20000112 PARAMETER Experiment Name: At_42deg_Heat_cDNA_P Parameter: Temperature (deg C) Value: 42 vs. 22
  misc_feature: MA Experiment 20000112 PARAMETER Experiment Name: At_42deg_Heat_cDNA_P Parameter: Timepoint (hr) Value: 2
  misc_feature: MA Experiment 20000112 PARAMETER Experiment Name: At_42deg_Heat_cDNA_P Parameter: Tissue Value: Aerial
  misc_feature: MA Experiment ID: 20000117 Result: Down-regulated in Transcription
  misc_feature: MA Experiment 20000117 PARAMETER Experiment Name: At_100uM_ABA_Mutants_cDNA_P Parameter: Plant Line Value: Columbia
  misc_feature: MA Experiment 20000117 PARAMETER Experiment Name: At_100uM_ABA_Mutants_cDNA_P Parameter: Timepoint (hr) Value: 6
  misc_feature: MA Experiment 20000117 PARAMETER Experiment Name: At_100uM_ABA_Mutants_cDNA_P Parameter: Tissue Value: Aerial
  misc_feature: MA Experiment 20000117 PARAMETER Experiment Name: At_100uM_ABA_Mutants_cDNA_P Parameter: Treatment Value: 100uM ABA vs. No Treatment
  misc_feature: MA Experiment ID: 20000144 Result: Up-regulated in Transcription
  misc_feature: MA Experiment 20000144 PARAMETER Experiment Name: At_42deg_Heat_cDNA_P Parameter: Temperature (deg C) Value: 42 vs. 22
  misc_feature: MA Experiment 20000144 PARAMETER Experiment Name: At_42deg_Heat_cDNA_P Parameter: Timepoint (hr) Value: 1
  misc_feature: MA Experiment 20000144 PARAMETER Experiment Name: At_42deg_Heat_cDNA_P Parameter: Tissue Value: Aerial
  misc_feature: MA Experiment ID: 20000173 Result: Up-regulated in Transcription
  misc_feature: MA Experiment 20000173 PARAMETER Experiment Name: At_42deg_Heat_P Parameter: Age (day) Value: 14
  misc_feature: MA Experiment 20000173 PARAMETER Experiment Name: At_42deg_Heat_P Parameter: Organism Value: A. thaliana
  misc_feature: MA Experiment 20000173 PARAMETER Experiment Name: At_42deg_Heat_P Parameter: Plant Line Value: WS
  misc_feature: MA Experiment 20000173 PARAMETER Experiment Name: At_42deg_Heat_P Parameter: Temperature (deg C) Value: 42 vs. 22
  misc_feature: MA Experiment 20000173 PARAMETER Experiment Name: At_42deg_Heat_P Parameter: Timepoint (hr) Value: 6
  misc_feature: MA Experiment 20000173 PARAMETER Experiment Name: At_42deg_Heat_P Parameter: Tissue Value: Aerial
  misc_feature: MA Experiment ID: 20000180 Result: Up-regulated in Transcription
  misc_feature: MA Experiment 20000180 PARAMETER Experiment Name: At_Germinating_Seeds_P Parameter: Age (hr) Value: 24 vs. 0
  misc_feature: MA Experiment 20000180 PARAMETER Experiment Name: At_Germinating_Seeds_P Parameter: Tissue Value: Germinating Seeds
  misc_feature: MA Experiment ID: 20000182 Result: Up-regulated in Transcription
  misc_feature: MA Experiment 20000182 PARAMETER Experiment Name: At_2mM_SA_P Parameter: Age (day) Value: 14
  misc_feature: MA Experiment 20000182 PARAMETER Experiment Name: At_2mM_SA_P Parameter: Organism Value: A. thaliana
  misc_feature: MA Experiment 20000182 PARAMETER Experiment Name: At_2mM_SA_P Parameter: Plant Line Value: WS
  misc_feature: MA Experiment 20000182 PARAMETER Experiment Name: At_2mM_SA_P Parameter: Timepoint (hr) Value: 6
  misc_feature: MA Experiment 20000182 PARAMETER Experiment Name: At_2mM_SA_P Parameter: Tissue Value: Aerial
  misc_feature: MA Experiment 20000182 PARAMETER Experiment Name: At_2mM_SA_P Parameter: Treatment Value: 2mM SA vs. No Treatment
  misc_feature: MA Experiment ID: 20000234 Result: Down-regulated in Transcription
  misc_feature: MA Experiment 20000234 PARAMETER Experiment Name: At_Siliques_P Parameter: Age (day) Value: 21
  misc_feature: MA Experiment 20000234 PARAMETER Experiment Name: At_Siliques_P Parameter: Organism Value: A. thaliana
  misc_feature: MA Experiment 20000234 PARAMETER Experiment Name: At_Siliques_P Parameter: Plant Line Value: WS
  misc_feature: MA Experiment 20000234 PARAMETER Experiment Name: At_Siliques_P Parameter: Tissue Value: Less Than 5mm Siliques vs. Whole Plant
  misc_feature: MA Experiment ID: 20000235 Result: Down-regulated in Transcription
  misc_feature: MA Experiment 20000235 PARAMETER Experiment Name: At_Siliques_P Parameter: Age (day) Value: 21
  misc_feature: MA Experiment 20000235 PARAMETER Experiment Name: At_Siliques_P Parameter: Organism Value: A. thaliana
  misc_feature: MA Experiment 20000235 PARAMETER Experiment Name: At_Siliques_P Parameter: Plant Line Value: WS
  misc_feature: MA Experiment 20000235 PARAMETER Experiment Name: At_Siliques_P Parameter: Tissue Value: 5-10mm Siliques vs. Whole Plant
  misc_feature: MA Experiment ID: 20000264 Result: Down-regulated in Transcription
  misc_feature: MA Experiment 20000264 PARAMETER Experiment Name: At_Open_Flower_P Parameter: Age (day) Value: 21
  misc_feature: MA Experiment 20000264 PARAMETER Experiment Name: At_Open_Flower_P Parameter: Plant Line Value: WS
  misc_feature: MA Experiment 20000264 PARAMETER Experiment Name: At_Open_Flower_P Parameter: Tissue Value: Open Flower vs. Whole Plant
  misc_feature: MA Experiment ID: 20000265 Result: Down-regulated in Transcription
  misc_feature: MA Experiment 20000265 PARAMETER Experiment Name: At_Open_Flower_P Parameter: Age (day) Value: 21
  misc_feature: MA Experiment 20000265 PARAMETER Experiment Name: At_Open_Flower_P Parameter: Plant Line Value: WS
  misc_feature: MA Experiment 20000265 PARAMETER Experiment Name: At_Open_Flower_P Parameter: Tissue Value: Closed Flower vs. Whole Plant
  misc_feature: MA Experiment ID: 20000286 Result: Down-regulated in Transcription
  misc_feature: MA Experiment 20000286 PARAMETER Experiment Name: At_Open_Flower_P Parameter: Age (day) Value: 21
  misc_feature: MA Experiment 20000286 PARAMETER Experiment Name: At_Open_Flower_P Parameter: Plant Line Value: WS
  misc_feature: MA Experiment 20000286 PARAMETER Experiment Name: At_Open_Flower_P Parameter: Tissue Value: Half Open vs. Whole Plant
  misc_feature: MA Experiment ID: 20000438 Result: Down-regulated in Transcription
  misc_feature: MA Experiment 20000438 PARAMETER Experiment Name: At_Shoots__P Parameter: Age (day) Value: 14
  misc_feature: MA Experiment 20000438 PARAMETER Experiment Name: At_Shoots__P Parameter: Tissue Value: Shoots vs. Whole Plant
  misc_feature: MA Experiment ID: 20000441 Result: Up-regulated in Transcription
  misc_feature: MA Experiment 20000441 PARAMETER Experiment Name: At_1uM_BR-BRZ__P Parameter: Tissue Value: Shoot Apices
  misc_feature: MA Experiment 20000441 PARAMETER Experiment Name: At_1uM_BR-BRZ__P Parameter: Treatment Value: 1uM BR vs. No Treatment
  misc_feature: MA Experiment ID: 20000443 Result: Up-regulated in Transcription
  misc_feature: MA Experiment 20000443 PARAMETER Experiment Name: At_1uM_BR-BRZ__P Parameter: Tissue Value: Shoot Apices
  misc_feature: MA Experiment 20000443 PARAMETER Experiment Name: At_1uM_BR-BRZ__P Parameter: Treatment Value: 1uM BRZ vs. No Treatment
  misc_feature: MA Experiment ID: 20000574 Result: Down-regulated in Transcription
  misc_feature: MA Experiment 20000574 PARAMETER Experiment Name: At_100uM_ABA_Mutants__P Parameter: Organism Value: A. thaliana
  misc_feature: MA Experiment 20000574 PARAMETER Experiment Name: At_100uM_ABA_Mutants__P Parameter: Plant Line Value: CS23 vs. Ler wt
  misc_feature: MA Experiment 20000574 PARAMETER Experiment Name: At_100uM_ABA_Mutants__P Parameter: Timepoint (hr) Value: N/A
  misc_feature: MA Experiment 20000574 PARAMETER Experiment Name: At_100uM_ABA_Mutants__P Parameter: Tissue Value: Whole Plant
  misc_feature: MA Experiment 20000574 PARAMETER Experiment Name: At_100uM_ABA_Mutants__P Parameter: Treatment Value: None
  misc_feature: MA Experiment ID: 20000709 Result: Up-regulated in Transcription
  misc_feature: MA Experiment 20000709 PARAMETER Experiment Name: At_15mM_NH4NO3_L-to-H_P Parameter: Age (hr) Value: 14
  misc_feature: MA Experiment 20000709 PARAMETER Experiment Name: At_15mM_NH4NO3_L-to-H_P Parameter: Organism Value: A. thaliana
  misc_feature: MA Experiment 20000709 PARAMETER Experiment Name: At_15mM_NH4NO3_L-to-H_P Parameter: Plant Line Value: WS
  misc_feature: MA Experiment 20000709 PARAMETER Experiment Name: At_15mM_NH4NO3_L-to-H_P Parameter: Timepoint (hr) Value: 4
  misc_feature: MA Experiment 20000709 PARAMETER Experiment Name: At_15mM_NH4NO3_L-to-H_P Parameter: Tissue Value: Aerial
  misc_feature: MA Experiment 20000709 PARAMETER Experiment Name: At_15mM_NH4NO3_L-to-H_P Parameter: Treatment Value: 15mM NH4NO3 vs. 30mM Mannitol
  misc_feature: MA Experiment ID: 20001450 Result: Up-regulated in Transcription
  misc_feature: MA Experiment 20001450 PARAMETER Experiment Name: At_Far-red-induction_P Parameter: Age (day) Value: 7
  misc_feature: MA Experiment 20001450 PARAMETER Experiment Name: At_Far-red-induction_P Parameter: Light Value: Far-red vs. White
  misc_feature: MA Experiment 20001450 PARAMETER Experiment Name: At_Far-red-induction_P Parameter: Organism Value: A. thaliana
  misc_feature: MA Experiment 20001450 PARAMETER Experiment Name: At_Far-red-induction_P Parameter: Plant Line Value: Columbia
  misc_feature: MA Experiment 20001450 PARAMETER Experiment Name: At_Far-red-induction_P Parameter: Timepoint (hr) Value: 8
  misc_feature: MA Experiment 20001450 PARAMETER Experiment Name: At_Far-red-induction_P Parameter: Tissue Value: Whole Plant
  misc_feature: MA Experiment ID: 20001451 Result: Up-regulated in Transcription
  misc_feature: MA Experiment 20001451 PARAMETER Experiment Name: At_Far-red-induction_P Parameter: Age (day) Value: 7
  misc_feature: MA Experiment 20001451 PARAMETER Experiment Name: At_Far-red-induction_P Parameter: Light Value: Far-red vs. White
  misc_feature: MA Experiment 20001451 PARAMETER Experiment Name: At_Far-red-induction_P Parameter: Organism Value: A. thaliana
  misc_feature: MA Experiment 20001451 PARAMETER Experiment Name: At_Far-red-induction_P Parameter: Plant Line Value: Columbia
  misc_feature: MA Experiment 20001451 PARAMETER Experiment Name: At_Far-red-induction_P Parameter: Timepoint (hr) Value: 24
  misc_feature: MA Experiment 20001451 PARAMETER Experiment Name: At_Far-red-induction_P Parameter: Tissue Value: Whole Plant
  misc_feature: MA Experiment ID: 20001904 Result: Up-regulated in Transcription
  misc_feature: MA Experiment 20001904 PARAMETER Experiment Name: At_Drought_Reproduction_P Parameter: Age (day) Value: 37
  misc_feature: MA Experiment 20001904 PARAMETER Experiment Name: At_Drought_Reproduction_P Parameter: Organism Value: A. thaliana
  misc_feature: MA Experiment 20001904 PARAMETER Experiment Name: At_Drought_Reproduction_P Parameter: Plant Line Value: WS
  misc_feature: MA Experiment 20001904 PARAMETER Experiment Name: At_Drought_Reproduction_P Parameter: Timepoint (day) Value: 7
  misc_feature: MA Experiment 20001904 PARAMETER Experiment Name: At_Drought_Reproduction_P Parameter: Tissue Value: Rosettes
  misc_feature: MA Experiment 20001904 PARAMETER Experiment Name: At_Drought_Reproduction_P Parameter: Treatment Value: Drought vs. No Drought
  misc_feature: MA Experiment ID: 20001911 Result: Up-regulated in Transcription
  misc_feature: MA Experiment 20001911 PARAMETER Experiment Name: At_Drought_Reproduction_P Parameter: Age (day) Value: 40
  misc_feature: MA Experiment 20001911 PARAMETER Experiment Name: At_Drought_Reproduction_P Parameter: Organism Value: A. thaliana
  misc_feature: MA Experiment 20001911 PARAMETER Experiment Name: At_Drought_Reproduction_P Parameter: Plant Line Value: WS
  misc_feature: MA Experiment 20001911 PARAMETER Experiment Name: At_Drought_Reproduction_P Parameter: Timepoint (day) Value: 10
  misc_feature: MA Experiment 20001911 PARAMETER Experiment Name: At_Drought_Reproduction_P Parameter: Tissue Value: Flowers
  misc_feature: MA Experiment 20001911 PARAMETER Experiment Name: At_Drought_Reproduction_P Parameter: Treatment Value: Drought vs. No Drought
ctctcttctttttttctctctttctcataacaacaaaaaaacaaaaaaaaaacctaattagttttttctttctgcagagattatggaggtaccggtgattaatagaataagagatttcgaagttggtataaactcgattaatgatccttcgtttctttctcgatctgttgctgtttccggaatcggaaagctacaccaagcttatggtttttggaaatggggagctttgattatcgcatttctagcttatttcaccaactttgttagtaaactcaacagtctagttgttaggttaagaaaaatagatgtctctgtttcctctccaactctttttgatgattacgatagcgattccgatgtttcttgttcctctaccgtctcctctgacgatgaaaaagacgaagaagatgaggctgatgatgaagatgaggatgttgactcgatctttaatcgaagacgagtcaacggaggtttccgcgttagaggatctgattattacgatgatgatgatgatcagggagacaatggtaattgcacatggatggggaggcgatatagtggtagttttggagatttgttctcatggcctgatcttggtgggattggttcgagtggagtcgtgaagctttgggatcatttagatatcgatggcgatgatcatgagaatgttgtggcaacgtttctcaagaactataactcaacctcgtcaccgtttttttgggcggcggagaaaaaaggtgttgacgccgttaaagtgaaggcgtgtgatccacgcgccggttttcggatgccggctttgctcgcggagtggaggcagccggggcggttgttagggaatataatcggagttgataccggtggtgtggagaaagtatacgtcagggatgatgttagcggagagatagccgtgggagatttgaggaagtttaacggtgtgttgacggacttgacggaatgtgaggctgagacttggtgggacgctgacgtccttatctcgggctgatggaatccttgacgagagaaaatattggttgggacggttttgtcttaaagttaagaggacggacgaaagattcaacgccaaaaagaagtgttaaagattaatgagaacgacgcaacgttttgtaaataatttgtctgtttgcttctctgcgatttttattttaaaattttagttttgattgaataaaaatcagcgtcagattaataaaagtgtttgtgtgtttggtcggttac

SEQ ID NO: 22671 - protein, 306 aa, Arabidopsis thaliana
  peptide (1)..(306): Ceres Seq. ID no. 12334590
  misc_feature (1)..(175): Homolog of NCBI NO: 18395663 NR Description: expressed protein
  misc_feature (46)..(295): Homolog of NCBI NO: 18395663 NR Description: expressed protein
  misc_feature (203)..(306): Homolog of NCBI NO: 12324878 NR Description: unknown protein, 5' partial; 67-381 [Arabidopsis
  misc_feature (1)..(306): Homolog of NCBI NO: 18409031 NR Description: expressed protein
MEVPVINRIRDFEVGINSINDPSFLSRSVAVSGIGKLHQAYGFWKWGALIIAFLAYFTNFVSKLNSLVVRLRKIDVSVSSPTLFDDYDSDSDVSCSSTVSSDDEKDEEDEADDEDEDVDSIFNRRRVNGGFRVRGSDYYDDDDDQGDNGNCTWMGRRYSGSFGDLFSWPDLGGIGSSGVVKLWDHLDIDGDDHENVVATFLKNYNSTSSPFFWAAEKKGVDAVKVKACDPRAGFRMPALLAEWRQPGRLLGNIIGVDTGGVEKVYVRDDVSGEIAVGDLRKFNGVLTDLTECEAETWWDADVLISG

SEQ ID NO: 22672 - protein, 153 aa, Arabidopsis thaliana
  peptide (1)..(153): Ceres Seq. ID no. 12334591
  misc_feature (1)..(22): Homolog of NCBI NO: 18395663 NR Description: expressed protein
  misc_feature (1)..(142): Homolog of NCBI NO: 18395663 NR Description: expressed protein
  misc_feature (50)..(153): Homolog of NCBI NO: 12324878 NR Description: unknown protein, 5' partial; 67-381 [Arabidopsis
  misc_feature (1)..(153): Homolog of NCBI NO: 18409031 NR Description: expressed protein
MGRRYSGSFGDLFSWPDLGGIGSSGVVKLWDHLDIDGDDHENVVATFLKNYNSTSSPFFWAAEKKGVDAVKVKACDPRAGFRMPALLAEWRQPGRLLGNIIGVDTGGVEKVYVRDDVSGEIAVGDLRKFNGVLTDLTECEAETWWDADVLISG

SEQ ID NO: 22673 - DNA, 1192 bp, Arabidopsis thaliana
  misc_feature (1)..(1192): Ceres Seq. ID no. 13497443
  misc_feature: MA Experiment ID: 108488 Result: Down-regulated in Transcription
  misc_feature: MA Experiment ID: 20001906 Result: Down-regulated in Transcription
  misc_feature: MA Experiment 20001906 PARAMETER Experiment Name: At_Drought_Reproduction_P Parameter: Age (day) Value: 35
  misc_feature: MA Experiment 20001906 PARAMETER Experiment Name: At_Drought_Reproduction_P Parameter: Organism Value: A. thaliana
  misc_feature: MA Experiment 20001906 PARAMETER Experiment Name: At_Drought_Reproduction_P Parameter: Plant Line Value: WS
  misc_feature: MA Experiment 20001906 PARAMETER Experiment Name: At_Drought_Reproduction_P Parameter: Timepoint (day) Value: 5
  misc_feature: MA Experiment 20001906 PARAMETER Experiment Name: At_Drought_Reproduction_P Parameter: Tissue Value: Siliques
  misc_feature: MA Experiment 20001906 PARAMETER Experiment Name: At_Drought_Reproduction_P Parameter: Treatment Value: Drought vs. No Drought
  misc_feature: MA Experiment ID: 20001908 Result: Down-regulated in Transcription
  misc_feature: MA Experiment 20001908 PARAMETER Experiment Name: At_Drought_Reproduction_P Parameter: Age (day) Value: 40
  misc_feature: MA Experiment 20001908 PARAMETER Experiment Name: At_Drought_Reproduction_P Parameter: Organism Value: A. thaliana
  misc_feature: MA Experiment 20001908 PARAMETER Experiment Name: At_Drought_Reproduction_P Parameter: Plant Line Value: WS
  misc_feature: MA Experiment 20001908 PARAMETER Experiment Name: At_Drought_Reproduction_P Parameter: Timepoint (day) Value: 10
  misc_feature: MA Experiment 20001908 PARAMETER Experiment Name: At_Drought_Reproduction_P Parameter: Tissue Value: Siliques
  misc_feature: MA Experiment 20001908 PARAMETER Experiment Name: At_Drought_Reproduction_P Parameter: Treatment Value: Drought vs. No Drought
  misc_feature: MA Experiment ID: 20001911 Result: Down-regulated in Transcription
  misc_feature: MA Experiment 20001911 PARAMETER Experiment Name: At_Drought_Reproduction_P Parameter: Age (day) Value: 40
  misc_feature: MA Experiment 20001911 PARAMETER Experiment Name: At_Drought_Reproduction_P Parameter: Organism Value: A. thaliana
  misc_feature: MA Experiment 20001911 PARAMETER Experiment Name: At_Drought_Reproduction_P Parameter: Plant Line Value: WS
  misc_feature: MA Experiment 20001911 PARAMETER Experiment Name: At_Drought_Reproduction_P Parameter: Timepoint (day) Value: 10
  misc_feature: MA Experiment 20001911 PARAMETER Experiment Name: At_Drought_Reproduction_P Parameter: Tissue Value: Flowers
  misc_feature: MA Experiment 20001911 PARAMETER Experiment Name: At_Drought_Reproduction_P Parameter: Treatment Value: Drought vs. No Drought
  misc_feature: Phenotype: WHOLE PLANT Color-Yellow-Green Viable 1
  misc_feature: Phenotype: WHOLE PLANT Size-Small
  misc_feature: Phenotype: ROSETTE LEAVES Shape-Serrate
  misc_feature: Phenotype: ROSETTE LEAVES Other
  misc_feature: Phenotype: WHOLE PLANT Color-Yellow-Green Viable 1
  misc_feature: Phenotype: WHOLE PLANT Color-Dark Green
  misc_feature: Phenotype: INFLORESCENCE Flowering Time-Late Flowering
atttcacatctctctctctctataagaaccctagaagaaggtttctcttgtcctccatacacttagcacaactgataaatcttttgaggtaaaatcagctttagatcaaggtttttctagtcatctctactcataaagatcaaagcttttgctattctcattttctaccaagagacaatatcatgatgatgggtaaagaggatttgggtttaagtcttagcttgggatttgcacaaaaccatcctctccagctaaatcttaaacccacttcttcaccaatgtccaatctccagatgtttccatggaaccaaacccttgtttcttcctcagatcaacaaaagcaacagtttcttaggaaaatcgacgtgaacagcttgccaacaacggtggatttggaagaggagacaggagtttcgtctccaaacagtacgatctcgagcacagtgagtggaaagaggaggagtactgaaagagaaggtacctccggtggtggttgcggagatgaccttgacatcactctagatagatcttcctcacgtggaacctccgatgaagaggaagattacggaggtgagacttgtaggaagaagcttagactatccaaagatcaatccgcagttctcgaagacactttcaaagagcacaatactctcaatcccaaacagaagctggctttggctaagaagctaggtttaacagcaagacaagtggaagtgtggttccaaaacagaagagcaaggacaaagttaaagcagaccgaagtggattgcgagtatttgaaaagatgtgttgagaaattaacggaagagaatcggcggctcgagaaagaggcagcggaactaagagcattaaagctttcaccgcggttgtatggtcagatgagtccaccgaccacacttttgatgtgtccatcgtgtgaacgtgtggccggaccatcctcatctaaccacaaccagcgatctgtctcattgagtccatggctccaaatggcccatgggtcaacctttgatgtgatgcgtcctaggtcttaactttaatgctgcttctatgggttgtgtgtgggtcattgtactttttagattattgactctcagctaatgtatccttaaaagcctttttctacttttaaatttactttaatctaattaaattagttgtccatgtcttcttgataacaaaaaaatttataatt

SEQ ID NO: 22674 - protein, 282 aa, Arabidopsis thaliana
  peptide (1)..(282): Ceres Seq. ID no. 13497444
  misc_feature (1)..(98): Pfam Name: HD-ZIP protein N terminus Pfam Description: HD-ZIP protein N terminus
  misc_feature (1)..(255): Homolog of NCBI NO: 25487873 NR Description: homeobox-leucine zipper protein
  misc_feature (81)..(282): Homolog of NCBI NO: 25386204 NR Description: homeobox protein HAT2
  misc_feature (1)..(282): Homolog of NCBI NO: 15238078 NR Description: homeobox-leucine zipper protein HAT2 (HD-ZIP
  misc_feature (1)..(282): Homolog of NCBI NO: 21592922 NR Description: homeobox-leucine zipper protein HAT1 (hd-zip
  misc_feature (1)..(282): Homolog of NCBI NO: 15236076 NR Description: homeobox-leucine zipper protein HAT1 (HD-Zip
MMMGKEDLGLSLSLGFAQNHPLQLNLKPTSSPMSNLQMFPWNQTLVSSSDQQKQQFLRKIDVNSLPTTVDLEEETGVSSPNSTISSTVSGKRRSTEREGTSGGGCGDDLDITLDRSSSRGTSDEEEDYGGETCRKKLRLSKDQSAVLEDTFKEHNTLNPKQKLALAKKLGLTARQVEVWFQNRRARTKLKQTEVDCEYLKRCVEKLTEENRRLEKEAAELRALKLSPRLYGQMSPPTTLLMCPSCERVAGPSSSNHNQRSVSLSPWLQMAHGSTFDVMRPRS

SEQ ID NO: 22675 - protein, 281 aa, Arabidopsis thaliana
  peptide (1)..(281): Ceres Seq. ID no. 13497445
  misc_feature (1)..(97): Pfam Name: HD-ZIP protein N terminus Pfam Description: HD-ZIP protein N terminus
  misc_feature (1)..(281): Homolog of NCBI NO: 21592922 NR Description: homeobox-leucine zipper protein HAT1 (hd-zip
  misc_feature (1)..(254): Homolog of NCBI NO: 25487873 NR Description: homeobox-leucine zipper protein
  misc_feature (1)..(281): Homolog of NCBI NO: 15238078 NR Description: homeobox-leucine zipper protein HAT2 (HD-ZIP
  misc_feature (80)..(281): Homolog of NCBI NO: 25386204 NR Description: homeobox protein HAT2
  misc_feature (1)..(281): Homolog of NCBI NO: 15236076 NR Description: homeobox-leucine zipper protein HAT1 (HD-Zip
MMGKEDLGLSLSLGFAQNHPLQLNLKPTSSPMSNLQMFPWNQTLVSSSDQQKQQFLRKIDVNSLPTTVDLEEETGVSSPNSTISSTVSGKRRSTEREGTSGGGCGDDLDITLDRSSSRGTSDEEEDYGGETCRKKLRLSKDQSAVLEDTFKEHNTLNPKQKLALAKKLGLTARQVEVWFQNRRARTKLKQTEVDCEYLKRCVEKLTEENRRLEKEAAELRALKLSPRLYGQMSPPTTLLMCPSCERVAGPSSSNHNQRSVSLSPWLQMAHGSTFDVMRPRS

SEQ ID NO: 22676 - protein, 280 aa, Arabidopsis thaliana
  peptide (1)..(280): Ceres Seq. ID no. 13497446
  misc_feature (1)..(96): Pfam Name: HD-ZIP protein N terminus Pfam Description: HD-ZIP protein N terminus
  misc_feature (1)..(253): Homolog of NCBI NO: 25487873 NR Description: homeobox-leucine zipper protein
  misc_feature (79)..(280): Homolog of NCBI NO: 25386204 NR Description: homeobox protein HAT2
  misc_feature (1)..(280): Homolog of NCBI NO: 15238078 NR Description: homeobox-leucine zipper protein HAT2 (HD-ZIP
  misc_feature (1)..(280): Homolog of NCBI NO: 21592922 NR Description: homeobox-leucine zipper protein HAT1 (hd-zip
  misc_feature (1)..(280): Homolog of NCBI NO: 15236076 NR Description: homeobox-leucine zipper protein HAT1 (HD-Zip
MGKEDLGLSLSLGFAQNHPLQLNLKPTSSPMSNLQMFPWNQTLVSSSDQQKQQFLRKIDVNSLPTTVDLEEETGVSSPNSTISSTVSGKRRSTEREGTSGGGCGDDLDITLDRSSSRGTSDEEEDYGGETCRKKLRLSKDQSAVLEDTFKEHNTLNPKQKLALAKKLGLTARQVEVWFQNRRARTKLKQTEVDCEYLKRCVEKLTEENRRLEKEAAELRALKLSPRLYGQMSPPTTLLMCPSCERVAGPSSSNHNQRSVSLSPWLQMAHGSTFDVMRPRS

SEQ ID NO: 22677 - DNA, 1044 bp, Arabidopsis thaliana
  misc_feature (1)..(1044): Ceres Seq. ID no. 12338802
  misc_feature: MA Experiment ID: 108461 Result: Up-regulated in Transcription
  misc_feature: MA Experiment 108461 PARAMETER Experiment Name: At_Germinating_Seeds_cDNA_P Parameter: Age (day) Value: 1 vs. 0
  misc_feature: MA Experiment 108461 PARAMETER Experiment Name: At_Germinating_Seeds_cDNA_P Parameter: Tissue Value: Germinating Seeds
  misc_feature: MA Experiment ID: 108462 Result: Up-regulated in Transcription
  misc_feature: MA Experiment 108462 PARAMETER Experiment Name: At_Germinating_Seeds_cDNA_P Parameter: Age (day) Value: 2 vs. 0
  misc_feature: MA Experiment 108462 PARAMETER Experiment Name: At_Germinating_Seeds_cDNA_P Parameter: Tissue Value: Germinating Seeds
  misc_feature: MA Experiment ID: 108463 Result: Up-regulated in Transcription
  misc_feature: MA Experiment 108463 PARAMETER Experiment Name: At_Germinating_Seeds_cDNA_P Parameter: Age (day) Value: 3 vs. 0
  misc_feature: MA Experiment 108463 PARAMETER Experiment Name: At_Germinating_Seeds_cDNA_P Parameter: Tissue Value: Germinating Seeds
  misc_feature: MA Experiment ID: 108464 Result: Up-regulated in Transcription
  misc_feature: MA Experiment 108464 PARAMETER Experiment Name: At_Germinating_Seeds_cDNA_P Parameter: Age (day) Value: 4 vs. 0
  misc_feature: MA Experiment 108464 PARAMETER Experiment Name: At_Germinating_Seeds_cDNA_P Parameter: Tissue Value: Germinating Seeds
  misc_feature: MA Experiment ID: 108573 Result: Down-regulated in Transcription
  misc_feature: MA Experiment 108573 PARAMETER Experiment Name: At_Drought_cDNA_P Parameter: Timepoint (hr) Value: 6
  misc_feature: MA Experiment 108573 PARAMETER Experiment Name: At_Drought_cDNA_P Parameter: Tissue Value: Aerial
  misc_feature: MA Experiment 108573 PARAMETER Experiment Name: At_Drought_cDNA_P Parameter: Treatment Value: Drought vs. No Drought
  misc_feature: MA Experiment ID: 108595 Result: Down-regulated in Transcription
  misc_feature: MA Experiment 108595 PARAMETER Experiment Name: At_Ler-pi_Ovule_cDNA_P Parameter: Plant Line Value: null
  misc_feature: MA Experiment ID: 20000113 Result: Down-regulated in Transcription
  misc_feature: MA Experiment 20000113 PARAMETER Experiment Name: At_42deg_Heat_cDNA_P Parameter: Temperature (deg C) Value: 42 vs. 22
  misc_feature: MA Experiment 20000113 PARAMETER Experiment Name: At_42deg_Heat_cDNA_P Parameter: Timepoint (hr) Value: 8
  misc_feature: MA Experiment 20000113 PARAMETER Experiment Name: At_42deg_Heat_cDNA_P Parameter: Tissue Value: Aerial
  misc_feature: MA Experiment ID: 20000224 Result: Down-regulated in Transcription
aatataataatataaccattactgaaacaaagaaaagacggataagactctttttgtgaccagccaatgttaaagaaaaacaatgtgtttgaatctttttgatctttttctttgacactatattttgtaaattgaattggtaattattagtttgtgtttctttgatttataacaagagaaattatcttctttttttctttgacaccagatcttgatttcactttcttggagatgaatcctttcacattggttgatggaaagccttatcctctggatatgaggggtgagcttgatgacaccgctgctttcaaaaactttaagaagtggggcgacattgaatttcccatgccatttggaagagtgatgagttcaacagagagcttcatccacggtctagatgagaagacaagtgcctctttgaagttcactgttctgaatcccaagggaagaatttggactatggtagctggaggaggtgcaagtgtcatctatgctgataccgttggagatctcgggtatgcatctgagcttggcaattatgctgaatacagtggagcacccaaagaagacgaggttttgcagtatgccagagttgtcattgattgtgctacagcgaatccggatggaaaaagcagggctctggtaattggaggtggaattgctaacttcaccgatgttgctgctaccttcaatggcataatccgagctctcaaggaaaaagaagcaaagctgaaagcagcaaggatgcatatatttgtgaggagaggaggaccaaactaccaaaagggacttgctaaaatgagatcacttggagatgaaatcggtgtccccatcgaggtgtatggtcctgaagcaacaatgacaggtatctgcaaggaggcaatccagtacatcaccgcggctgcataagcctttacaatcttatcatttactttcataatactctttagcgtttcttgagtttgagacttgtgtttagattatgtttcacttctaatgtattttactattcataaataaagaacaagtatcttcttttttctt

SEQ ID NO: 22678 - protein, 225 aa, Arabidopsis thaliana; identical to SEQ ID NO: 22087
  peptide (1)..(225): Ceres Seq. ID no. 12338803
  misc_feature (1)..(218): Homolog of NCBI NO: 28372804 NR Description: LD21334p [Drosophila melanogaster]
  misc_feature (1)..(218): Homolog of NCBI NO: 24653988 NR Description: ATP citrate lyase CG8322-PA
  misc_feature (1)..(218): Homolog of NCBI NO: 31235932 NR Description: ENSANGP00000012364 [Anopheles gambiae]
  misc_feature (1)..(218): Homolog of NCBI NO: 9229902 NR Description: ATP citrate-lyase [Ciona intestinalis]
  misc_feature (1)..(221): Homolog of NCBI NO: 15217510 NR Description: unknown protein; protein id: At1g09430.1
  misc_feature (1)..(225): Homolog of NCBI NO: 15919089 NR Description: ATP citrate lyase b-subunit [Lupinus albus]
  misc_feature (1)..(225): Homolog of NCBI NO: 21593129 NR Description: ATP citrate-lyase, putative [Arabidopsis thaliana]
  misc_feature (1)..(225): Homolog of NCBI NO: 15220186 NR Description: ATP citrate-lyase, putative
  misc_feature (1)..(225): Homolog of NCBI NO: 19698853 NR Description: similar to ATP-citrate-lyase [Arabidopsis
  misc_feature (1)..(225): Homolog of NCBI NO: 15219818 NR Description: ATP citrate-lyase, putative

SEQ ID NO: 22679 - protein, 210 aa, Arabidopsis thaliana; identical to SEQ ID NO: 22088
  peptide (1)..(210): Ceres Seq. ID no. 12338805
  misc_feature (1)..(203): Homolog of NCBI NO: 28372804 NR Description: LD21334p [Drosophila melanogaster]
  misc_feature (1)..(203): Homolog of NCBI NO: 24653988 NR Description: ATP citrate lyase CG8322-PA
  misc_feature (1)..(203): Homolog of NCBI NO: 31235932 NR Description: ENSANGP00000012364 [Anopheles gambiae]
  misc_feature (1)..(203): Homolog of NCBI NO: 9229902 NR Description: ATP citrate-lyase [Ciona intestinalis]
  misc_feature (1)..(206): Homolog of NCBI NO: 15217510 NR Description: unknown protein; protein id: At1g09430.1
  misc_feature (1)..(210): Homolog of NCBI NO: 15919089 NR Description: ATP citrate lyase b-subunit [Lupinus albus]
  misc_feature (1)..(210): Homolog of NCBI NO: 21593129 NR Description: ATP citrate-lyase, putative [Arabidopsis thaliana]
  misc_feature (1)..(210): Homolog of NCBI NO: 15220186 NR Description: ATP citrate-lyase, putative
  misc_feature (1)..(210): Homolog of NCBI NO: 19698853 NR Description: similar to ATP-citrate-lyase [Arabidopsis
  misc_feature (1)..(210): Homolog of NCBI NO: 15219818 NR Description: ATP citrate-lyase, putative

SEQ ID NO: 22680 - protein, 187 aa, Arabidopsis thaliana; identical to SEQ ID NO: 22089
  peptide (1)..(187): Ceres Seq. ID no. 12338806
  misc_feature (1)..(180): Homolog of NCBI NO: 28372804 NR Description: LD21334p [Drosophila melanogaster]
  misc_feature (1)..(180): Homolog of NCBI NO: 24653988 NR Description: ATP citrate lyase CG8322-PA
  misc_feature (1)..(180): Homolog of NCBI NO: 31235932 NR Description: ENSANGP00000012364 [Anopheles gambiae]
  misc_feature (1)..(180): Homolog of NCBI NO: 9229902 NR Description: ATP citrate-lyase [Ciona intestinalis]
  misc_feature (1)..(183): Homolog of NCBI NO: 15217510 NR Description: unknown protein; protein id: At1g09430.1
  misc_feature (1)..(187): Homolog of NCBI NO: 15919089 NR Description: ATP citrate lyase b-subunit [Lupinus albus]
  misc_feature (1)..(187): Homolog of NCBI NO: 21593129 NR Description: ATP citrate-lyase, putative [Arabidopsis thaliana]
  misc_feature (1)..(187): Homolog of NCBI NO: 15220186 NR Description: ATP citrate-lyase, putative
  misc_feature (1)..(187): Homolog of NCBI NO: 19698853 NR Description: similar to ATP-citrate-lyase [Arabidopsis
  misc_feature (1)..(187): Homolog of NCBI NO: 15219818 NR Description: ATP citrate-lyase, putative

SEQ ID NO: 22681 - DNA, 1376 bp, Arabidopsis thaliana
  misc_feature (1)..(1376): Ceres Seq. ID no. 12334629
  misc_feature: MA Experiment ID: 108434 Result: Down-regulated in Transcription
  misc_feature: MA Experiment 108434 PARAMETER Experiment Name: At_Root_Tips_cDNA_P Parameter: Tissue Value: Root Tips
  misc_feature: MA Experiment ID: 108461 Result: Up-regulated in Transcription
  misc_feature: MA Experiment 108461 PARAMETER Experiment Name: At_Germinating_Seeds_cDNA_P Parameter: Age (day) Value: 1 vs. 0
  misc_feature: MA Experiment 108461 PARAMETER Experiment Name: At_Germinating_Seeds_cDNA_P Parameter: Tissue Value: Germinating Seeds
  misc_feature: MA Experiment ID: 108463 Result: Up-regulated in Transcription
  misc_feature: MA Experiment 108463 PARAMETER Experiment Name: At_Germinating_Seeds_cDNA_P Parameter: Age (day) Value: 3 vs. 0
  misc_feature: MA Experiment 108463 PARAMETER Experiment Name: At_Germinating_Seeds_cDNA_P Parameter: Tissue Value: Germinating Seeds
  misc_feature: MA Experiment ID: 108464 Result: Up-regulated in Transcription
  misc_feature: MA Experiment 108464 PARAMETER Experiment Name: At_Germinating_Seeds_cDNA_P Parameter: Age (day) Value: 4 vs. 0
  misc_feature: MA Experiment 108464 PARAMETER Experiment Name: At_Germinating_Seeds_cDNA_P Parameter: Tissue Value: Germinating Seeds
  misc_feature: MA Experiment ID: 108488 Result: Down-regulated in Transcription
  misc_feature: MA Experiment ID: 108569 Result: Up-regulated in Transcription
  misc_feature: MA Experiment 108569 PARAMETER Experiment Name: At_0.001%_MeJA__cDNA_P Parameter: Timepoint (hr) Value: 6
  misc_feature: MA Experiment 108569 PARAMETER Experiment Name: At_0.001%_MeJA__cDNA_P Parameter: Tissue Value: Aerial
  misc_feature: MA Experiment 108569 PARAMETER Experiment Name: At_0.001%_MeJA__cDNA_P Parameter: Treatment Value: 0.001% MeJA vs. No Treatment
  misc_feature: MA Experiment ID: 108573 Result: Up-regulated in Transcription
  misc_feature: MA Experiment 108573 PARAMETER Experiment Name: At_Drought_cDNA_P Parameter: Timepoint (hr) Value: 6
  misc_feature: MA Experiment 108573 PARAMETER Experiment Name: At_Drought_cDNA_P Parameter: Tissue Value: Aerial
  misc_feature: MA Experiment 108573 PARAMETER Experiment Name: At_Drought_cDNA_P Parameter: Treatment Value: Drought vs. No Drought
  misc_feature: MA Experiment ID: 108579 Result: Down-regulated in Transcription
  misc_feature: MA Experiment 108579 PARAMETER Experiment Name: At_4deg_Cold_cDNA_P Parameter: Temperature (deg C) Value: 4 vs. 22
  misc_feature: MA Experiment 108579 PARAMETER Experiment Name: At_4deg_Cold_cDNA_P Parameter: Timepoint (hr) Value: 6
  misc_feature: MA Experiment 108579 PARAMETER Experiment Name: At_4deg_Cold_cDNA_P Parameter: Tissue Value: Aerial
  misc_feature: MA Experiment ID: 108585 Result: Up-regulated in Transcription
  misc_feature: MA Experiment 108585 PARAMETER Experiment Name: At_5mM_NaNP_cDNA_P Parameter: Timepoint (hr) Value: 6
  misc_feature: MA Experiment 108585 PARAMETER Experiment Name: At_5mM_NaNP_cDNA_P Parameter: Tissue Value: Aerial
  misc_feature: MA Experiment 108585 PARAMETER Experiment Name: At_5mM_NaNP_cDNA_P Parameter: Treatment Value: null
  misc_feature: MA Experiment ID: 108605 Result: Up-regulated in Transcription
  misc_feature: MA Experiment 108605 PARAMETER Experiment Name: At_100uM_ABA_cDNA_P Parameter: Timepoint (hr) Value: 6
  misc_feature: MA Experiment 108605 PARAMETER Experiment Name: At_100uM_ABA_cDNA_P Parameter: Tissue Value: Aerial
  misc_feature: MA Experiment 108605 PARAMETER Experiment Name: At_100uM_ABA_cDNA_P Parameter: Treatment Value: 100uM ABA vs. No Treatment
  misc_feature: MA Experiment ID: 108607 Result: Up-regulated in Transcription
  misc_feature: MA Experiment 108607 PARAMETER Experiment Name: At_100uM_ABA_cDNA_P Parameter: Timepoint (hr) Value: 4
  misc_feature: MA Experiment 108607 PARAMETER Experiment Name: At_100uM_ABA_cDNA_P Parameter: Tissue Value: Aerial
  misc_feature: MA Experiment 108607 PARAMETER Experiment Name: At_100uM_ABA_cDNA_P Parameter: Treatment Value: 100uM ABA vs. No Treatment
  misc_feature: MA Experiment ID: 108609 Result: Up-regulated in Transcription
  misc_feature: MA Experiment 108609 PARAMETER Experiment Name: At_100uM_ABA_cDNA_P Parameter: Timepoint (hr) Value: 24
  misc_feature: MA Experiment 108609 PARAMETER Experiment Name: At_100uM_ABA_cDNA_P Parameter: Tissue Value: Aerial
  misc_feature: MA Experiment 108609 PARAMETER Experiment Name: At_100uM_ABA_cDNA_P Parameter: Treatment Value: 100uM ABA vs. No Treatment
  misc_feature: MA Experiment ID: 108668 Result: Up-regulated in Transcription
  misc_feature: MA Experiment 108668 PARAMETER Experiment Name: At_2mM_SA_cDNA_P Parameter: Plant Line Value: WS
  misc_feature: MA Experiment 108668 PARAMETER Experiment Name: At_2mM_SA_cDNA_P Parameter: Timepoint (hr) Value: 6
  misc_feature: MA Experiment 108668 PARAMETER Experiment Name: At_2mM_SA_cDNA_P Parameter: Treatment Value: 2mM SA vs. No Treatment
  misc_feature: MA Experiment ID: 20000069 Result: Up-regulated in Transcription
  misc_feature: MA Experiment 20000069 PARAMETER Experiment Name: At_100uM_ABA_Mutants_cDNA_P Parameter: Plant Line Value: CS23
  misc_feature: MA Experiment 20000069 PARAMETER Experiment Name: At_100uM_ABA_Mutants_cDNA_P Parameter: Timepoint (hr) Value: 6
  misc_feature: MA Experiment 20000069 PARAMETER Experiment Name: At_100uM_ABA_Mutants_cDNA_P Parameter: Tissue Value: Aerial
  misc_feature: MA Experiment 20000069 PARAMETER Experiment Name: At_100uM_ABA_Mutants_cDNA_P Parameter: Treatment Value: 100uM ABA vs. No Treatment
  misc_feature: MA Experiment ID: 20000070 Result: Up-regulated in Transcription
  misc_feature: MA Experiment 20000070 PARAMETER Experiment Name: At_100uM_ABA_Mutants_cDNA_P Parameter: Plant Line Value: CS24
  misc_feature: MA Experiment 20000070 PARAMETER Experiment Name: At_100uM_ABA_Mutants_cDNA_P Parameter: Timepoint (hr) Value: 6
  misc_feature: MA Experiment 20000070 PARAMETER Experiment Name: At_100uM_ABA_Mutants_cDNA_P Parameter: Tissue Value: Aerial
  misc_feature: MA Experiment 20000070 PARAMETER Experiment Name: At_100uM_ABA_Mutants_cDNA_P Parameter: Treatment Value: 100uM ABA vs. No Treatment
  misc_feature: MA Experiment ID: 20000071 Result: Up-regulated in Transcription
  misc_feature: MA Experiment 20000071 PARAMETER Experiment Name: At_100uM_ABA_Mutants_cDNA_P Parameter: Plant Line Value: CS8104
  misc_feature: MA Experiment 20000071 PARAMETER Experiment Name: At_100uM_ABA_Mutants_cDNA_P Parameter: Timepoint (hr) Value: 6
  misc_feature: MA Experiment 20000071 PARAMETER Experiment Name: At_100uM_ABA_Mutants_cDNA_P Parameter: Tissue Value: Aerial
  misc_feature: MA Experiment 20000071 PARAMETER Experiment Name: At_100uM_ABA_Mutants_cDNA_P Parameter: Treatment Value: 100uM ABA vs. No Treatment
  misc_feature: MA Experiment ID: 20000072 Result: Up-regulated in Transcription
  misc_feature: MA Experiment 20000072 PARAMETER Experiment Name: At_100uM_ABA_Mutants_cDNA_P Parameter: Plant Line Value: CS8105
  misc_feature: MA Experiment 20000072 PARAMETER Experiment Name: At_100uM_ABA_Mutants_cDNA_P Parameter: Timepoint (hr) Value: 6
  misc_feature: MA Experiment 20000072 PARAMETER Experiment Name: At_100uM_ABA_Mutants_cDNA_P Parameter: Tissue Value: Aerial
  misc_feature: MA Experiment 20000072 PARAMETER Experiment Name: At_100uM_ABA_Mutants_cDNA_P Parameter: Treatment Value: 100uM ABA vs. No Treatment
  misc_feature: MA Experiment ID: 20000086 Result: Up-regulated in Transcription
  misc_feature: MA Experiment 20000086 PARAMETER Experiment Name: At_100uM_ABA_Mutants_cDNA_P Parameter: Plant Line Value: CS22
  misc_feature: MA Experiment 20000086 PARAMETER Experiment Name: At_100uM_ABA_Mutants_cDNA_P Parameter: Timepoint (hr) Value: 6
  misc_feature: MA Experiment 20000086 PARAMETER Experiment Name: At_100uM_ABA_Mutants_cDNA_P Parameter: Tissue Value: Aerial
  misc_feature: MA Experiment 20000086 PARAMETER Experiment Name: At_100uM_ABA_Mutants_cDNA_P Parameter: Treatment Value: 100uM ABA vs. No Treatment
  misc_feature: MA Experiment ID: 20000088 Result: Up-regulated in Transcription
  misc_feature: MA Experiment 20000088 PARAMETER Experiment Name: At_100uM_ABA_Mutants_cDNA_P Parameter: Plant Line Value: Landsberg
  misc_feature: MA Experiment 20000088 PARAMETER Experiment Name: At_100uM_ABA_Mutants_cDNA_P Parameter: Timepoint (hr) Value: 6
  misc_feature: MA Experiment 20000088 PARAMETER Experiment Name: At_100uM_ABA_Mutants_cDNA_P Parameter: Tissue Value: Aerial
  misc_feature: MA Experiment 20000088 PARAMETER Experiment Name: At_100uM_ABA_Mutants_cDNA_P Parameter: Treatment Value: 100uM ABA vs. No Treatment
  misc_feature: MA Experiment ID: 20000090 Result: Up-regulated in Transcription
  misc_feature: MA Experiment ID: 20000111 Result: Down-regulated in Transcription
  misc_feature: MA Experiment 20000111 PARAMETER Experiment Name: At_42deg_Heat_cDNA_P Parameter: Temperature (deg C) Value: 42 vs. 22
  misc_feature: MA Experiment 20000111 PARAMETER Experiment Name: At_42deg_Heat_cDNA_P Parameter: Timepoint (hr) Value: 6
  misc_feature: MA Experiment 20000111 PARAMETER Experiment Name: At_42deg_Heat_cDNA_P Parameter: Tissue Value: Aerial
  misc_feature: MA Experiment ID: 20000117 Result: Up-regulated in Transcription
  misc_feature: MA Experiment 20000117 PARAMETER Experiment Name: At_100uM_ABA_Mutants_cDNA_P Parameter: Plant Line Value: Columbia
  misc_feature: MA Experiment 20000117 PARAMETER Experiment Name: At_100uM_ABA_Mutants_cDNA_P Parameter: Timepoint (hr) Value: 6
  misc_feature: MA Experiment 20000117 PARAMETER Experiment Name: At_100uM_ABA_Mutants_cDNA_P Parameter: Tissue Value: Aerial
  misc_feature: MA Experiment 20000117 PARAMETER Experiment Name: At_100uM_ABA_Mutants_cDNA_P Parameter: Treatment Value: 100uM ABA vs. No Treatment
  misc_feature: MA Experiment ID: 20000169 Result: Up-regulated in Transcription
  misc_feature: MA Experiment 20000169 PARAMETER Experiment Name: At_100uM_ABA_P Parameter: Age (day) Value: 14
  misc_feature: MA Experiment 20000169 PARAMETER Experiment Name: At_100uM_ABA_P Parameter: Organism Value: A. thaliana
  misc_feature: MA Experiment 20000169 PARAMETER Experiment Name: At_100uM_ABA_P Parameter: Plant Line Value: WS
  misc_feature: MA Experiment 20000169 PARAMETER Experiment Name: At_100uM_ABA_P Parameter: Timepoint (hr) Value: 6
  misc_feature: MA Experiment 20000169 PARAMETER Experiment Name: At_100uM_ABA_P Parameter: Tissue Value: Aerial
  misc_feature: MA Experiment 20000169 PARAMETER Experiment Name: At_100uM_ABA_P Parameter: Treatment Value: 100uM ABA vs. No Treatment
  misc_feature: MA Experiment ID: 20000173 Result: Down-regulated in Transcription
  misc_feature: MA Experiment 20000173 PARAMETER Experiment Name: At_42deg_Heat_P Parameter: Age (day) Value: 14
  misc_feature: MA Experiment 20000173 PARAMETER Experiment Name: At_42deg_Heat_P Parameter: Organism Value: A. thaliana
  misc_feature: MA Experiment 20000173 PARAMETER Experiment Name: At_42deg_Heat_P Parameter: Plant Line Value: WS
  misc_feature: MA Experiment 20000173 PARAMETER Experiment Name: At_42deg_Heat_P Parameter: Temperature (deg C) Value: 42 vs. 22
  misc_feature: MA Experiment 20000173 PARAMETER Experiment Name: At_42deg_Heat_P Parameter: Timepoint (hr) Value: 6
  misc_feature: MA Experiment 20000173 PARAMETER Experiment Name: At_42deg_Heat_P Parameter: Tissue Value: Aerial
  misc_feature: MA Experiment ID: 20000182 Result: Up-regulated in Transcription
  misc_feature: MA Experiment 20000182 PARAMETER Experiment Name: At_2mM_SA_P Parameter: Age (day) Value: 14
  misc_feature: MA Experiment 20000182 PARAMETER Experiment Name: At_2mM_SA_P Parameter: Organism Value: A. thaliana
  misc_feature: MA Experiment 20000182 PARAMETER Experiment Name: At_2mM_SA_P Parameter: Plant Line Value: WS
  misc_feature: MA Experiment 20000182 PARAMETER Experiment Name: At_2mM_SA_P Parameter: Timepoint (hr) Value: 6
  misc_feature: MA Experiment 20000182 PARAMETER Experiment Name: At_2mM_SA_P Parameter: Tissue Value: Aerial
  misc_feature: MA Experiment 20000182 PARAMETER Experiment Name: At_2mM_SA_P Parameter: Treatment Value: 2mM SA vs. No Treatment
  misc_feature: MA Experiment ID: 20000184 Result: Down-regulated in Transcription
  misc_feature: MA Experiment 20000184 PARAMETER Experiment Name: At_Shoots__P Parameter: Age (day) Value: 7
  misc_feature: MA Experiment 20000184 PARAMETER Experiment Name: At_Shoots__P Parameter: Tissue Value: Shoots vs. Whole Plant
  misc_feature: MA Experiment ID: 20000185 Result: Down-regulated in Transcription
  misc_feature: MA Experiment 20000185 PARAMETER Experiment Name: At_Roots__P Parameter: Age (day) Value: 7 vs. 21
  misc_feature: MA Experiment 20000185 PARAMETER Experiment Name: At_Roots__P Parameter: Organism Value: A. thaliana
  misc_feature: MA Experiment 20000185 PARAMETER Experiment Name: At_Roots__P Parameter: Tissue Value: Roots vs. Whole Plant
  misc_feature: MA Experiment ID: 20000234 Result: Down-regulated in Transcription
  misc_feature: MA Experiment 20000234 PARAMETER Experiment Name: At_Siliques_P Parameter: Age (day) Value: 21
  misc_feature: MA Experiment 20000234 PARAMETER Experiment Name: At_Siliques_P Parameter: Organism Value: A. thaliana
  misc_feature: MA Experiment 20000234 PARAMETER Experiment Name: At_Siliques_P Parameter: Plant Line Value: WS
  misc_feature: MA Experiment 20000234 PARAMETER Experiment Name: At_Siliques_P Parameter: Tissue Value: Less Than 5mm Siliques vs. Whole Plant
  misc_feature: MA Experiment ID: 20000235 Result: Down-regulated in Transcription
  misc_feature: MA Experiment 20000235 PARAMETER Experiment Name: At_Siliques_P Parameter: Age (day) Value: 21
  misc_feature: MA Experiment 20000235 PARAMETER Experiment Name: At_Siliques_P Parameter: Organism Value: A. thaliana
  misc_feature: MA Experiment 20000235 PARAMETER Experiment Name: At_Siliques_P Parameter: Plant Line Value: WS
  misc_feature: MA Experiment 20000235 PARAMETER Experiment Name: At_Siliques_P Parameter: Tissue Value: 5-10mm Siliques vs. Whole Plant
  misc_feature: MA Experiment ID: 20000265 Result: Down-regulated in Transcription
  misc_feature: MA Experiment 20000265 PARAMETER Experiment Name: At_Open_Flower_P Parameter: Age (day) Value: 21
  misc_feature: MA Experiment 20000265 PARAMETER Experiment Name: At_Open_Flower_P Parameter: Plant Line Value: WS
  misc_feature: MA Experiment 20000265 PARAMETER Experiment Name: At_Open_Flower_P Parameter: Tissue Value: Closed Flower vs. Whole Plant
  misc_feature: MA Experiment ID: 20000286 Result: Down-regulated in Transcription
  misc_feature: MA Experiment 20000286 PARAMETER Experiment Name: At_Open_Flower_P Parameter: Age (day) Value: 21
  misc_feature: MA Experiment 20000286 PARAMETER Experiment Name: At_Open_Flower_P Parameter: Plant Line Value: WS
  misc_feature: MA Experiment 20000286 PARAMETER Experiment Name: At_Open_Flower_P Parameter: Tissue Value: Half Open vs. Whole Plant
  misc_feature: MA Experiment ID: 20000438 Result: Down-regulated in Transcription
  misc_feature: MA Experiment 20000438 PARAMETER Experiment Name: At_Shoots__P Parameter: Age (day) Value: 14
  misc_feature: MA Experiment 20000438 PARAMETER Experiment Name: At_Shoots__P Parameter: Tissue Value: Shoots vs. Whole Plant
  misc_feature: MA Experiment ID: 20000439 Result: Down-regulated in Transcription
  misc_feature: MA Experiment 20000439 PARAMETER Experiment Name: At_Roots__P Parameter: Age (day) Value: 14 vs. 21
  misc_feature: MA Experiment 20000439 PARAMETER Experiment Name: At_Roots__P Parameter: Organism Value: A. thaliana
  misc_feature: MA Experiment 20000439 PARAMETER Experiment Name: At_Roots__P Parameter: Tissue Value: Roots vs. Whole Plant
  misc_feature: MA Experiment ID: 20000445 Result: Up-regulated in Transcription
  misc_feature: MA Experiment 20000445 PARAMETER Experiment Name: At_100uM_NAA__P Parameter: Age (day) Value: 14
  misc_feature: MA Experiment 20000445 PARAMETER Experiment Name: At_100uM_NAA__P Parameter: Organism Value: A. thaliana
  misc_feature: MA Experiment 20000445 PARAMETER Experiment Name: At_100uM_NAA__P Parameter: Plant Line Value: WS
  misc_feature: MA Experiment 20000445 PARAMETER Experiment Name: At_100uM_NAA__P Parameter: Timepoint (hr) Value: 6
  misc_feature: MA Experiment 20000445 PARAMETER Experiment Name: At_100uM_NAA__P Parameter: Tissue Value: Aerial
  misc_feature: MA Experiment 20000445 PARAMETER Experiment Name: At_100uM_NAA__P Parameter: Treatment Value: 100uM NAA vs. No Treatment
  misc_feature: MA Experiment ID: 20000453 Result: Up-regulated in Transcription
  misc_feature: MA Experiment 20000453 PARAMETER Experiment Name: At_100uM_ABA_P Parameter: Age (day) Value: 15
  misc_feature: MA Experiment 20000453 PARAMETER Experiment Name: At_100uM_ABA_P Parameter: Organism Value: A. thaliana
  misc_feature: MA Experiment 20000453 PARAMETER Experiment Name: At_100uM_ABA_P Parameter: Plant Line Value: WS
  misc_feature: MA Experiment 20000453 PARAMETER Experiment Name: At_100uM_ABA_P Parameter: Timepoint (hr) Value: 24
  misc_feature: MA Experiment 20000453 PARAMETER Experiment Name: At_100uM_ABA_P Parameter: Tissue Value: Aerial
  misc_feature: MA Experiment 20000453 PARAMETER Experiment Name: At_100uM_ABA_P Parameter: Treatment Value: 100uM ABA vs. No Treatment
  misc_feature: MA Experiment ID: 20000527 Result: Down-regulated in Transcription
  misc_feature: MA Experiment 20000527 PARAMETER Experiment Name: At_10percent_PEG_P Parameter: Age (day) Value: 20
  misc_feature: MA Experiment 20000527 PARAMETER Experiment Name: At_10percent_PEG_P Parameter: Organism Value: A. thaliana
  misc_feature: MA Experiment 20000527 PARAMETER Experiment Name: At_10percent_PEG_P Parameter: Plant Line Value: WS
  misc_feature: MA Experiment 20000527 PARAMETER Experiment Name: At_10percent_PEG_P Parameter: Timepoint (day) Value: 20
  misc_feature: MA Experiment 20000527 PARAMETER Experiment Name: At_10percent_PEG_P Parameter: Tissue Value: Whole Plant
  misc_feature: MA Experiment 20000527 PARAMETER Experiment Name: At_10percent_PEG_P Parameter: Treatment Value: 10percent PEG vs. No Treatment
  misc_feature: MA Experiment ID: 20000709 Result: Down-regulated in Transcription
  misc_feature: MA Experiment 20000709 PARAMETER Experiment Name: At_15mM_NH4NO3_L-to-H_P Parameter: Age (hr) Value: 14
  misc_feature: MA Experiment 20000709 PARAMETER Experiment Name: At_15mM_NH4NO3_L-to-H_P Parameter: Organism Value: A. thaliana
  misc_feature: MA Experiment 20000709 PARAMETER Experiment Name: At_15mM_NH4NO3_L-to-H_P Parameter: Plant Line Value: WS
  misc_feature: MA Experiment 20000709 PARAMETER Experiment Name: At_15mM_NH4NO3_L-to-H_P Parameter: Timepoint (hr) Value: 4
  misc_feature: MA Experiment 20000709 PARAMETER Experiment Name: At_15mM_NH4NO3_L-to-H_P Parameter: Tissue Value: Aerial
  misc_feature: MA Experiment 20000709 PARAMETER Experiment Name: At_15mM_NH4NO3_L-to-H_P Parameter: Treatment Value: 15mM NH4NO3 vs. 30mM Mannitol
  misc_feature: MA Experiment ID: 20001450 Result: Up-regulated in Transcription
  misc_feature: MA Experiment 20001450 PARAMETER Experiment Name: At_Far-red-induction_P Parameter: Age (day) Value: 7
  misc_feature: MA Experiment 20001450 PARAMETER Experiment Name: At_Far-red-induction_P Parameter: Light Value: Far-red vs. White
  misc_feature: MA Experiment 20001450 PARAMETER Experiment Name: At_Far-red-induction_P Parameter: Organism Value: A. thaliana
  misc_feature: MA Experiment 20001450 PARAMETER Experiment Name: At_Far-red-induction_P Parameter: Plant Line Value: Columbia
  misc_feature: MA Experiment 20001450 PARAMETER Experiment Name: At_Far-red-induction_P Parameter: Timepoint (hr) Value: 8
  misc_feature: MA Experiment 20001450 PARAMETER Experiment Name: At_Far-red-induction_P Parameter: Tissue Value: Whole Plant
  misc_feature: MA Experiment ID: 20001558 Result: Down-regulated in Transcription
  misc_feature: MA Experiment 20001558 PARAMETER Experiment Name: At_Drought_Soil_Dry_P Parameter: Age (day) Value: 27
  misc_feature: MA Experiment 20001558 PARAMETER Experiment Name: At_Drought_Soil_Dry_P Parameter: Organism Value: A. thaliana
  misc_feature: MA Experiment 20001558 PARAMETER Experiment Name: At_Drought_Soil_Dry_P Parameter: Plant Line Value: WS
  misc_feature: MA Experiment 20001558 PARAMETER Experiment Name: At_Drought_Soil_Dry_P Parameter: Post Timepoint (hr) Value: 6
  misc_feature: MA Experiment 20001558 PARAMETER Experiment Name: At_Drought_Soil_Dry_P Parameter: Post-Treatment Value: Re-Water vs. No Drought
  misc_feature: MA Experiment 20001558 PARAMETER Experiment Name: At_Drought_Soil_Dry_P Parameter: Timepoint (day) Value: 13
  misc_feature: MA Experiment 20001558 PARAMETER Experiment Name: At_Drought_Soil_Dry_P Parameter: Treatment Value: Drought vs. No Drought
  misc_feature: MA Experiment ID: 20001560 Result: Down-regulated in Transcription
  misc_feature: MA Experiment 20001560 PARAMETER Experiment Name: At_Drought_Soil_Dry_P Parameter: Age (day) Value: 28
  misc_feature: MA Experiment 20001560 PARAMETER Experiment Name: At_Drought_Soil_Dry_P Parameter: Organism Value: A. thaliana
  misc_feature: MA Experiment 20001560 PARAMETER Experiment Name: At_Drought_Soil_Dry_P Parameter: Plant Line Value: WS
  misc_feature: MA Experiment 20001560 PARAMETER Experiment Name: At_Drought_Soil_Dry_P Parameter: Post Timepoint (hr) Value: None
  misc_feature: MA Experiment 20001560 PARAMETER Experiment Name: At_Drought_Soil_Dry_P Parameter: Post-Treatment Value: None
  misc_feature: MA Experiment 20001560 PARAMETER Experiment Name: At_Drought_Soil_Dry_P Parameter: Timepoint (day) Value: 14
  misc_feature: MA Experiment 20001560 PARAMETER Experiment Name: At_Drought_Soil_Dry_P Parameter: Treatment Value: Drought vs. No Drought
atctgcgatttgatcatcaacaacaatcactccaaattttgtctgctcaccatttttccacaaagccaattctcttgtatccaatgcctatgttctactcctctcgttttctcttcttcttcaccatcgtccccttactcgtctctatcgctctctaccaactcgacacatttgacccagctccggttccttccgaggcatacgcctcctctactacttcaatcccgccgcttatcagcgacaaatatctcaccggagctgagtttattggcgtcggtcttctcgataaacccgaagatatcgcctatcatcaagactctaatctcatatatactggctgcatagatggatgggtgaaacgagtcagtgtccacgactcagctaatgactcagtcgttgaggattgggtcaataccggtggtagaccgctcggaatcgctttcggagtccacggcgaagtcattgtggcagacgcatacaagggactgttgaacataagtggtgacgggaagaagacggaattattgacggatcaagcggaaggcgttaaatttaagctgactgatgtagtcgccgttgcagataacggcgttttgtatttcactgatgcttcttacaagtacactctgcatcaagtcaagtttgacattttggaaggtaaaccacatggccgtctcatgagctttgatcccaccacacgtgttacacgtgtacttctcaaagacctttacttcgctaatggcgtctccatgtctcctgatcaaacgcatctcatcttctgtgaaactcccatgagacgatgcagcaagtattacattaatgaagagcgtgtagaggtgtttattcaaggcttaccaggttatccagataacattcggtacgacggagatggccattactggattgctatggtttcgggagcatcaacgttgtggaggctctcgatgaaataccctttcttgaggaaaatcacagccatagcggctaagtatggcgtggaacttatgttcatgaagaatgcaggtgttctgcaggtggatttggatgggaatcccatcgcttactaccatgatcagagactctctcacattaccaccggtatcaagattgggaactatctctattgtggaaatatcttgcattcgtacattatccgactcgatctcctgaagtatcctgcacagaagaagaagctttgaaacatcaaagtttatacaagcactaaaaatttccactttaggagtatgcactttcacaaaaatgtaaacgtatcgtcccttagaataaatgtatgataatgtctcttaaggagtacatagtagcctgaaacaatgaatacaaaaccaatcaaccatacaagccattccaatgtgtca

SEQ ID NO: 22682 - protein, 398 aa, Arabidopsis thaliana
  peptide (1)..(398): Ceres Seq. ID no. 12334630
  misc_feature (35)..(383): Pfam Name: Strictosidine synthase Pfam Description: Strictosidine synthase
  misc_feature (35)..(388): Homolog of NCBI NO: 23059369 NR Description: hypothetical protein [Pseudomonas fluorescens
  misc_feature (43)..(396): Homolog of NCBI NO: 23237921 NR Description: contains ESTs
  misc_feature (97)..(380): Homolog of NCBI NO: 40063117 NR Description: strictosidine synthase family protein [uncultured
  misc_feature (42)..(386): Homolog of NCBI NO: 15596490 NR Description: hypothetical protein [Pseudomonas aeruginosa
  misc_feature (45)..(395): Homolog of NCBI NO: 37536558 NR Description: mucin-like protein [Oryza sativa (japonica
  misc_feature (28)..(396): Homolog of NCBI NO: 15230477 NR Description: strictosidine synthase-related
  misc_feature (28)..(398): Homolog of NCBI NO: 15230490 NR Description: strictosidine synthase-related
  misc_feature (28)..(398): Homolog of NCBI NO: 15230488 NR Description: strictosidine synthase-related
  misc_feature (28)..(398): Homolog of NCBI NO: 11358518 NR Description: mucin-like protein - Arabidopsis thaliana
  misc_feature (28)..(398): Homolog of NCBI NO: 18409339 NR Description: strictosidine synthase-related
LRFDHQQQSLQILSAHHFSTKPILLYPMPMFYSSRFLFFFTIVPLLVSIALYQLDTFDPAPVPSEAYASSTTSIPPLISDKYLTGAEFIGVGLLDKPEDIAYHQDSNLIYTGCIDGWVKRVSVHDSANDSVVEDWVNTGGRPLGIAFGVHGEVIVADAYKGLLNISGDGKKTELLTDQAEGVKFKLTDVVAVADNGVLYFTDASYKYTLHQVKFDILEGKPHGRLMSFDPTTRVTRVLLKDLYFANGVSMSPDQTHLIFCETPMRRCSKYYINEERVEVFIQGLPGYPDNIRYDGDGHYWIAMVSGASTLWRLSMKYPFLRKITAIAAKYGVELMFMKNAGVLQVDLDGNPIAYYHDQRLSHITTGIKIGNYLYCGNILHSYIIRLDLLKYPAQKKKL

SEQ ID NO: 22683 - protein, 371 aa, Arabidopsis thaliana
  peptide (1)..(371): Ceres Seq. ID no. 12334631
  misc_feature (8)..(356): Pfam Name: Strictosidine synthase Pfam Description: Strictosidine synthase
  misc_feature (8)..(361): Homolog of NCBI NO: 23059369 NR Description: hypothetical protein [Pseudomonas fluorescens
  misc_feature (16)..(369): Homolog of NCBI NO: 23237921 NR Description: contains ESTs
  misc_feature (70)..(353): Homolog of NCBI NO: 40063117 NR Description: strictosidine synthase family protein [uncultured
  misc_feature (15)..(359): Homolog of NCBI NO: 15596490 NR Description: hypothetical protein [Pseudomonas aeruginosa
  misc_feature (18)..(368): Homolog of NCBI NO: 37536558 NR Description: mucin-like protein [Oryza sativa (japonica
  misc_feature (1)..(369): Homolog of NCBI NO: 15230477 NR Description: strictosidine synthase-related
  misc_feature (1)..(371): Homolog of NCBI NO: 15230490 NR Description: strictosidine synthase-related
  misc_feature (1)..(371): Homolog of NCBI NO: 15230488 NR Description: strictosidine synthase-related
  misc_feature (1)..(371): Homolog of NCBI NO: 11358518 NR Description: mucin-like protein - Arabidopsis thaliana
  misc_feature (1)..(371): Homolog of NCBI NO: 18409339 NR Description: strictosidine synthase-related
MPMFYSSRFLFFFTIVPLLVSIALYQLDTFDPAPVPSEAYASSTTSIPPLISDKYLTGAEFIGVGLLDKPEDIAYHQDSNLIYTGCIDGWVKRVSVHDSANDSVVEDWVNTGGRPLGIAFGVHGEVIVADAYKGLLNISGDGKKTELLTDQAEGVKFKLTDVVAVADNGVLYFTDASYKYTLHQVKFDILEGKPHGRLMSFDPTTRVTRVLLKDLYFANGVSMSPDQTHLIFCETPMRRCSKYYINEERVEVFIQGLPGYPDNIRYDGDGHYWIAMVSGASTLWRLSMKYPFLRKITAIAAKYGVELMFMKNAGVLQVDLDGNPIAYYHDQRLSHITTGIKIGNYLYCGNILHSYIIRLDLLKYPAQKKKL

SEQ ID NO: 22684 - protein, 369 aa, Arabidopsis thaliana
  peptide (1)..(369): Ceres Seq. ID no. 12334632
  misc_feature (6)..(354): Pfam Name: Strictosidine synthase Pfam Description: Strictosidine synthase
  misc_feature (6)..(359): Homolog of NCBI NO: 23059369 NR Description: hypothetical protein [Pseudomonas fluorescens
  misc_feature (14)..(367): Homolog of NCBI NO: 23237921 NR Description: contains ESTs
  misc_feature (68)..(351): Homolog of NCBI NO: 40063117 NR Description: strictosidine synthase family protein [uncultured
  misc_feature (13)..(357): Homolog of NCBI NO: 15596490 NR Description: hypothetical protein [Pseudomonas aeruginosa
  misc_feature (16)..(366): Homolog of NCBI NO: 37536558 NR Description: mucin-like protein [Oryza sativa (japonica
  misc_feature (1)..(367): Homolog of NCBI NO: 15230477 NR Description: strictosidine synthase-related
  misc_feature (1)..(369): Homolog of NCBI NO: 15230490 NR Description: strictosidine synthase-related
  misc_feature (1)..(369): Homolog of NCBI NO: 15230488 NR Description: strictosidine synthase-related
  misc_feature (1)..(369): Homolog of NCBI NO: 11358518 NR Description: mucin-like protein - Arabidopsis thaliana
  misc_feature (1)..(369): Homolog of NCBI NO: 18409339 NR Description: strictosidine synthase-related
MFYSSRFLFFFTIVPLLVSIALYQLDTFDPAPVPSEAYASSTTSIPPLISDKYLTGAEFIGVGLLDKPEDIAYHQDSNLIYTGCIDGWVKRVSVHDSANDSVVEDWVNTGGRPLGIAFGVHGEVIVADAYKGLLNISGDGKKTELLTDQAEGVKFKLTDVVAVADNGVLYFTDASYKYTLHQVKFDILEGKPHGRLMSFDPTTRVTRVLLKDLYFANGVSMSPDQTHLIFCETPMRRCSKYYINEERVEVFIQGLPGYPDNIRYDGDGHYWIAMVSGASTLWRLSMKYPFLRKITAIAAKYGVELMFMKNAGVLQVDLDGNPIAYYHDQRLSHITTGIKIGNYLYCGNILHSYIIRLDLLKYPAQKKKL

SEQ ID NO: 22685 - DNA, 895 bp, Arabidopsis thaliana
  misc_feature (1)..(895): Ceres Seq. ID no. 12326430
  misc_feature: MA Experiment ID: 108434 Result: Up-regulated in Transcription
  misc_feature: MA Experiment 108434 PARAMETER Experiment Name: At_Root_Tips_cDNA_P Parameter: Tissue Value: Root Tips
  misc_feature: MA Experiment ID: 108462 Result: Down-regulated in Transcription
  misc_feature: MA Experiment 108462 PARAMETER Experiment Name: At_Germinating_Seeds_cDNA_P Parameter: Age (day) Value: 2 vs. 0
  misc_feature: MA Experiment 108462 PARAMETER Experiment Name: At_Germinating_Seeds_cDNA_P Parameter: Tissue Value: Germinating Seeds
  misc_feature: MA Experiment ID: 108463 Result: Down-regulated in Transcription
  misc_feature: MA Experiment 108463 PARAMETER Experiment Name: At_Germinating_Seeds_cDNA_P Parameter: Age (day) Value: 3 vs. 0
  misc_feature: MA Experiment 108463 PARAMETER Experiment Name: At_Germinating_Seeds_cDNA_P Parameter: Tissue Value: Germinating Seeds
  misc_feature: MA Experiment ID: 108464 Result: Down-regulated in Transcription
  misc_feature: MA Experiment 108464 PARAMETER Experiment Name: At_Germinating_Seeds_cDNA_P Parameter: Age (day) Value: 4 vs. 0
  misc_feature: MA Experiment 108464 PARAMETER Experiment Name: At_Germinating_Seeds_cDNA_P Parameter: Tissue Value: Germinating Seeds
  misc_feature: MA Experiment ID: 108488 Result: Down-regulated in Transcription
  misc_feature: MA Experiment ID: 108573 Result: Down-regulated in Transcription
  misc_feature: MA Experiment 108573 PARAMETER Experiment Name: At_Drought_cDNA_P Parameter: Timepoint (hr) Value: 6
  misc_feature: MA Experiment 108573 PARAMETER Experiment Name: At_Drought_cDNA_P Parameter: Tissue Value: Aerial
  misc_feature: MA Experiment 108573 PARAMETER Experiment Name: At_Drought_cDNA_P Parameter: Treatment Value: Drought vs. No Drought
  misc_feature: MA Experiment ID: 20000093 Result: Down-regulated in Transcription
  misc_feature: MA Experiment 20000093 PARAMETER Experiment Name: At_42deg_Heat_cDNA_P Parameter: Temperature (deg C) Value: 42 vs. 22
  misc_feature: MA Experiment 20000093 PARAMETER Experiment Name: At_42deg_Heat_cDNA_P Parameter: Timepoint (hr) Value: 0.5
  misc_feature: MA Experiment 20000093 PARAMETER Experiment Name: At_42deg_Heat_cDNA_P Parameter: Tissue Value: Aerial
  misc_feature: MA Experiment ID: 20000111 Result: Down-regulated in Transcription
  misc_feature: MA Experiment 20000111 PARAMETER Experiment Name: At_42deg_Heat_cDNA_P Parameter: Temperature (deg C) Value: 42 vs. 22
  misc_feature: MA Experiment 20000111 PARAMETER Experiment Name: At_42deg_Heat_cDNA_P Parameter: Timepoint (hr) Value: 6
  misc_feature: MA Experiment 20000111 PARAMETER Experiment Name: At_42deg_Heat_cDNA_P Parameter: Tissue Value: Aerial
  misc_feature: MA Experiment ID: 20000113 Result: Down-regulated in Transcription
  misc_feature: MA Experiment 20000113 PARAMETER Experiment Name: At_42deg_Heat_cDNA_P Parameter: Temperature (deg C) Value: 42 vs. 22
  misc_feature: MA Experiment 20000113 PARAMETER Experiment Name: At_42deg_Heat_cDNA_P Parameter: Timepoint (hr) Value: 8
  misc_feature: MA Experiment 20000113 PARAMETER Experiment Name: At_42deg_Heat_cDNA_P Parameter: Tissue Value: Aerial
ctaaaaattctccaggaaaatcgaaaacttttctcgggaaaatctttaaactttttgcttttcgaagaaacatgactggtgttaatgatgatgatgataagaacttcaaagaagaaccagagattcaagttttaagcgacgacgatagtgatgaagaacaagttaaagacgtaggtgaagaagttagcgacgaagacgatgatgatggaagtgaaggagatgatgatgatgatgatgaggaggaagaagcagaagaagatgatgacgatgatgatgttcaggttttgcagtctttaggtggtcctcctgtacaatctgcggaagatgaagatgaagaaggtgatgaagatggaaacggtgatgacgatgataatgatggagatgatgatgatgacgacgatgatgatgatgatgatgaggatgctgaagatgagggggatcttgggacagagtacttagtgaggccagttggtagagctgaagatgaagaggatgcaagtgattttgagccggaagagaatggtgtggaagaggatatagacgaaggagaagacgatgagaatgataactcgggtggtgctgggaagtcagaggctccgccgaagaggaagagagcacctgaagaagatgaagaggatagtggtgatgaagatgatgacagacctccaaagaggtagtttttggatctgacaacaacacaatgagaccagagagctttttatgtttttttttttaaaaaaaaaaattggtgttgtgagatttgaatcattggttggggtttatgtaagtttattatggagcaactaagtagtagttttaagtttaagtaggggctcttttttttctatgcattgctatttcttttttttttttctttgtagtgagtcaataaccg

SEQ ID NO: 22686 - protein, 224 aa, Arabidopsis thaliana
  peptide (1)..(224): Ceres Seq. ID no. 12326431
  misc_feature (38)..(204): Pfam Name: Chromadorea ALT protein Pfam Description: Chromadorea ALT protein
  misc_feature (28)..(219): Homolog of NCBI NO: 33284873 NR Description: SI:bZ1G18.2 (novel protein similar to human
  misc_feature (28)..(219): Homolog of NCBI NO: 33284873 NR Description: SI:bZ1G18.2 (novel protein similar to human
  misc_feature (28)..(219): Homolog of NCBI NO: 33284873 NR Description: SI:bZ1G18.2 (novel protein similar to human
  misc_feature (28)..(219): Homolog of NCBI NO: 35210494 NR Description: aspartic acid-rich protein aspolin2 [Theragra
  misc_feature (73)..(224): Homolog of NCBI NO: 28393370 NR Description: unknown protein [Arabidopsis thaliana]
  misc_feature (28)..(219): Homolog of NCBI NO: 33284873 NR Description: SI:bZ1G18.2 (novel protein similar to human
  misc_feature (73)..(224): Homolog of NCBI NO: 30684391 NR Description: expressed protein [Arabidopsis thaliana]
  misc_feature (28)..(219): Homolog of NCBI NO: 35210494 NR Description: aspartic acid-rich protein aspolin2 [Theragra
  misc_feature (50)..(218): Homolog of NCBI NO: 34894890 NR Description: B1140D12.10 [Oryza sativa (japonica
  misc_feature (24)..(224): Homolog of NCBI NO: 18401985 NR Description: expressed protein
KNSPGKSKTFLGKIFKLFAFRRNMTGVNDDDDKNFKEEPEIQVLSDDDSDEEQVKDVGEEVSDEDDDDGSEGDDDDDDEEEEAEEDDDDDDVQVLQSLGGPPVQSAEDEDEEGDEDGNGDDDDNDGDDDDDDDDDDDDEDAEDEGDLGTEYLVRPVGRAEDEEDASDFEPEENGVEEDIDEGEDDENDNSGGAGKSEAPPKRKRAPEEDEEDSGDEDDDRPPKR

SEQ ID NO: 22687 - protein, 201 aa, Arabidopsis thaliana
  peptide (1)..(201): Ceres Seq. ID no. 12326432
  misc_feature (15)..(181): Pfam Name: Chromadorea ALT protein Pfam Description: Chromadorea ALT protein
  misc_feature (5)..(196): Homolog of NCBI NO: 33284873 NR Description: SI:bZ1G18.2 (novel protein similar to human
  misc_feature (5)..(196): Homolog of NCBI NO: 33284873 NR Description: SI:bZ1G18.2 (novel protein similar to human
  misc_feature (5)..(196): Homolog of NCBI NO: 33284873 NR Description: SI:bZ1G18.2 (novel protein similar to human
  misc_feature (5)..(196): Homolog of NCBI NO: 33284873 NR Description: SI:bZ1G18.2 (novel protein similar to human
  misc_feature (5)..(196): Homolog of NCBI NO: 35210494 NR Description: aspartic acid-rich protein aspolin2 [Theragra
  misc_feature (50)..(201): Homolog of NCBI NO: 28393370 NR Description: unknown protein [Arabidopsis thaliana]
  misc_feature (50)..(201): Homolog of NCBI NO: 30684391 NR Description: expressed protein [Arabidopsis thaliana]
  misc_feature (5)..(196): Homolog of NCBI NO: 35210494 NR Description: aspartic acid-rich protein aspolin2 [Theragra
  misc_feature (27)..(195): Homolog of NCBI NO: 34894890 NR Description: B1140D12.10 [Oryza sativa (japonica
  misc_feature (1)..(201): Homolog of NCBI NO: 18401985 NR Description: expressed protein
MTGVNDDDDKNFKEEPEIQVLSDDDSDEEQVKDVGEEVSDEDDDDGSEGDDDDDDEEEEAEEDDDDDDVQVLQSLGGPPVQSAEDEDEEGDEDGNGDDDDNDGDDDDDDDDDDDDEDAEDEGDLGTEYLVRPVGRAEDEEDASDFEPEENGVEEDIDEGEDDENDNSGGAGKSEAPPKRKRAPEEDEEDSGDEDDDRPPKR

SEQ ID NO: 22688 - DNA, 1531 bp, Arabidopsis thaliana
  misc_feature (1)..(1531): Ceres Seq. ID no. 12334621
  misc_feature: MA Experiment ID: 108434 Result: Down-regulated in Transcription
  misc_feature: MA Experiment 108434 PARAMETER Experiment Name: At_Root_Tips_cDNA_P Parameter: Tissue Value: Root Tips
  misc_feature: MA Experiment ID: 108461 Result: Up-regulated in Transcription
  misc_feature: MA Experiment 108461 PARAMETER Experiment Name: At_Germinating_Seeds_cDNA_P Parameter: Age (day) Value: 1 vs. 0
  misc_feature: MA Experiment 108461 PARAMETER Experiment Name: At_Germinating_Seeds_cDNA_P Parameter: Tissue Value: Germinating Seeds
  misc_feature: MA Experiment ID: 108462 Result: Up-regulated in Transcription
  misc_feature: MA Experiment 108462 PARAMETER Experiment Name: At_Germinating_Seeds_cDNA_P Parameter: Age (day) Value: 2 vs. 0
  misc_feature: MA Experiment 108462 PARAMETER Experiment Name: At_Germinating_Seeds_cDNA_P Parameter: Tissue Value: Germinating Seeds
  misc_feature: MA Experiment ID: 108463 Result: Up-regulated in Transcription
  misc_feature: MA Experiment 108463 PARAMETER Experiment Name: At_Germinating_Seeds_cDNA_P Parameter: Age (day) Value: 3 vs. 0
  misc_feature: MA Experiment 108463 PARAMETER Experiment Name: At_Germinating_Seeds_cDNA_P Parameter: Tissue Value: Germinating Seeds
  misc_feature: MA Experiment ID: 108464 Result: Up-regulated in Transcription
  misc_feature: MA Experiment 108464 PARAMETER Experiment Name: At_Germinating_Seeds_cDNA_P Parameter: Age (day) Value: 4 vs. 0
  misc_feature: MA Experiment 108464 PARAMETER Experiment Name: At_Germinating_Seeds_cDNA_P Parameter: Tissue Value: Germinating Seeds
  misc_feature: MA Experiment ID: 108469 Result: Up-regulated in Transcription
  misc_feature: MA Experiment ID: 108585 Result: Up-regulated in Transcription
  misc_feature: MA Experiment 108585 PARAMETER Experiment Name: At_5mM_NaNP_cDNA_P Parameter: Timepoint (hr) Value: 6
  misc_feature: MA Experiment 108585 PARAMETER Experiment Name: At_5mM_NaNP_cDNA_P Parameter: Tissue Value: Aerial
  misc_feature: MA Experiment 108585 PARAMETER Experiment Name: At_5mM_NaNP_cDNA_P Parameter: Treatment Value: null
  misc_feature: MA Experiment ID: 108668 Result: Up-regulated in Transcription
  misc_feature: MA Experiment 108668 PARAMETER Experiment Name: At_2mM_SA_cDNA_P Parameter: Plant Line Value: WS
  misc_feature: MA Experiment 108668 PARAMETER Experiment Name: At_2mM_SA_cDNA_P Parameter: Timepoint (hr) Value: 6
  misc_feature: MA Experiment 108668 PARAMETER Experiment Name: At_2mM_SA_cDNA_P Parameter: Treatment Value: 2mM SA vs. No Treatment
  misc_feature: MA Experiment ID: 20000069 Result: Down-regulated in Transcription
  misc_feature: MA Experiment 20000069 PARAMETER Experiment Name: At_100uM_ABA_Mutants_cDNA_P Parameter: Plant Line Value: CS23
  misc_feature: MA Experiment 20000069 PARAMETER Experiment Name: At_100uM_ABA_Mutants_cDNA_P Parameter: Timepoint (hr) Value: 6
  misc_feature: MA Experiment 20000069 PARAMETER Experiment Name: At_100uM_ABA_Mutants_cDNA_P Parameter: Tissue Value: Aerial
  misc_feature: MA Experiment 20000069 PARAMETER Experiment Name: At_100uM_ABA_Mutants_cDNA_P Parameter: Treatment Value: 100uM ABA vs. No Treatment
  misc_feature: MA Experiment ID: 20000087 Result: Down-regulated in Transcription
  misc_feature: MA Experiment 20000087 PARAMETER Experiment Name: At_100uM_ABA_Mutants_cDNA_P Parameter: Plant Line Value: WS
  misc_feature: MA Experiment 20000087 PARAMETER Experiment Name: At_100uM_ABA_Mutants_cDNA_P Parameter: Timepoint (hr) Value: 6
  misc_feature: MA Experiment 20000087 PARAMETER Experiment Name: At_100uM_ABA_Mutants_cDNA_P Parameter: Tissue Value: Aerial
  misc_feature: MA Experiment 20000087 PARAMETER Experiment Name: At_100uM_ABA_Mutants_cDNA_P Parameter: Treatment Value: 100uM ABA vs. No Treatment
  misc_feature: MA Experiment ID: 20000169 Result: Down-regulated in Transcription
  misc_feature: MA Experiment 20000169 PARAMETER Experiment Name: At_100uM_ABA_P Parameter: Age (day) Value: 14
  misc_feature: MA Experiment 20000169 PARAMETER Experiment Name: At_100uM_ABA_P Parameter: Organism Value: A. thaliana
  misc_feature: MA Experiment 20000169 PARAMETER Experiment Name: At_100uM_ABA_P Parameter: Plant Line Value: WS
  misc_feature: MA Experiment 20000169 PARAMETER Experiment Name: At_100uM_ABA_P Parameter: Timepoint (hr) Value: 6
  misc_feature: MA Experiment 20000169 PARAMETER Experiment Name: At_100uM_ABA_P Parameter: Tissue Value: Aerial
  misc_feature: MA Experiment 20000169 PARAMETER Experiment Name: At_100uM_ABA_P Parameter: Treatment Value: 100uM ABA vs. No Treatment
  misc_feature: MA Experiment ID: 20000173 Result: Down-regulated in Transcription
  misc_feature: MA Experiment 20000173 PARAMETER Experiment Name: At_42deg_Heat_P Parameter: Age (day) Value: 14
  misc_feature: MA Experiment 20000173 PARAMETER Experiment Name: At_42deg_Heat_P Parameter: Organism Value: A. thaliana
  misc_feature: MA Experiment 20000173 PARAMETER Experiment Name: At_42deg_Heat_P Parameter: Plant Line Value: WS
  misc_feature: MA Experiment 20000173 PARAMETER Experiment Name: At_42deg_Heat_P Parameter: Temperature (deg C) Value: 42 vs. 22
  misc_feature: MA Experiment 20000173 PARAMETER Experiment Name: At_42deg_Heat_P Parameter: Timepoint (hr) Value: 6
  misc_feature: MA Experiment 20000173 PARAMETER Experiment Name: At_42deg_Heat_P Parameter: Tissue Value: Aerial
  misc_feature: MA Experiment ID: 20000182 Result: Up-regulated in Transcription
  misc_feature: MA Experiment 20000182 PARAMETER Experiment Name: At_2mM_SA_P Parameter: Age (day) Value: 14
  misc_feature: MA Experiment 20000182 PARAMETER Experiment Name: At_2mM_SA_P Parameter: Organism Value: A. thaliana
  misc_feature: MA Experiment 20000182 PARAMETER Experiment Name: At_2mM_SA_P Parameter: Plant Line Value: WS
  misc_feature: MA Experiment 20000182 PARAMETER Experiment Name: At_2mM_SA_P Parameter: Timepoint (hr) Value: 6
  misc_feature: MA Experiment 20000182 PARAMETER Experiment Name: At_2mM_SA_P Parameter: Tissue Value: Aerial
  misc_feature: MA Experiment 20000182 PARAMETER Experiment Name: At_2mM_SA_P Parameter: Treatment Value: 2mM SA vs. No Treatment
  misc_feature: MA Experiment ID: 20000185 Result: Down-regulated in Transcription
  misc_feature: MA Experiment 20000185 PARAMETER Experiment Name: At_Roots__P Parameter: Age (day) Value: 7 vs. 21
  misc_feature: MA Experiment 20000185 PARAMETER Experiment Name: At_Roots__P Parameter: Organism Value: A. thaliana
  misc_feature: MA Experiment 20000185 PARAMETER Experiment Name: At_Roots__P Parameter: Tissue Value: Roots vs. Whole Plant
  misc_feature: MA Experiment ID: 20000213 Result: Up-regulated in Transcription
  misc_feature: MA Experiment 20000213 PARAMETER Experiment Name: At_4deg_Cold_P Parameter: Timepoint (hr) Value: 2
  misc_feature: MA Experiment ID: 20000224 Result: Up-regulated in Transcription
  misc_feature: MA Experiment ID: 20000234 Result: Down-regulated in Transcription
  misc_feature: MA Experiment 20000234 PARAMETER Experiment Name: At_Siliques_P Parameter: Age (day) Value: 21
  misc_feature: MA Experiment 20000234 PARAMETER Experiment Name: At_Siliques_P Parameter: Organism Value: A. thaliana
  misc_feature: MA Experiment 20000234 PARAMETER Experiment Name: At_Siliques_P Parameter: Plant Line Value: WS
  misc_feature: MA Experiment 20000234 PARAMETER Experiment Name: At_Siliques_P Parameter: Tissue Value: Less Than 5mm Siliques vs. Whole Plant
  misc_feature: MA Experiment ID: 20000265 Result: Down-regulated in Transcription
  misc_feature: MA Experiment 20000265 PARAMETER Experiment Name: At_Open_Flower_P Parameter: Age (day) Value: 21
  misc_feature: MA Experiment 20000265 PARAMETER Experiment Name: At_Open_Flower_P Parameter: Plant Line Value: WS
  misc_feature: MA Experiment 20000265 PARAMETER Experiment Name: At_Open_Flower_P Parameter: Tissue Value: Closed Flower vs. Whole Plant
  misc_feature: MA Experiment ID: 20000286 Result: Down-regulated in Transcription
  misc_feature: MA Experiment 20000286 PARAMETER Experiment Name: At_Open_Flower_P Parameter: Age (day) Value: 21
  misc_feature: MA Experiment 20000286 PARAMETER Experiment Name: At_Open_Flower_P Parameter: Plant Line Value: WS
  misc_feature: MA Experiment 20000286 PARAMETER Experiment Name: At_Open_Flower_P Parameter: Tissue Value: Half Open vs. Whole Plant
  misc_feature: MA Experiment ID: 20000439 Result: Down-regulated in Transcription
  misc_feature: MA Experiment 20000439 PARAMETER Experiment Name: At_Roots__P Parameter: Age (day) Value: 14 vs. 21
  misc_feature: MA Experiment 20000439 PARAMETER Experiment Name: At_Roots__P Parameter: Organism Value: A. thaliana
  misc_feature: MA Experiment 20000439 PARAMETER Experiment Name: At_Roots__P Parameter: Tissue Value: Roots vs. Whole Plant
  misc_feature: MA Experiment ID: 20000453 Result: Down-regulated in Transcription
  misc_feature: MA Experiment 20000453 PARAMETER Experiment Name: At_100uM_ABA_P Parameter: Age (day) Value: 15
  misc_feature: MA Experiment 20000453 PARAMETER Experiment Name: At_100uM_ABA_P Parameter: Organism Value: A. thaliana
  misc_feature: MA Experiment 20000453 PARAMETER Experiment Name: At_100uM_ABA_P Parameter: Plant Line Value: WS
  misc_feature: MA Experiment 20000453 PARAMETER Experiment Name: At_100uM_ABA_P Parameter: Timepoint (hr) Value: 24
  misc_feature: MA Experiment 20000453 PARAMETER Experiment Name: At_100uM_ABA_P Parameter: Tissue Value: Aerial
  misc_feature: MA Experiment 20000453 PARAMETER Experiment Name: At_100uM_ABA_P Parameter: Treatment Value: 100uM ABA vs. No Treatment
  misc_feature: MA Experiment ID: 20000606 Result: Up-regulated in Transcription
  misc_feature: MA Experiment 20000606 PARAMETER Experiment Name: At_CS8548_Mutant_P Parameter: Age (day) Value: 14
  misc_feature: MA Experiment 20000606 PARAMETER Experiment Name: At_CS8548_Mutant_P Parameter: Plant Line Value: CS8548 vs. wt
  misc_feature: MA Experiment 20000606 PARAMETER Experiment Name: At_CS8548_Mutant_P Parameter: Tissue Value: Whole Plant
  misc_feature: MA Experiment ID: 20000794 Result: Down-regulated in Transcription
  misc_feature: MA Experiment 20000794 PARAMETER Experiment Name: At_Petals_P Parameter: Age (day) Value: 23-25 days
  misc_feature: MA Experiment 20000794 PARAMETER Experiment Name: At_Petals_P Parameter: Plant Line Value: WS
  misc_feature: MA Experiment 20000794 PARAMETER Experiment Name: At_Petals_P Parameter: Tissue Value: Petals vs. Whole plant
  misc_feature: MA Experiment ID: 20001248 Result: Up-regulated in Transcription
  misc_feature: MA Experiment 20001248 PARAMETER Experiment Name: At_Far-red-induction_P Parameter: Age (day) Value: 7
  misc_feature: MA Experiment 20001248 PARAMETER Experiment Name: At_Far-red-induction_P Parameter: Light Value: Far-red vs. White
  misc_feature: MA Experiment 20001248 PARAMETER Experiment Name: At_Far-red-induction_P Parameter: Organism Value: A. thaliana
  misc_feature: MA Experiment 20001248 PARAMETER Experiment Name: At_Far-red-induction_P Parameter: Plant Line Value: Columbia
  misc_feature: MA Experiment 20001248 PARAMETER Experiment Name: At_Far-red-induction_P Parameter: Timepoint (hr) Value: 4
  misc_feature: MA Experiment 20001248 PARAMETER Experiment Name: At_Far-red-induction_P Parameter: Tissue Value: Whole Plant
  misc_feature: MA Experiment ID: 20001556 Result: Down-regulated in Transcription
  misc_feature: MA Experiment 20001556 PARAMETER Experiment Name: At_Drought_Soil_Dry_P Parameter: Age (day) Value: 26
  misc_feature: MA Experiment 20001556 PARAMETER Experiment Name: At_Drought_Soil_Dry_P Parameter: Organism Value: A. thaliana
  misc_feature: MA Experiment 20001556 PARAMETER Experiment Name: At_Drought_Soil_Dry_P Parameter: Plant Line Value: WS
  misc_feature: MA Experiment 20001556 PARAMETER Experiment Name: At_Drought_Soil_Dry_P Parameter: Post Timepoint (hr) Value: None
  misc_feature: MA Experiment 20001556 PARAMETER Experiment Name: At_Drought_Soil_Dry_P Parameter: Post-Treatment Value: None
  misc_feature: MA Experiment 20001556 PARAMETER Experiment Name: At_Drought_Soil_Dry_P Parameter: Timepoint (day) Value: 12
  misc_feature: MA Experiment 20001556 PARAMETER Experiment Name: At_Drought_Soil_Dry_P Parameter: Treatment Value: Drought vs. No Drought
  misc_feature: MA Experiment ID: 20001558 Result: Down-regulated in Transcription
  misc_feature: MA Experiment 20001558 PARAMETER Experiment Name: At_Drought_Soil_Dry_P Parameter: Age (day) Value: 27
  misc_feature: MA Experiment 20001558 PARAMETER Experiment Name: At_Drought_Soil_Dry_P Parameter: Organism Value: A. thaliana
  misc_feature: MA Experiment 20001558 PARAMETER Experiment Name: At_Drought_Soil_Dry_P Parameter: Plant Line Value: WS
  misc_feature: MA Experiment 20001558 PARAMETER Experiment Name: At_Drought_Soil_Dry_P Parameter: Post Timepoint (hr) Value: 6
  misc_feature: MA Experiment 20001558 PARAMETER Experiment Name: At_Drought_Soil_Dry_P Parameter: Post-Treatment Value: Re-Water vs. No Drought
  misc_feature: MA Experiment 20001558 PARAMETER Experiment Name: At_Drought_Soil_Dry_P Parameter: Timepoint (day) Value: 13
  misc_feature: MA Experiment 20001558 PARAMETER Experiment Name: At_Drought_Soil_Dry_P Parameter: Treatment Value: Drought vs. No Drought
  misc_feature: MA Experiment ID: 20001560 Result: Down-regulated in Transcription
  misc_feature: MA Experiment 20001560 PARAMETER Experiment Name: At_Drought_Soil_Dry_P Parameter: Age (day) Value: 28
  misc_feature: MA Experiment 20001560 PARAMETER Experiment Name: At_Drought_Soil_Dry_P Parameter: Organism Value: A. thaliana
  misc_feature: MA Experiment 20001560 PARAMETER Experiment Name: At_Drought_Soil_Dry_P Parameter: Plant Line Value: WS
  misc_feature: MA Experiment 20001560 PARAMETER Experiment Name: At_Drought_Soil_Dry_P Parameter: Post Timepoint (hr) Value: None
  misc_feature: MA Experiment 20001560 PARAMETER Experiment Name: At_Drought_Soil_Dry_P Parameter: Post-Treatment Value: None
  misc_feature: MA Experiment 20001560 PARAMETER Experiment Name: At_Drought_Soil_Dry_P Parameter: Timepoint (day) Value: 14
  misc_feature: MA Experiment 20001560 PARAMETER Experiment Name: At_Drought_Soil_Dry_P Parameter: Treatment Value: Drought vs. No Drought
  misc_feature: MA Experiment ID: 20001904 Result: Down-regulated in Transcription
  misc_feature: MA Experiment 20001904 PARAMETER Experiment Name: At_Drought_Reproduction_P Parameter: Age (day) Value: 37
  misc_feature: MA Experiment 20001904 PARAMETER Experiment Name: At_Drought_Reproduction_P Parameter: Organism Value: A. thaliana
  misc_feature: MA Experiment 20001904 PARAMETER Experiment Name: At_Drought_Reproduction_P Parameter: Plant Line Value: WS
  misc_feature: MA Experiment 20001904 PARAMETER Experiment Name: At_Drought_Reproduction_P Parameter: Timepoint (day) Value: 7
  misc_feature: MA Experiment 20001904 PARAMETER Experiment Name: At_Drought_Reproduction_P Parameter: Tissue Value: Rosettes
  misc_feature: MA Experiment 20001904 PARAMETER Experiment Name: At_Drought_Reproduction_P Parameter: Treatment Value: Drought vs. No Drought
  misc_feature: MA Experiment ID: 20001905 Result: Down-regulated in Transcription
  misc_feature: MA Experiment 20001905 PARAMETER Experiment Name: At_Drought_Reproduction_P Parameter: Age (day) Value: 40
  misc_feature: MA Experiment 20001905 PARAMETER Experiment Name: At_Drought_Reproduction_P Parameter: Organism Value: A. thaliana
  misc_feature: MA Experiment 20001905 PARAMETER Experiment Name: At_Drought_Reproduction_P Parameter: Plant Line Value: WS
  misc_feature: MA Experiment 20001905 PARAMETER Experiment Name: At_Drought_Reproduction_P Parameter: Timepoint (day) Value: 10
  misc_feature: MA Experiment 20001905 PARAMETER Experiment Name: At_Drought_Reproduction_P Parameter: Tissue Value: Rosettes
  misc_feature: MA Experiment 20001905 PARAMETER Experiment Name: At_Drought_Reproduction_P Parameter: Treatment Value: Drought vs. No Drought
aatattgattatagaaaagtgaatccacttgacctcctcttggaacgcggctatgtctcttgtgcgtccgatctatcctttcttggccagaagcaagagatggtttccggttcgaaccggattaaaatcggtttgcttaacaacgaccagagccgaaacaagcggtgttgacagagaggagaaagtagtgattgttgggggcgggattggcggacttgccactgccgttgctcttcaccggcttggaatccggtcggtggtgttggagcaggcagagtcgcttcggacaggaggagcatcgctgacgctatccaagaatgggtggcgtgttcttgacgccatctccatcggacctcaactccgaaagcagtttcttgaaatgcaaggggtggtattgaagaaggaagatggaagagagcttcgttctttcaaatttaaagacaatgatcaaagccaagaagttcggggggtggagaggcgagtactcttggaaacacttgcaagccagcttcctccacagaccattcggttttcttcaaaactggaaagtatacaaagcaatgatgccaatggtgacactctccttcaacttaaagatggaactcggtttcttgcaaatattgttataggttgtgatggtatccggtctaaggttgcaacttggatggggttcagtgagccgaaatatgttggttattgcgctttccgtggccttgggttctttccaaatggacagccatttcagcaaaaggtgaactacatattcggtagagggcttcgagctggatatgtacctgtatctgcaacaaaagtctactggttcatcactttcaacagcccttctctagggcctcaaatgatggatccagctatcctaagaaaagaagccaaggaactggttagtacctggccagaagatctgcaaaacctcattgatctaacacctgatgaagcaatcagtagaactcctcttgcggaccggtggctttggcctggcattgctccttcagcatcaaaaggtagggttgttcttgttggagatgcttggcacccaatgactccaaatcttggacaaggtgcttgctgtgccttggaagattcagttcttctggcaaataaacttgccagtgcaataaatggagggaccgaatcagttgaaggggcgatggaatcatataggagtgagagatggtctcaggtattccggttgacagtacttgcaaacctagtcggaaaacttctgcaatcagacaatcctcttgtgtgttccgttagagacaatattgtcagtgcaatgggaaaatcctctcggaccaacgatggaacacacaaactttgagtgtgagcctctctatgtttcaatattgtctatgtaatgagatgtaaaagcatatgctccattggatagaggacttagacaatgtatcatcagaggaataatatcaaagaagataatataaactctgattgaatgtaaaagaataatacaatgtaattcgtttatgctatgaaagggaatgactctagagcg

SEQ ID NO: 22689 - protein, 428 aa, Arabidopsis thaliana
  peptide (1)..(428): Ceres Seq. ID no. 12334622
  misc_feature (187)..(391): Pfam Name: Monooxygenase Pfam Description: Monooxygenase
  misc_feature (120)..(412): Homolog of NCBI NO: 25408403 NR Description: probable monooxygenase [imported] - Arabidopsis
  misc_feature (1)..(412): Homolog of NCBI NO: 18403916 NR Description: monooxygenase family
  misc_feature (1)..(412): Homolog of NCBI NO: 25453534 NR Description: CTF2A protein [imported] - Arabidopsis thaliana
  misc_feature (1)..(412): Homolog of NCBI NO: 21536869 NR Description: putative monooxygenase [Arabidopsis thaliana]
  misc_feature (1)..(412): Homolog of NCBI NO: 4164576 NR Description: CTF2A [Arabidopsis thaliana]
  misc_feature (1)..(133): Homolog of NCBI NO: 25408045 NR Description: probable monooxygenase [imported] - Arabidopsis
  misc_feature (193)..(428): Homolog of NCBI NO: 25408045 NR Description: probable monooxygenase [imported] - Arabidopsis
  misc_feature (1)..(428): Homolog of NCBI NO: 25453535 NR Description: CTF2B protein [imported] - Arabidopsis thaliana
  misc_feature (1)..(428): Homolog of NCBI NO: 21592928 NR Description: putative monooxygenase [Arabidopsis thaliana]
  misc_feature (1)..(428): Homolog of NCBI NO: 18402126 NR Description: monooxygenase family
MSLVRPIYPFLARSKRWFPVRTGLKSVCLTTTRAETSGVDREEKVVIVGGGIGGLATAVALHRLGIRSVVLEQAESLRTGGASLTLSKNGWRVLDAISIGPQLRKQFLEMQGVVLKKEDGRELRSFKFKDNDQSQEVRGVERRVLLETLASQLPPQTIRFSSKLESIQSNDANGDTLLQLKDGTRFLANIVIGCDGIRSKVATWMGFSEPKYVGYCAFRGLGFFPNGQPFQQKVNYIFGRGLRAGYVPVSATKVYWFITFNSPSLGPQMMDPAILRKEAKELVSTWPEDLQNLIDLTPDEAISRTPLADRWLWPGIAPSASKGRVVLVGDAWHPMTPNLGQGACCALEDSVLLANKLASAINGGTESVEGAMESYRSERWSQVFRLTVLANLVGKLLQSDNPLVCSVRDNIVSAMGKSSRTNDGTHKL

SEQ ID NO: 22690 - protein, 319 aa, Arabidopsis thaliana
  peptide (1)..(319): Ceres Seq. ID no. 12334623
  misc_feature (78)..(282): Pfam Name: Monooxygenase Pfam Description: Monooxygenase
  misc_feature (11)..(303): Homolog of NCBI NO: 25408403 NR Description: probable monooxygenase [imported] - Arabidopsis
  misc_feature (1)..(303): Homolog of NCBI NO: 18403916 NR Description: monooxygenase family
  misc_feature (1)..(303): Homolog of NCBI NO: 25453534 NR Description: CTF2A protein [imported] - Arabidopsis thaliana
  misc_feature (1)..(303): Homolog of NCBI NO: 21536869 NR Description: putative monooxygenase [Arabidopsis thaliana]
  misc_feature (1)..(303): Homolog of NCBI NO: 4164576 NR Description: CTF2A [Arabidopsis thaliana]
  misc_feature (1)..(24): Homolog of NCBI NO: 25408045 NR Description: probable monooxygenase [imported] - Arabidopsis
  misc_feature (84)..(319): Homolog of NCBI NO: 25408045 NR Description: probable monooxygenase [imported] - Arabidopsis
  misc_feature (1)..(319): Homolog of NCBI NO: 25453535 NR Description: CTF2B protein [imported] - Arabidopsis thaliana
  misc_feature (1)..(319): Homolog of NCBI NO: 21592928 NR Description: putative monooxygenase [Arabidopsis thaliana]
  misc_feature (1)..(319): Homolog of NCBI NO: 18402126 NR Description: monooxygenase family
MQGVVLKKEDGRELRSFKFKDNDQSQEVRGVERRVLLETLASQLPPQTIRFSSKLESIQSNDANGDTLLQLKDGTRFLANIVIGCDGIRSKVATWMGFSEPKYVGYCAFRGLGFFPNGQPFQQKVNYIFGRGLRAGYVPVSATKVYWFITFNSPSLGPQMMDPAILRKEAKELVSTWPEDLQNLIDLTPDEAISRTPLADRWLWPGIAPSASKGRVVLVGDAWHPMTPNLGQGACCALEDSVLLANKLASAINGGTESVEGAMESYRSERWSQVFRLTVLANLVGKLLQSDNPLVCSVRDNIVSAMGKSSRTNDGTHKL

SEQ ID NO: 22691 - protein, 224 aa, Arabidopsis thaliana
  peptide (1)..(224): Ceres Seq. ID no. 12334624
  misc_feature (1)..(187): Pfam Name: Monooxygenase Pfam Description: Monooxygenase
  misc_feature (1)..(208): Homolog of NCBI NO: 34393624 NR Description: putative monooxygenase 2 [Oryza sativa (japonica
  misc_feature (1)..(208): Homolog of NCBI NO: 25408403 NR Description: probable monooxygenase [imported] - Arabidopsis
  misc_feature (1)..(208): Homolog of NCBI NO: 18403916 NR Description: monooxygenase family
  misc_feature (1)..(208): Homolog of NCBI NO: 25453534 NR Description: CTF2A protein [imported] - Arabidopsis thaliana
  misc_feature (1)..(208): Homolog of NCBI NO: 21536869 NR Description: putative monooxygenase [Arabidopsis thaliana]
  misc_feature (1)..(208): Homolog of NCBI NO: 4164576 NR Description: CTF2A [Arabidopsis thaliana]
  misc_feature (1)..(224): Homolog of NCBI NO: 25408045 NR Description: probable monooxygenase [imported] - Arabidopsis
  misc_feature (1)..(224): Homolog of NCBI NO: 25453535 NR Description: CTF2B protein [imported] - Arabidopsis thaliana
  misc_feature (1)..(224): Homolog of NCBI NO: 21592928 NR Description: putative monooxygenase [Arabidopsis thaliana]
  misc_feature (1)..(224): Homolog of NCBI NO: 18402126 NR Description: monooxygenase family
MGFSEPKYVGYCAFRGLGFFPNGQPFQQKVNYIFGRGLRAGYVPVSATKVYWFITFNSPSLGPQMMDPAILRKEAKELVSTWPEDLQNLIDLTPDEAISRTPLADRWLWPGIAPSASKGRVVLVGDAWHPMTPNLGQGACCALEDSVLLANKLASAINGGTESVEGAMESYRSERWSQVFRLTVLANLVGKLLQSDNPLVCSVRDNIVSAMGKSSRTNDGTHKL

SEQ ID NO: 22692 - DNA, 1069 bp, Arabidopsis thaliana
  misc_feature (1)..(1069): Ceres Seq. ID no. 12335511
  misc_feature: MA Experiment ID: 108434 Result: Up-regulated in Transcription
  misc_feature: MA Experiment 108434 PARAMETER Experiment Name: At_Root_Tips_cDNA_P Parameter: Tissue Value: Root Tips
  misc_feature: MA Experiment ID: 108463 Result: Down-regulated in Transcription
  misc_feature: MA Experiment 108463 PARAMETER Experiment Name: At_Germinating_Seeds_cDNA_P Parameter: Age (day) Value: 3 vs. 0
  misc_feature: MA Experiment 108463 PARAMETER Experiment Name: At_Germinating_Seeds_cDNA_P Parameter: Tissue Value: Germinating Seeds
  misc_feature: MA Experiment ID: 20000184 Result: Up-regulated in Transcription
  misc_feature: MA Experiment 20000184 PARAMETER Experiment Name: At_Shoots__P Parameter: Age (day) Value: 7
  misc_feature: MA Experiment 20000184 PARAMETER Experiment Name: At_Shoots__P Parameter: Tissue Value: Shoots vs. Whole Plant
  misc_feature: MA Experiment ID: 20001911 Result: Down-regulated in Transcription
  misc_feature: MA Experiment 20001911 PARAMETER Experiment Name: At_Drought_Reproduction_P Parameter: Age (day) Value: 40
  misc_feature: MA Experiment 20001911 PARAMETER Experiment Name: At_Drought_Reproduction_P Parameter: Organism Value: A. thaliana
  misc_feature: MA Experiment 20001911 PARAMETER Experiment Name: At_Drought_Reproduction_P Parameter: Plant Line Value: WS
  misc_feature: MA Experiment 20001911 PARAMETER Experiment Name: At_Drought_Reproduction_P Parameter: Timepoint (day) Value: 10
  misc_feature: MA Experiment 20001911 PARAMETER Experiment Name: At_Drought_Reproduction_P Parameter: Tissue Value: Flowers
  misc_feature: MA Experiment 20001911 PARAMETER Experiment Name: At_Drought_Reproduction_P Parameter: Treatment Value: Drought vs. No Drought
aattctaaattaagaatctctctaatctcttcccaaagaagaatcatcactgaggaagaataaaacatttggggagtttcttcgctaatccttcaaggtgtgacctgagaatcacaacacaaaacaatctcactcgaaattcctttgactcatcatcatcaccatgtggagaagaatcgtctcctctcagctcaaaaccctagccgccgatgtcgtcgctgcttctcctcgtcgatcgatagccgccaccaccagacctgtcggtttctatctcgccgccaatcgatcagccatttccgcatcttctttcgttatccctcgtcgtttcagctccgattcagtagagactcctgcgacgaagaaggtggaggatgtaatgcccattgcgactggacacgagaaggaagagcttgaagctgaacttgagggaaggaggctggatgatattgacttccctgaaggtccttttggaactaaggaagctcctgctattgtgaagtcctactatgacaagcgaattgtgggctgccctggtggtgaaggcgaggacgagcacgatgttgtctggttctggctggagaaaggaaagtcctttgaatgcccggtttgcactcagtactttgagctggaagtggttggtcctggtggtcctccggatggtcacggtgacgaagacgatgagcaccaccactgattccggcctctcccttgccgcaaatttttctttttttatttgcacattttcatatctttaaaaattttatgaatggaataaaacaaaatatctaccgttttggtgaaacacagttgaaaatgttttttgatctttttagaacaagactcggcatcagagtttcccaagtgccaaaactcttatgaccgttgtttttatttttgtaacactcttgaatcagaatcagaatcattcttggcttttgcttattatatgattcaccttttatttatttttatggttcgatgtcttttcatatagggacgttttgatcgtgtccttgattccttgtgaacggtcatataattcaatagattatagaaattccaattttcg

SEQ ID NO: 22693 - protein, 176 aa, Arabidopsis thaliana
  peptide (1)..(176): Ceres Seq. ID no. 12335512
  misc_feature (66)..(161): Pfam Name: Cytochrome c oxidase subunit Vb Pfam Description: Cytochrome c oxidase subunit Vb
  misc_feature (75)..(155): Homolog of NCBI NO: 17017988 NR Description: cytochrome c oxidase subunit Vb precursor [Homo
  misc_feature (75)..(155): Homolog of NCBI NO: 117102 NR Description: CYTOCHROME C OXIDASE POLYPEPTIDE VB (VI)
  misc_feature (75)..(155): Homolog of NCBI NO: 223590 NR Description: oxidase IV,cytochrome
  misc_feature (1)..(114): Homolog of NCBI NO: 7484634 NR Description: probable cytochrome-c oxidase (EC 1.9.3.1) Vb
  misc_feature (128)..(175): Homolog of NCBI NO: 5903035 NR Description: Similar to gb|D85381 cytochrome c oxidase subunit precursor from Oryza sativa. ESTs gb|R30504 and gb|AA598195 come
  misc_feature (1)..(176): Homolog of NCBI NO: 34912592 NR Description: cytochrome c oxidase subunit Vb precursor
  misc_feature (38)..(176): Homolog of NCBI NO: 5803264 NR Description: ESTs AU057456(S21460),AU057455(S21460) correspond a region of the predicted gene.~Similar to cytochrome c oxidase
  misc_feature (1)..(175): Homolog of NCBI NO: 15220092 NR Description: cytochrome c oxidase subunit, putative
  misc_feature (1)..(175): Homolog of NCBI NO: 21592567 NR Description: cytochrome c oxidase subunit, putative
  misc_feature (1)..(176): Homolog of NCBI NO: 15232644 NR Description: putative cytochrome c oxidase subunit Vb
MWRRIVSSQLKTLAADVVAASPRRSIAATTRPVGFYLAANRSAISASSFVIPRRFSSDSVETPATKKVEDVMPIATGHEKEELEAELEGRRLDDIDFPEGPFGTKEAPAIVKSYYDKRIVGCPGGEGEDEHDVVWFWLEKGKSFECPVCTQYFELEVVGPGGPPDGHGDEDDEHHH

SEQ ID NO: 22694 - protein, 105 aa, Arabidopsis thaliana
  peptide (1)..(105): Ceres Seq. ID no. 12335513
  misc_feature (1)..(90): Pfam Name: Cytochrome c oxidase subunit Vb Pfam Description: Cytochrome c oxidase subunit Vb
  misc_feature (4)..(84): Homolog of NCBI NO: 17017988 NR Description: cytochrome c oxidase subunit Vb precursor [Homo
  misc_feature (4)..(84): Homolog of NCBI NO: 117102 NR Description: CYTOCHROME C OXIDASE POLYPEPTIDE VB (VI)
  misc_feature (4)..(84): Homolog of NCBI NO: 223590 NR Description: oxidase IV,cytochrome
  misc_feature (1)..(43): Homolog of NCBI NO: 7484634 NR Description: probable cytochrome-c oxidase (EC 1.9.3.1) Vb
  misc_feature (57)..(104): Homolog of NCBI NO: 5903035 NR Description: Similar to gb|D85381 cytochrome c oxidase subunit precursor from Oryza sativa. ESTs gb|R30504 and gb|AA598195 come
  misc_feature (1)..(105): Homolog of NCBI NO: 34912592 NR Description: cytochrome c oxidase subunit Vb precursor
  misc_feature (1)..(105): Homolog of NCBI NO: 5803264 NR Description: ESTs AU057456(S21460),AU057455(S21460) correspond a region of the predicted gene.~Similar to cytochrome c oxidase
  misc_feature (1)..(104): Homolog of NCBI NO: 15220092 NR Description: cytochrome c oxidase subunit, putative
  misc_feature (1)..(104): Homolog of NCBI NO: 21592567 NR Description: cytochrome c oxidase subunit, putative
  misc_feature (1)..(105): Homolog of NCBI NO: 15232644 NR Description: putative cytochrome c oxidase subunit Vb
MPIATGHEKEELEAELEGRRLDDIDFPEGPFGTKEAPAIVKSYYDKRIVGCPGGEGEDEHDVVWFWLEKGKSFECPVCTQYFELEVVGPGGPPDGHGDEDDEHHH

SEQ ID NO: 22695 - DNA, 983 bp, Arabidopsis thaliana
  misc_feature (1)..(983): Ceres Seq. ID no. 12338048
  misc_feature: MA Experiment ID: 20000166 Result: Up-regulated in Transcription
  misc_feature: MA Experiment 20000166 PARAMETER Experiment Name: At_100uM_ABA_P Parameter: Age (day) Value: 14
  misc_feature: MA Experiment 20000166 PARAMETER Experiment Name: At_100uM_ABA_P Parameter: Organism Value: A. thaliana
  misc_feature: MA Experiment 20000166 PARAMETER Experiment Name: At_100uM_ABA_P Parameter: Plant Line Value: WS
  misc_feature: MA Experiment 20000166 PARAMETER Experiment Name: At_100uM_ABA_P Parameter: Timepoint (hr) Value: 1
  misc_feature: MA Experiment 20000166 PARAMETER Experiment Name: At_100uM_ABA_P Parameter: Tissue Value: Aerial
  misc_feature: MA Experiment 20000166 PARAMETER Experiment Name: At_100uM_ABA_P Parameter: Treatment Value: 100uM ABA vs. No Treatment
  misc_feature: MA Experiment ID: 20000169 Result: Up-regulated in Transcription
  misc_feature: MA Experiment 20000169 PARAMETER Experiment Name: At_100uM_ABA_P Parameter: Age (day) Value: 14
  misc_feature: MA Experiment 20000169 PARAMETER Experiment Name: At_100uM_ABA_P Parameter: Organism Value: A. thaliana
  misc_feature: MA Experiment 20000169 PARAMETER Experiment Name: At_100uM_ABA_P Parameter: Plant Line Value: WS
  misc_feature: MA Experiment 20000169 PARAMETER Experiment Name: At_100uM_ABA_P Parameter: Timepoint (hr) Value: 6
  misc_feature: MA Experiment 20000169 PARAMETER Experiment Name: At_100uM_ABA_P Parameter: Tissue Value: Aerial
  misc_feature: MA Experiment 20000169 PARAMETER Experiment Name: At_100uM_ABA_P Parameter: Treatment Value: 100uM ABA vs. No Treatment
  misc_feature: MA Experiment ID: 20000179 Result: Up-regulated in Transcription
  misc_feature: MA Experiment 20000179 PARAMETER Experiment Name: At_Germinating_Seeds_P Parameter: Age (hr) Value: 6 vs. 0
  misc_feature: MA Experiment 20000179 PARAMETER Experiment Name: At_Germinating_Seeds_P Parameter: Tissue Value: Germinating Seeds
  misc_feature: MA Experiment ID: 20000184 Result: Down-regulated in Transcription
  misc_feature: MA Experiment 20000184 PARAMETER Experiment Name: At_Shoots__P Parameter: Age (day) Value: 7
  misc_feature: MA Experiment 20000184 PARAMETER Experiment Name: At_Shoots__P Parameter: Tissue Value: Shoots vs. Whole Plant
  misc_feature: MA Experiment ID: 20000185 Result: Down-regulated in Transcription
  misc_feature: MA Experiment 20000185 PARAMETER Experiment Name: At_Roots__P Parameter: Age (day) Value: 7 vs. 21
  misc_feature: MA Experiment 20000185 PARAMETER Experiment Name: At_Roots__P Parameter: Organism Value: A. thaliana
  misc_feature: MA Experiment 20000185 PARAMETER Experiment Name: At_Roots__P Parameter: Tissue Value: Roots vs. Whole Plant
  misc_feature: MA Experiment ID: 20000213 Result: Up-regulated in Transcription
  misc_feature: MA Experiment 20000213 PARAMETER Experiment Name: At_4deg_Cold_P Parameter: Timepoint (hr) Value: 2
  misc_feature: MA Experiment ID: 20000265 Result: Down-regulated in Transcription
  misc_feature: MA Experiment 20000265 PARAMETER Experiment Name: At_Open_Flower_P Parameter: Age (day) Value: 21
  misc_feature: MA Experiment 20000265 PARAMETER Experiment Name: At_Open_Flower_P Parameter: Plant Line Value: WS
  misc_feature: MA Experiment 20000265 PARAMETER Experiment Name: At_Open_Flower_P Parameter: Tissue Value: Closed Flower vs. Whole Plant
  misc_feature: MA Experiment ID: 20000268 Result: Down-regulated in Transcription
  misc_feature: MA Experiment 20000268 PARAMETER Experiment Name: At_100mM_NaCl__P Parameter: Age (day) Value: 14
  misc_feature: MA Experiment 20000268 PARAMETER Experiment Name: At_100mM_NaCl__P Parameter: Organism Value: A. thaliana
  misc_feature: MA Experiment 20000268 PARAMETER Experiment Name: At_100mM_NaCl__P Parameter: Plant Line Value: WS
  misc_feature: MA Experiment 20000268 PARAMETER Experiment Name: At_100mM_NaCl__P Parameter: Timepoint (hr) Value: 6
  misc_feature: MA Experiment 20000268 PARAMETER Experiment Name: At_100mM_NaCl__P Parameter: Tissue Value: Whole Plant
  misc_feature: MA Experiment 20000268 PARAMETER Experiment Name: At_100mM_NaCl__P Parameter: Treatment Value: 100mM NaCl vs. No Treatment
  misc_feature: MA Experiment ID: 20000437 Result: Up-regulated in Transcription
  misc_feature: MA Experiment 20000437 PARAMETER Experiment Name: At_Drought_P Parameter: Age (day) Value: 8
  misc_feature: MA Experiment 20000437 PARAMETER Experiment Name: At_Drought_P Parameter: Organism Value: A. thaliana
  misc_feature: MA Experiment 20000437 PARAMETER Experiment Name: At_Drought_P Parameter: Plant Line Value: WS
  misc_feature: MA Experiment 20000437 PARAMETER Experiment Name: At_Drought_P Parameter: Timepoint (hr) Value: 24
  misc_feature: MA Experiment 20000437 PARAMETER Experiment Name: At_Drought_P Parameter: Tissue Value: Whole Plant
  misc_feature: MA Experiment 20000437 PARAMETER Experiment Name: At_Drought_P Parameter: Treatment Value: Drought vs. No Drought
  misc_feature: MA Experiment ID: 20000438 Result: Down-regulated in Transcription
  misc_feature: MA Experiment 20000438 PARAMETER Experiment Name: At_Shoots__P Parameter: Age (day) Value: 14
  misc_feature: MA Experiment 20000438 PARAMETER Experiment Name: At_Shoots__P Parameter: Tissue Value: Shoots vs. Whole Plant
  misc_feature: MA Experiment ID: 20000439 Result: Down-regulated in Transcription
  misc_feature: MA Experiment 20000439 PARAMETER Experiment Name: At_Roots__P Parameter: Age (day) Value: 14 vs. 21
  misc_feature: MA Experiment 20000439 PARAMETER Experiment Name: At_Roots__P Parameter: Organism Value: A. thaliana
  misc_feature: MA Experiment 20000439 PARAMETER Experiment Name: At_Roots__P Parameter: Tissue Value: Roots vs. Whole Plant
  misc_feature: MA Experiment ID: 20000453 Result: Up-regulated in Transcription
  misc_feature: MA Experiment 20000453 PARAMETER Experiment Name: At_100uM_ABA_P Parameter: Age (day) Value: 15
  misc_feature: MA Experiment 20000453 PARAMETER Experiment Name: At_100uM_ABA_P Parameter: Organism Value: A. thaliana
  misc_feature: MA Experiment 20000453 PARAMETER Experiment Name: At_100uM_ABA_P Parameter: Plant Line Value: WS
  misc_feature: MA Experiment 20000453 PARAMETER Experiment Name: At_100uM_ABA_P Parameter: Timepoint (hr) Value: 24
  misc_feature: MA Experiment 20000453 PARAMETER Experiment Name: At_100uM_ABA_P Parameter: Tissue Value: Aerial
  misc_feature: MA Experiment 20000453 PARAMETER Experiment Name: At_100uM_ABA_P Parameter: Treatment Value: 100uM ABA vs. No Treatment
  misc_feature: MA Experiment ID: 20000460 Result: Up-regulated in Transcription
  misc_feature: MA Experiment 20000460 PARAMETER Experiment Name: At_10percent_PEG_P Parameter: Age (day) Value: 12
  misc_feature: MA Experiment 20000460 PARAMETER Experiment Name: At_10percent_PEG_P Parameter: Organism Value: A. thaliana
  misc_feature: MA Experiment 20000460 PARAMETER Experiment Name: At_10percent_PEG_P Parameter: Plant Line Value: WS
  misc_feature: MA Experiment 20000460 PARAMETER Experiment Name: At_10percent_PEG_P Parameter: Timepoint (day) Value: 12
  misc_feature: MA Experiment 20000460 PARAMETER Experiment Name: At_10percent_PEG_P Parameter: Tissue Value: Whole Plant
  misc_feature: MA Experiment 20000460 PARAMETER Experiment Name: At_10percent_PEG_P Parameter: Treatment Value: 10percent PEG vs. No Treatment
  misc_feature: MA Experiment ID: 20000495 Result: Down-regulated in Transcription
  misc_feature: MA Experiment 20000495 PARAMETER Experiment Name: At_Guard_Cells_P Parameter: Harvest Date Value: 8/2/2002
  misc_feature: MA Experiment 20000495 PARAMETER Experiment Name: At_Guard_Cells_P Parameter: Organism Value: A. thaliana
  misc_feature: MA Experiment 20000495 PARAMETER Experiment Name: At_Guard_Cells_P Parameter: Tissue Value: Guard Cells vs. Leaves
  misc_feature: MA Experiment ID: 20000527 Result: Up-regulated in Transcription
  misc_feature: MA Experiment 20000527 PARAMETER Experiment Name: At_10percent_PEG_P Parameter: Age (day) Value: 20
  misc_feature: MA Experiment 20000527 PARAMETER Experiment Name: At_10percent_PEG_P Parameter: Organism Value: A. thaliana
  misc_feature: MA Experiment 20000527 PARAMETER Experiment Name: At_10percent_PEG_P Parameter: Plant Line Value: WS
  misc_feature: MA Experiment 20000527 PARAMETER Experiment Name: At_10percent_PEG_P Parameter: Timepoint (day) Value: 20
  misc_feature: MA Experiment 20000527 PARAMETER Experiment Name: At_10percent_PEG_P Parameter: Tissue Value: Whole Plant
  misc_feature: MA Experiment 20000527 PARAMETER Experiment Name: At_10percent_PEG_P Parameter: Treatment Value: 10percent PEG vs. No Treatment
  misc_feature: MA Experiment ID: 20000794 Result: Up-regulated in Transcription
  misc_feature: MA Experiment 20000794 PARAMETER Experiment Name: At_Petals_P Parameter: Age (day) Value: 23-25 days
  misc_feature: MA Experiment 20000794 PARAMETER Experiment Name: At_Petals_P Parameter: Plant Line Value: WS
  misc_feature: MA Experiment 20000794 PARAMETER Experiment Name: At_Petals_P Parameter: Tissue Value: Petals vs. Whole plant
  misc_feature: MA Experiment ID: 20001248 Result: Up-regulated in Transcription
  misc_feature: MA Experiment 20001248 PARAMETER Experiment Name: At_Far-red-induction_P Parameter: Age (day) Value: 7
  misc_feature: MA Experiment 20001248 PARAMETER Experiment Name: At_Far-red-induction_P Parameter: Light Value: Far-red vs. White
  misc_feature: MA Experiment 20001248 PARAMETER Experiment Name: At_Far-red-induction_P Parameter: Organism Value: A. thaliana
  misc_feature: MA Experiment 20001248 PARAMETER Experiment Name: At_Far-red-induction_P Parameter: Plant Line Value: Columbia
  misc_feature: MA Experiment 20001248 PARAMETER Experiment Name: At_Far-red-induction_P Parameter: Timepoint (hr) Value: 4
  misc_feature: MA Experiment 20001248 PARAMETER Experiment Name: At_Far-red-induction_P Parameter: Tissue Value: Whole Plant
  misc_feature: MA Experiment ID: 20001450 Result: Up-regulated in Transcription
  misc_feature: MA Experiment 20001450 PARAMETER Experiment Name: At_Far-red-induction_P Parameter: Age (day) Value: 7
  misc_feature: MA Experiment 20001450 PARAMETER Experiment Name: At_Far-red-induction_P Parameter: Light Value: Far-red vs. White
  misc_feature: MA Experiment 20001450 PARAMETER Experiment Name: At_Far-red-induction_P Parameter: Organism Value: A. thaliana
  misc_feature: MA Experiment 20001450 PARAMETER Experiment Name: At_Far-red-induction_P Parameter: Plant Line Value: Columbia
  misc_feature: MA Experiment 20001450 PARAMETER Experiment Name: At_Far-red-induction_P Parameter: Timepoint (hr) Value: 8
  misc_feature: MA Experiment 20001450 PARAMETER Experiment Name: At_Far-red-induction_P Parameter: Tissue Value: Whole Plant
  misc_feature: MA Experiment ID: 20001554 Result: Down-regulated in Transcription
  misc_feature: MA Experiment 20001554 PARAMETER Experiment Name: At_Drought_Soil_Dry_P Parameter: Age (day) Value: 21
  misc_feature: MA Experiment 20001554 PARAMETER Experiment Name: At_Drought_Soil_Dry_P Parameter: Organism Value: A. thaliana
  misc_feature: MA Experiment 20001554 PARAMETER Experiment Name: At_Drought_Soil_Dry_P Parameter: Plant Line Value: WS
  misc_feature: MA Experiment 20001554 PARAMETER Experiment Name: At_Drought_Soil_Dry_P Parameter: Post Timepoint (hr) Value: None
  misc_feature: MA Experiment 20001554 PARAMETER Experiment Name: At_Drought_Soil_Dry_P Parameter: Post-Treatment Value: None
  misc_feature: MA Experiment 20001554 PARAMETER Experiment Name: At_Drought_Soil_Dry_P Parameter: Timepoint (day) Value: 7
  misc_feature: MA Experiment 20001554 PARAMETER Experiment Name: At_Drought_Soil_Dry_P Parameter: Treatment Value: Drought vs. No Drought
  misc_feature: MA Experiment ID: 20001555 Result: Down-regulated in Transcription
  misc_feature: MA Experiment 20001555 PARAMETER Experiment Name: At_Drought_Soil_Dry_P Parameter: Age (day) Value: 24
  misc_feature: MA Experiment 20001555 PARAMETER Experiment Name: At_Drought_Soil_Dry_P Parameter: Organism Value: A. thaliana
  misc_feature: MA Experiment 20001555 PARAMETER Experiment Name: At_Drought_Soil_Dry_P Parameter: Plant Line Value: WS
  misc_feature: MA Experiment 20001555 PARAMETER Experiment Name: At_Drought_Soil_Dry_P Parameter: Post Timepoint (hr) Value: None
  misc_feature: MA Experiment 20001555 PARAMETER Experiment Name: At_Drought_Soil_Dry_P Parameter: Post-Treatment Value: None
  misc_feature: MA Experiment 20001555 PARAMETER Experiment Name: At_Drought_Soil_Dry_P Parameter: Timepoint (day) Value: 10
  misc_feature: MA Experiment 20001555 PARAMETER Experiment Name: At_Drought_Soil_Dry_P Parameter: Treatment Value: Drought vs. No Drought
  misc_feature: MA Experiment ID: 20001556 Result: Down-regulated in Transcription
  misc_feature: MA Experiment 20001556 PARAMETER Experiment Name: At_Drought_Soil_Dry_P Parameter: Age (day) Value: 26
  misc_feature: MA Experiment 20001556 PARAMETER Experiment Name: At_Drought_Soil_Dry_P Parameter: Organism Value: A. thaliana
  misc_feature: MA Experiment 20001556 PARAMETER Experiment Name: At_Drought_Soil_Dry_P Parameter: Plant Line Value: WS
  misc_feature: MA Experiment 20001556 PARAMETER Experiment Name: At_Drought_Soil_Dry_P Parameter: Post Timepoint (hr) Value: None
  misc_feature: MA Experiment 20001556 PARAMETER Experiment Name: At_Drought_Soil_Dry_P Parameter: Post-Treatment Value: None
  misc_feature: MA Experiment 20001556 PARAMETER Experiment Name: At_Drought_Soil_Dry_P Parameter: Timepoint (day) Value: 12
  misc_feature: MA Experiment 20001556 PARAMETER Experiment Name: At_Drought_Soil_Dry_P Parameter: Treatment Value: Drought vs. No Drought
  misc_feature: MA Experiment ID: 20001557 Result: Up-regulated in Transcription
  misc_feature: MA Experiment 20001557 PARAMETER Experiment Name: At_Drought_Soil_Dry_P Parameter: Age (day) Value: 27
  misc_feature: MA Experiment 20001557 PARAMETER Experiment Name: At_Drought_Soil_Dry_P Parameter: Organism Value: A. thaliana
  misc_feature: MA Experiment 20001557 PARAMETER Experiment Name: At_Drought_Soil_Dry_P Parameter: Plant Line Value: WS
  misc_feature: MA Experiment 20001557 PARAMETER Experiment Name: At_Drought_Soil_Dry_P Parameter: Post Timepoint (hr) Value: 3
  misc_feature: MA Experiment 20001557 PARAMETER Experiment Name: At_Drought_Soil_Dry_P Parameter: Post-Treatment Value: Re-Water vs. No Drought
  misc_feature: MA Experiment 20001557 PARAMETER Experiment Name: At_Drought_Soil_Dry_P Parameter: Timepoint (day) Value: 13
  misc_feature: MA Experiment 20001557 PARAMETER Experiment Name: At_Drought_Soil_Dry_P Parameter: Treatment Value: Drought vs. No Drought
  misc_feature: MA Experiment ID: 20001558 Result: Up-regulated in Transcription
  misc_feature: MA Experiment 20001558 PARAMETER Experiment Name: At_Drought_Soil_Dry_P Parameter: Age (day) Value: 27
  misc_feature: MA Experiment 20001558 PARAMETER Experiment Name: At_Drought_Soil_Dry_P Parameter: Organism Value: A. thaliana
  misc_feature: MA Experiment 20001558 PARAMETER Experiment Name: At_Drought_Soil_Dry_P Parameter: Plant Line Value: WS
  misc_feature: MA Experiment 20001558 PARAMETER Experiment Name: At_Drought_Soil_Dry_P Parameter: Post Timepoint (hr) Value: 6
  misc_feature: MA Experiment 20001558 PARAMETER Experiment Name: At_Drought_Soil_Dry_P Parameter: Post-Treatment Value: Re-Water vs. No Drought
  misc_feature: MA Experiment 20001558 PARAMETER Experiment Name: At_Drought_Soil_Dry_P Parameter: Timepoint (day) Value: 13
  misc_feature: MA Experiment 20001558 PARAMETER Experiment Name: At_Drought_Soil_Dry_P Parameter: Treatment Value: Drought vs. No Drought
  misc_feature: MA Experiment ID: 20001560 Result: Up-regulated in Transcription
  misc_feature: MA Experiment 20001560 PARAMETER Experiment Name: At_Drought_Soil_Dry_P Parameter: Age (day) Value: 28
  misc_feature: MA Experiment 20001560 PARAMETER Experiment Name: At_Drought_Soil_Dry_P Parameter: Organism Value: A. thaliana
  misc_feature: MA Experiment 20001560 PARAMETER Experiment Name: At_Drought_Soil_Dry_P Parameter: Plant Line Value: WS
  misc_feature: MA Experiment 20001560 PARAMETER Experiment Name: At_Drought_Soil_Dry_P Parameter: Post Timepoint (hr) Value: None
  misc_feature: MA Experiment 20001560 PARAMETER Experiment Name: At_Drought_Soil_Dry_P Parameter: Post-Treatment Value: None
  misc_feature: MA Experiment 20001560 PARAMETER Experiment Name: At_Drought_Soil_Dry_P Parameter: Timepoint (day) Value: 14
  misc_feature: MA Experiment 20001560 PARAMETER Experiment Name: At_Drought_Soil_Dry_P Parameter: Treatment Value: Drought vs. No Drought
  misc_feature: MA Experiment ID: 20001772 Result: Up-regulated in Transcription
  misc_feature: MA Experiment 20001772 PARAMETER Experiment Name: At_Far-red-enriched-adult_P Parameter: Age (day) Value: 29
  misc_feature: MA Experiment 20001772 PARAMETER Experiment Name: At_Far-red-enriched-adult_P Parameter: Light Value: Far-red enriched vs. White
  misc_feature: MA Experiment 20001772 PARAMETER Experiment Name: At_Far-red-enriched-adult_P Parameter: Organism Value: A. thaliana
  misc_feature: MA Experiment 20001772 PARAMETER Experiment Name: At_Far-red-enriched-adult_P Parameter: Plant Line Value: Columbia
  misc_feature: MA Experiment 20001772 PARAMETER Experiment Name: At_Far-red-enriched-adult_P Parameter: Timepoint (hr) Value: 24
  misc_feature: MA Experiment 20001772 PARAMETER Experiment Name: At_Far-red-enriched-adult_P Parameter: Tissue Value: Aerial
acatgtaaattcacatatctctctctcttatttgatcataaagatattattgcttcttcaagtaaacaaaaaatgggaagctttctctacctcatcgtagtcatcttcctcttctcttcatccgttaacgcttgtgatcgatgtcttcaccgttctaaagcagcttatttctcctctgcctctgctctctcttctggagcttgtgcttatggctctatggctacgagtttcttcgccggacatatcgctgcagctatcccttctatctacaaagacggtgctggctgtggagcttgctttcaattcagatgcaagaaccctaagctgtgtagcactaaaggaaccattgtgatgatcacagacttaaacaagagtaaccaaaccgatcttgtccttagtagcagagcttttagagctatggctaaacctattgttggtgctgacaaagaccttctcaaacaaggcattgtcgacatcgaataccaaagagttccttgcgattacggcaacaagaacatgaacgtgagcgtagaagaagcaagcaagaaaccaaactacttagagataaagcttttataccaaggaggtcaaacagaagtagtatccatcgacattgctcaagtcggttcatcgccaaattggggttacatgacaagaagccacggagctgtttgggtaactgacaaagtacccaccggagctatccagttcaggttcgtagtaaccggtggatacgacggtaaaatgatttggtcacagagtgttcttccatccaattgggaagctgggaaaatttacgacgccggtgttcaaatcactgacattgctcaagaaggttgtgatccttgcgatgctcacatctggaactaagttatttagtggcacacaaacaaacatctttcataggtttatatataatgtgtgacagaggttattaatgaacatagttaaagaatgcttaatctaatgattctcatgattct

SEQ ID NO: 22696 - protein, 289 aa, Arabidopsis thaliana
  peptide (1)..(289): Ceres Seq. ID no. 12338049
  misc_feature (173)..(257): Pfam Name: Pollen allergen Pfam Description: Pollen allergen
  misc_feature (27)..(288): Homolog of NCBI NO: 34901594 NR Description: P0571D04.11 [Oryza sativa (japonica
  misc_feature (29)..(288): Homolog of NCBI NO: 20502989 NR Description: Putative pollen allergen [Oryza sativa (japonica
  misc_feature (29)..(288): Homolog of NCBI NO: 21654743 NR Description: expansin-like protein 1 [Oryza sativa]
  misc_feature (21)..(288): Homolog of NCBI NO: 37536544 NR Description: putative pollen allergen [Oryza sativa (japonica
  misc_feature (27)..(288): Homolog of NCBI NO: 33111959 NR Description: expansin-like protein [Quercus robur]
  misc_feature (73)..(289): Homolog of NCBI NO: 30692657 NR Description: expansin protein family (EXPL3) [Arabidopsis
  misc_feature (28)..(289): Homolog of NCBI NO: 15233841 NR Description: putative pollen allergen
  misc_feature (25)..(289): Homolog of NCBI NO: 20138389 NR Description: Expansin-like 3 precursor (At-EXPL3)
  misc_feature (25)..(289): Homolog of NCBI NO: 15231303 NR Description: putative protein
  misc_feature (25)..(289): Homolog of NCBI NO: 21555265 NR Description: Expansin-like 1 precursor (At-EXPL1)
TCKFTYLSLLFDHKDIIASSSKQKMGSFLYLIVVIFLFSSSVNACDRCLHRSKAAYFSSASALSSGACAYGSMATSFFAGHIAAAIPSIYKDGAGCGACFQFRCKNPKLCSTKGTIVMITDLNKSNQTDLVLSSRAFRAMAKPIVGADKDLLKQGIVDIEYQRVPCDYGNKNMNVSVEEASKKPNYLEIKLLYQGGQTEVVSIDIAQVGSSPNWGYMTRSHGAVWVTDKVPTGAIQFRFVVTGGYDGKMIWSQSVLPSNWEAGKIYDAGVQITDIAQEGCDPCDAHIWN

SEQ ID NO: 22697 - protein, 265 aa, Arabidopsis thaliana
  peptide (1)..(265): Ceres Seq. ID no. 12338050
  misc_feature (149)..(233): Pfam Name: Pollen allergen Pfam Description: Pollen allergen
  misc_feature (3)..(264): Homolog of NCBI NO: 34901594 NR Description: P0571D04.11 [Oryza sativa (japonica
  misc_feature (5)..(264): Homolog of NCBI NO: 20502989 NR Description: Putative pollen allergen [Oryza sativa (japonica
  misc_feature (5)..(264): Homolog of NCBI NO: 21654743 NR Description: expansin-like protein 1 [Oryza sativa]
  misc_feature (1)..(264): Homolog of NCBI NO: 37536544 NR Description: putative pollen allergen [Oryza sativa (japonica
  misc_feature (3)..(264): Homolog of NCBI NO: 33111959 NR Description: expansin-like protein [Quercus robur]
  misc_feature (49)..(265): Homolog of NCBI NO: 30692657 NR Description: expansin protein family (EXPL3) [Arabidopsis
  misc_feature (4)..(265): Homolog of NCBI NO: 15233841 NR Description: putative pollen allergen
  misc_feature (1)..(265): Homolog of NCBI NO: 20138389 NR Description: Expansin-like 3 precursor (At-EXPL3)
  misc_feature (1)..(265): Homolog of NCBI NO: 15231303 NR Description: putative protein
  misc_feature (1)..(265): Homolog of NCBI NO: 21555265 NR Description: Expansin-like 1 precursor (At-EXPL1)
MGSFLYLIVVIFLFSSSVNACDRCLHRSKAAYFSSASALSSGACAYGSMATSFFAGHIAAAIPSIYKDGAGCGACFQFRCKNPKLCSTKGTIVMITDLNKSNQTDLVLSSRAFRAMAKPIVGADKDLLKQGIVDIEYQRVPCDYGNKNMNVSVEEASKKPNYLEIKLLYQGGQTEVVSIDIAQVGSSPNWGYMTRSHGAVWVTDKVPTGAIQFRFVVTGGYDGKMIWSQSVLPSNWEAGKIYDAGVQITDIAQEGCDPCDAHIWN

SEQ ID NO: 22698 - protein, 217 aa, Arabidopsis thaliana
  peptide (1)..(217): Ceres Seq. ID no. 12338051
  misc_feature (101)..(185): Pfam Name: Pollen allergen Pfam Description: Pollen allergen
  misc_feature (1)..(217): Homolog of NCBI NO: 15231303 NR Description: putative protein
  misc_feature (1)..(216): Homolog of NCBI NO: 34901594 NR Description: P0571D04.11 [Oryza sativa (japonica
  misc_feature (1)..(216): Homolog of NCBI NO: 21654743 NR Description: expansin-like protein 1 [Oryza sativa]
  misc_feature (1)..(216): Homolog of NCBI NO: 33111959 NR Description: expansin-like protein [Quercus robur]
  misc_feature (1)..(217): Homolog of NCBI NO: 15233841 NR Description: putative pollen allergen
  misc_feature (1)..(217): Homolog of NCBI NO: 20138389 NR Description: Expansin-like 3 precursor (At-EXPL3)
  misc_feature (1)..(217): Homolog of NCBI NO: 30692657 NR Description: expansin protein family (EXPL3) [Arabidopsis
  misc_feature (1)..(216): Homolog of NCBI NO: 37536544 NR Description: putative pollen allergen [Oryza sativa (japonica
  misc_feature (1)..(216): Homolog of NCBI NO: 20502989 NR Description: Putative pollen allergen [Oryza sativa (japonica
  misc_feature (1)..(217): Homolog of NCBI NO: 21555265 NR Description: Expansin-like 1 precursor (At-EXPL1)
MATSFFAGHIAAAIPSIYKDGAGCGACFQFRCKNPKLCSTKGTIVMITDLNKSNQTDLVLSSRAFRAMAKPIVGADKDLLKQGIVDIEYQRVPCDYGNKNMNVSVEEASKKPNYLEIKLLYQGGQTEVVSIDIAQVGSSPNWGYMTRSHGAVWVTDKVPTGAIQFRFVVTGGYDGKMIWSQSVLPSNWEAGKIYDAGVQITDIAQEGCDPCDAHIWN

SEQ ID NO: 22699 - DNA, 1162 bp, Arabidopsis thaliana
  misc_feature (1)..(1162): Ceres Seq. ID no. 12684881
  misc_feature: MA Experiment ID: 108434 Result: Up-regulated in Transcription
  misc_feature: MA Experiment 108434 PARAMETER Experiment Name: At_Root_Tips_cDNA_P Parameter: Tissue Value: Root Tips
  misc_feature: MA Experiment ID: 20000071 Result: Down-regulated in Transcription
  misc_feature: MA Experiment 20000071 PARAMETER Experiment Name: At_100uM_ABA_Mutants_cDNA_P Parameter: Plant Line Value: CS8104
  misc_feature: MA Experiment 20000071 PARAMETER Experiment Name: At_100uM_ABA_Mutants_cDNA_P Parameter: Timepoint (hr) Value: 6
  misc_feature: MA Experiment 20000071 PARAMETER Experiment Name: At_100uM_ABA_Mutants_cDNA_P Parameter: Tissue Value: Aerial
  misc_feature: MA Experiment 20000071 PARAMETER Experiment Name: At_100uM_ABA_Mutants_cDNA_P Parameter: Treatment Value: 100uM ABA vs. No Treatment
  misc_feature: MA Experiment ID: 20000072 Result: Down-regulated in Transcription
  misc_feature: MA Experiment 20000072 PARAMETER Experiment Name: At_100uM_ABA_Mutants_cDNA_P Parameter: Plant Line Value: CS8105
  misc_feature: MA Experiment 20000072 PARAMETER Experiment Name: At_100uM_ABA_Mutants_cDNA_P Parameter: Timepoint (hr) Value: 6
  misc_feature: MA Experiment 20000072 PARAMETER Experiment Name: At_100uM_ABA_Mutants_cDNA_P Parameter: Tissue Value: Aerial
  misc_feature: MA Experiment 20000072 PARAMETER Experiment Name: At_100uM_ABA_Mutants_cDNA_P Parameter: Treatment Value: 100uM ABA vs. No Treatment
  misc_feature: MA Experiment ID: 20000086 Result: Down-regulated in Transcription
  misc_feature: MA Experiment 20000086 PARAMETER Experiment Name: At_100uM_ABA_Mutants_cDNA_P Parameter: Plant Line Value: CS22
  misc_feature: MA Experiment 20000086 PARAMETER Experiment Name: At_100uM_ABA_Mutants_cDNA_P Parameter: Timepoint (hr) Value: 6
  misc_feature: MA Experiment 20000086 PARAMETER Experiment Name: At_100uM_ABA_Mutants_cDNA_P Parameter: Tissue Value: Aerial
  misc_feature: MA Experiment 20000086 PARAMETER Experiment Name: At_100uM_ABA_Mutants_cDNA_P Parameter: Treatment Value: 100uM ABA vs. No Treatment
  misc_feature: MA Experiment ID: 20000087 Result: Down-regulated in Transcription
  misc_feature: MA Experiment 20000087 PARAMETER Experiment Name: At_100uM_ABA_Mutants_cDNA_P Parameter: Plant Line Value: WS
  misc_feature: MA Experiment 20000087 PARAMETER Experiment Name: At_100uM_ABA_Mutants_cDNA_P Parameter: Timepoint (hr) Value: 6
  misc_feature: MA Experiment 20000087 PARAMETER Experiment Name: At_100uM_ABA_Mutants_cDNA_P Parameter: Tissue Value: Aerial
  misc_feature: MA Experiment 20000087 PARAMETER Experiment Name: At_100uM_ABA_Mutants_cDNA_P Parameter: Treatment Value: 100uM ABA vs. No Treatment
  misc_feature: MA Experiment ID: 20000088 Result: Down-regulated in Transcription
  misc_feature: MA Experiment 20000088 PARAMETER Experiment Name: At_100uM_ABA_Mutants_cDNA_P Parameter: Plant Line Value: Landsberg
  misc_feature: MA Experiment 20000088 PARAMETER Experiment Name: At_100uM_ABA_Mutants_cDNA_P Parameter: Timepoint (hr) Value: 6
  misc_feature: MA Experiment 20000088 PARAMETER Experiment Name: At_100uM_ABA_Mutants_cDNA_P Parameter: Tissue Value: Aerial
  misc_feature: MA Experiment 20000088 PARAMETER Experiment Name: At_100uM_ABA_Mutants_cDNA_P Parameter: Treatment Value: 100uM ABA vs. No Treatment
  misc_feature: MA Experiment ID: 20000179 Result: Up-regulated in Transcription
  misc_feature: MA Experiment 20000179 PARAMETER Experiment Name: At_Germinating_Seeds_P Parameter: Age (hr) Value: 6 vs. 0
  misc_feature: MA Experiment 20000179 PARAMETER Experiment Name: At_Germinating_Seeds_P Parameter: Tissue Value: Germinating Seeds
  misc_feature: MA Experiment ID: 20000180 Result: Up-regulated in Transcription
  misc_feature: MA Experiment 20000180 PARAMETER Experiment Name: At_Germinating_Seeds_P Parameter: Age (hr) Value: 24 vs. 0
  misc_feature: MA Experiment 20000180 PARAMETER Experiment Name: At_Germinating_Seeds_P Parameter: Tissue Value: Germinating Seeds
  misc_feature: MA Experiment ID: 20000184 Result: Up-regulated in Transcription
  misc_feature: MA Experiment 20000184 PARAMETER Experiment Name: At_Shoots__P Parameter: Age (day) Value: 7
  misc_feature: MA Experiment 20000184 PARAMETER Experiment Name: At_Shoots__P Parameter: Tissue Value: Shoots vs. Whole Plant
  misc_feature: MA Experiment ID: 20000227 Result: Up-regulated in Transcription
  misc_feature: MA Experiment 20000227 PARAMETER Experiment Name: At_Root-Tips-vs-Tops_P Parameter: Tissue Value: Root Tips vs. Root Tops
  misc_feature: MA Experiment ID: 20000234 Result: Up-regulated in Transcription
  misc_feature: MA Experiment 20000234 PARAMETER Experiment Name: At_Siliques_P Parameter: Age (day) Value: 21
  misc_feature: MA Experiment 20000234 PARAMETER Experiment Name: At_Siliques_P Parameter: Organism Value: A. thaliana
  misc_feature: MA Experiment 20000234 PARAMETER Experiment Name: At_Siliques_P Parameter: Plant Line Value: WS
  misc_feature: MA Experiment 20000234 PARAMETER Experiment Name: At_Siliques_P Parameter: Tissue Value: Less Than 5mm Siliques vs. Whole Plant
  misc_feature: MA Experiment ID: 20000264 Result: Up-regulated in Transcription
  misc_feature: MA Experiment 20000264 PARAMETER Experiment Name: At_Open_Flower_P Parameter: Age (day) Value: 21
  misc_feature: MA Experiment 20000264 PARAMETER Experiment Name: At_Open_Flower_P Parameter: Plant Line Value: WS
  misc_feature: MA Experiment 20000264 PARAMETER Experiment Name: At_Open_Flower_P Parameter: Tissue Value: Open Flower vs. Whole Plant
  misc_feature: MA Experiment ID: 20000265 Result: Up-regulated in Transcription
  misc_feature: MA Experiment 20000265 PARAMETER Experiment Name: At_Open_Flower_P Parameter: Age (day) Value: 21
  misc_feature: MA Experiment 20000265 PARAMETER Experiment Name: At_Open_Flower_P Parameter: Plant Line Value: WS
  misc_feature: MA Experiment 20000265 PARAMETER Experiment Name: At_Open_Flower_P Parameter: Tissue Value: Closed Flower vs. Whole Plant
  misc_feature: MA Experiment ID: 20000286 Result: Up-regulated in Transcription
  misc_feature: MA Experiment 20000286 PARAMETER Experiment Name: At_Open_Flower_P Parameter: Age (day) Value: 21
  misc_feature: MA Experiment 20000286 PARAMETER Experiment Name: At_Open_Flower_P Parameter: Plant Line Value: WS
  misc_feature: MA Experiment 20000286 PARAMETER Experiment Name: At_Open_Flower_P Parameter: Tissue Value: Half Open vs. Whole Plant
  misc_feature: MA Experiment ID: 20000437 Result: Down-regulated in Transcription
  misc_feature: MA Experiment 20000437 PARAMETER Experiment Name: At_Drought_P Parameter: Age (day) Value: 8
  misc_feature: MA Experiment 20000437 PARAMETER Experiment Name: At_Drought_P Parameter: Organism Value: A. thaliana
  misc_feature: MA Experiment 20000437 PARAMETER Experiment Name: At_Drought_P Parameter: Plant Line Value: WS
  misc_feature: MA Experiment 20000437 PARAMETER Experiment Name: At_Drought_P Parameter: Timepoint (hr) Value: 24
  misc_feature: MA Experiment 20000437 PARAMETER Experiment Name: At_Drought_P Parameter: Tissue Value: Whole Plant
  misc_feature: MA Experiment 20000437 PARAMETER Experiment Name: At_Drought_P Parameter: Treatment Value: Drought vs. No Drought
  misc_feature: MA Experiment ID: 20000438 Result: Up-regulated in Transcription
  misc_feature: MA Experiment 20000438 PARAMETER Experiment Name: At_Shoots__P Parameter: Age (day) Value: 14
  misc_feature: MA Experiment 20000438 PARAMETER Experiment Name: At_Shoots__P Parameter: Tissue Value: Shoots vs. Whole Plant
  misc_feature: MA Experiment ID: 20001248 Result: Down-regulated in Transcription
  misc_feature: MA Experiment 20001248 PARAMETER Experiment Name: At_Far-red-induction_P Parameter: Age (day) Value: 7
  misc_feature: MA Experiment 20001248 PARAMETER Experiment Name: At_Far-red-induction_P Parameter: Light Value: Far-red vs. White
  misc_feature: MA Experiment 20001248 PARAMETER Experiment Name: At_Far-red-induction_P Parameter: Organism Value: A. thaliana
  misc_feature: MA Experiment 20001248 PARAMETER Experiment Name: At_Far-red-induction_P Parameter: Plant Line Value: Columbia
  misc_feature: MA Experiment 20001248 PARAMETER Experiment Name: At_Far-red-induction_P Parameter: Timepoint (hr) Value: 4
  misc_feature: MA Experiment 20001248 PARAMETER Experiment Name: At_Far-red-induction_P Parameter: Tissue Value: Whole Plant
aaaaaaccagaaaatggggttgcatccaatttccgacgccaatgaacacaatcccttcggctctctcaccgccgacgaattctacgccaaacattccgttagccactcctccgctttcatcaccaaccctcgcggtctcaaactcttcactcaatggtggtcaccactccctccaactaaaccaatcggtatcatcgctgtcgttcatggcttcaccggcgaatccagttggttccttcagctcacatcaatcctcttcgctaaatccggtttcataacctgcgcaattgatcaccaaggccatggattctccgatggactcatcgctcatatccctgacatcaatcccgtcgtcgatgactgtatctctttcttcgatgacttccgtagccgtcaaacaccgtcagatctgccgtgttttctctactctgaatccctaggcggcgcgattgctctctacatctcgcttcgtcagagaggtgtttgggatggacttatcctcaacggagctatgtgtggaatcagcgataaattcaaaccgccgtggccgttggagcatttgctattcgtcgtcgcgaatcttatccctacttggcgcgttatccccactcgcggatctattcccgatgtttcgttcaaggagccgtggaagaggaagcttgccatggctagcccaaggaggacggtggcgaaaccacgggccgctactgcttatgagctgattcgtgtttgtaaggatctgcaggggaggtttgaggaagtggaggttccgcttctgattgtgcacggcggaggtgatgttgtatgcgacgtagcgtgtgttgaggagcttcatcggagagcgattagtgaggataagacgatcaagatctaccctgagttgtggcatcagatgattggggaatcggaggagaaagtcgatctggtttacggtgatatgctgagctggctcaagagtcgagctgaaaggaaggcacgcgccgccgttgatggaggagcagcttagagtcccttttgagtctttgggtgttgtattgtagtccaataggactgtgccatctggcaagaaactatttatggttttactgtttcgtaatcgtagcacatggtttacagttaaaccaatacctttgggtatcatcaataatataaaaaatcgttg

SEQ ID NO: 22700 - protein, 334 aa, Arabidopsis thaliana
  peptide (1)..(334): Ceres Seq. ID no. 12684882
  misc_feature (91)..(309): Pfam Name: alpha/beta hydrolase fold Pfam Description: alpha/beta hydrolase fold
  misc_feature (33)..(321): Homolog of NCBI NO: 18405038 NR Description: putative phospholipase
  misc_feature (32)..(320): Homolog of NCBI NO: 30687883 NR Description: esterase/lipase/thioesterase family [Arabidopsis
  misc_feature (32)..(320): Homolog of NCBI NO: 7487948 NR Description: lysophospholipase homolog F12L6.8 - Arabidopsis
  misc_feature (38)..(322): Homolog of NCBI NO: 7487947 NR Description: lysophospholipase homolog F12L6.7 - Arabidopsis
  misc_feature (33)..(322): Homolog of NCBI NO: 30687879 NR Description: hydrolase, alpha/beta fold family [Arabidopsis
  misc_feature (23)..(320): Homolog of NCBI NO: 34899776 NR Description: putative lysophospholipase isolog
  misc_feature (15)..(320): Homolog of NCBI NO: 15220284 NR Description: lysophospholipase isolog; protein id: At1g11090.1
  misc_feature (8)..(331): Homolog of NCBI NO: 34894634 NR Description: P0028G04.16 [Oryza sativa (japonica
  misc_feature (5)..(322): Homolog of NCBI NO: 15242179 NR Description: lysophospholipase -like protein; protein id:
  misc_feature (5)..(334): Homolog of NCBI NO: 15239709 NR Description: phospholipase - like protein
KNQKMGLHPISDANEHNPFGSLTADEFYAKHSVSHSSAFITNPRGLKLFTQWWSPLPPTKPIGIIAVVHGFTGESSWFLQLTSILFAKSGFITCAIDHQGHGFSDGLIAHIPDINPVVDDCISFFDDFRSRQTPSDLPCFLYSESLGGAIALYISLRQRGVWDGLILNGAMCGISDKFKPPWPLEHLLFVVANLIPTWRVIPTRGSIPDVSFKEPWKRKLAMASPRRTVAKPRAATAYELIRVCKDLQGRFEEVEVPLLIVHGGGDVVCDVACVEELHRRAISEDKTIKIYPELWHQMIGESEEKVDLVYGDMLSWLKSRAERKARAAVDGGAA

SEQ ID NO: 22701 - protein, 330 aa, Arabidopsis thaliana
  peptide (1)..(330): Ceres Seq. ID no. 12684883
  misc_feature (87)..(305): Pfam Name: alpha/beta hydrolase fold Pfam Description: alpha/beta hydrolase fold
  misc_feature (29)..(317): Homolog of NCBI NO: 18405038 NR Description: putative phospholipase
  misc_feature (28)..(316): Homolog of NCBI NO: 30687883 NR Description: esterase/lipase/thioesterase family [Arabidopsis
  misc_feature (28)..(316): Homolog of NCBI NO: 7487948 NR Description: lysophospholipase homolog F12L6.8 - Arabidopsis
  misc_feature (34)..(318): Homolog of NCBI NO: 7487947 NR Description: lysophospholipase homolog F12L6.7 - Arabidopsis
  misc_feature (29)..(318): Homolog of NCBI NO: 30687879 NR Description: hydrolase, alpha/beta fold family [Arabidopsis
  misc_feature (19)..(316): Homolog of NCBI NO: 34899776 NR Description: putative lysophospholipase isolog
  misc_feature (11)..(316): Homolog of NCBI NO: 15220284 NR Description: lysophospholipase isolog; protein id: At1g11090.1
  misc_feature (4)..(327): Homolog of NCBI NO: 34894634 NR Description: P0028G04.16 [Oryza sativa (japonica
  misc_feature (1)..(318): Homolog of NCBI NO: 15242179 NR Description: lysophospholipase -like protein; protein id:
  misc_feature (1)..(330): Homolog of NCBI NO: 15239709 NR Description: phospholipase - like protein
MGLHPISDANEHNPFGSLTADEFYAKHSVSHSSAFITNPRGLKLFTQWWSPLPPTKPIGIIAVVHGFTGESSWFLQLTSILFAKSGFITCAIDHQGHGFSDGLIAHIPDINPVVDDCISFFDDFRSRQTPSDLPCFLYSESLGGAIALYISLRQRGVWDGLILNGAMCGISDKFKPPWPLEHLLFVVANLIPTWRVIPTRGSIPDVSFKEPWKRKLAMASPRRTVAKPRAATAYELIRVCKDLQGRFEEVEVPLLIVHGGGDVVCDVACVEELHRRAISEDKTIKIYPELWHQMIGESEEKVDLVYGDMLSWLKSRAERKARAAVDGGAA

SEQ ID NO: 22702 - DNA, 1405 bp, Arabidopsis thaliana
  misc_feature (1)..(1405): Ceres Seq. ID no. 13494273
  misc_feature: MA Experiment ID: 108434 Result: Up-regulated in Transcription
  misc_feature: MA Experiment 108434 PARAMETER Experiment Name: At_Root_Tips_cDNA_P Parameter: Tissue Value: Root Tips
  misc_feature: MA Experiment ID: 20000185 Result: Up-regulated in Transcription
  misc_feature: MA Experiment 20000185 PARAMETER Experiment Name: At_Roots__P Parameter: Age (day) Value: 7 vs. 21
  misc_feature: MA Experiment 20000185 PARAMETER Experiment Name: At_Roots__P Parameter: Organism Value: A. thaliana
  misc_feature: MA Experiment 20000185 PARAMETER Experiment Name: At_Roots__P Parameter: Tissue Value: Roots vs. Whole Plant
  misc_feature: MA Experiment ID: 20000264 Result: Up-regulated in Transcription
  misc_feature: MA Experiment 20000264 PARAMETER Experiment Name: At_Open_Flower_P Parameter: Age (day) Value: 21
  misc_feature: MA Experiment 20000264 PARAMETER Experiment Name: At_Open_Flower_P Parameter: Plant Line Value: WS
  misc_feature: MA Experiment 20000264 PARAMETER Experiment Name: At_Open_Flower_P Parameter: Tissue Value: Open Flower vs. Whole Plant
  misc_feature: MA Experiment ID: 20000265 Result: Up-regulated in Transcription
  misc_feature: MA Experiment 20000265 PARAMETER Experiment Name: At_Open_Flower_P Parameter: Age (day) Value: 21
  misc_feature: MA Experiment 20000265 PARAMETER Experiment Name: At_Open_Flower_P Parameter: Plant Line Value: WS
  misc_feature: MA Experiment 20000265 PARAMETER Experiment Name: At_Open_Flower_P Parameter: Tissue Value: Closed Flower vs. Whole Plant
  misc_feature: MA Experiment ID: 20000286 Result: Up-regulated in Transcription
  misc_feature: MA Experiment 20000286 PARAMETER Experiment Name: At_Open_Flower_P Parameter: Age (day) Value: 21
  misc_feature: MA Experiment 20000286 PARAMETER Experiment Name: At_Open_Flower_P Parameter: Plant Line Value: WS
  misc_feature: MA Experiment 20000286 PARAMETER Experiment Name: At_Open_Flower_P Parameter: Tissue Value: Half Open vs. Whole Plant
  misc_feature: MA Experiment ID: 20000794 Result: Up-regulated in Transcription
  misc_feature: MA Experiment 20000794 PARAMETER Experiment Name: At_Petals_P Parameter: Age (day) Value: 23-25 days
  misc_feature: MA Experiment 20000794 PARAMETER Experiment Name: At_Petals_P Parameter: Plant Line Value: WS
  misc_feature: MA Experiment 20000794 PARAMETER Experiment Name: At_Petals_P Parameter: Tissue Value: Petals vs. Whole plant
tggcatcaacgaagaagaagaagaaaaggacgagtagattgatttcttagacgacggagaaatgcgagtgatgagatcattgcgcggtaattccggtgctggattggttttccggccggcgaggttaaattctcttcggagcgtctttaccggttgccgtgctgtgattttgccccgctttggtggtccggaggtttttgagctccgggagaatgttccggtgccgaatctgaatccaaatgaggttcttgtcaaggcgaaagctgtctccgttaatcctcttgattgcagaatacgagctggatatggacgttctgtattccaaccgcatctacctattatagttggacgtgatgtcagtggtgaagttgcggcaattgggacttcagtaaagtcacttaaagtaggacaagaagtttttggtgcgttgcatccgacggcgttaagaggtacttatactgactatggaattctttcggaagacgaactcacggaaaagccatcatcaatttcacatgtggaagcaagtgccattccttttgcagctttgactgcttggcgtgctttgaagagtaatgcaaggataactgaaggacaaagactattagtctttggaggaggaggagcagtaggtttttctgcaatccagcttgcggtagcatctgggtgtcatgttacagcctcttgtgttggtcagactaaagacagaatacttgcagctggggccgagcaagctgttgactacacaaccgaggacattgagttggcggtaaaaggaaaatttgatgccgtgttagatactattggtgggcctgaaacggagagaataggcattaacttcttaaggaagggtggaaactatatgactcttcagggtgaggctgcatcgttgactgataaatacggttttgtggttgggcttccccttgcaacatcgctcttgatgaagaaaaagatacaatatcagtattctcatggaatagactattggtggacgtatatgagggctgatcctgaaggtctagccgagattcagcgtttagttggagctggaaagctaaaaatacctgttgaaaaaacatttccaataaccgatgttgtagcagctcatgaagccaaggagaagaaacagattccgggtaaggtggttctagagttctgaactacatatacatagtagaaataataacacctgcatagttctctagcagttgttctttctagaatttacacgcagagaaacaaatgtttcgcgtctggagttttctgtaaatgagatctatcaggcttagattcagatcaagaacttgaagtgtctgtatagactttccaaagggttcgtttttatttggattttgtctgtgttgcaaactactaagccaagtaatggaaatggtttagaaag

SEQ ID NO: 22703 - protein, 366 aa, Arabidopsis thaliana
  peptide (1)..(366): Ceres Seq. ID no. 13494274
  misc_feature (317)..(364): Homolog of NCBI NO: 13472500 NR Description: probable oxidoreductase [Mesorhizobium loti]
  misc_feature (33)..(270): Homolog of NCBI NO: 13472500 NR Description: probable oxidoreductase [Mesorhizobium loti]
  misc_feature (316)..(365): Homolog of NCBI NO: 21219303 NR Description: putative zinc-binding oxidoreductase
  misc_feature (33)..(265): Homolog of NCBI NO: 21219303 NR Description: putative zinc-binding oxidoreductase
  misc_feature (15)..(364): Homolog of NCBI NO: 14522882 NR Description: NOGO-interacting mitochondrial protein [Homo
  misc_feature (34)..(364): Homolog of NCBI NO: 14249346 NR Description: reticulon 4 interacting protein 1
  misc_feature (2)..(344): Homolog of NCBI NO: 34909604 NR Description: putative oxidoreductase-like protein
  misc_feature (2)..(366): Homolog of NCBI NO: 30351052 NR Description: oxidoreductase [Setaria italica]
  misc_feature (1)..(366): Homolog of NCBI NO: 21592930 NR Description: zinc-binding dehydrogenase, putative [Arabidopsis
  misc_feature (1)..(366): Homolog of NCBI NO: 15232485 NR Description: oxidoreductase, zinc-binding dehydrogenase family
MRVMRSLRGNSGAGLVFRPARLNSLRSVFTGCRAVILPRFGGPEVFELRENVPVPNLNPNEVLVKAKAVSVNPLDCRIRAGYGRSVFQPHLPIIVGRDVSGEVAAIGTSVKSLKVGQEVFGALHPTALRGTYTDYGILSEDELTEKPSSISHVEASAIPFAALTAWRALKSNARITEGQRLLVFGGGGAVGFSAIQLAVASGCHVTASCVGQTKDRILAAGAEQAVDYTTEDIELAVKGKFDAVLDTIGGPETERIGINFLRKGGNYMTLQGEAASLTDKYGFVVGLPLATSLLMKKKIQYQYSHGIDYWWTYMRADPEGLAEIQRLVGAGKLKIPVEKTFPITDVVAAHEAKEKKQIPGKVVLEF

SEQ ID NO: 22704 - protein, 363 aa, Arabidopsis thaliana
  peptide (1)..(363): Ceres Seq. ID no. 13494275
  misc_feature (314)..(361): Homolog of NCBI NO: 13472500 NR Description: probable oxidoreductase [Mesorhizobium loti]
  misc_feature (30)..(267): Homolog of NCBI NO: 13472500 NR Description: probable oxidoreductase [Mesorhizobium loti]
  misc_feature (313)..(362): Homolog of NCBI NO: 21219303 NR Description: putative zinc-binding oxidoreductase
  misc_feature (30)..(262): Homolog of NCBI NO: 21219303 NR Description: putative zinc-binding oxidoreductase
  misc_feature (12)..(361): Homolog of NCBI NO: 14522882 NR Description: NOGO-interacting mitochondrial protein [Homo
  misc_feature (31)..(361): Homolog of NCBI NO: 14249346 NR Description: reticulon 4 interacting protein 1
  misc_feature (1)..(341): Homolog of NCBI NO: 34909604 NR Description: putative oxidoreductase-like protein
  misc_feature (1)..(363): Homolog of NCBI NO: 30351052 NR Description: oxidoreductase [Setaria italica]
  misc_feature (1)..(363): Homolog of NCBI NO: 21592930 NR Description: zinc-binding dehydrogenase, putative [Arabidopsis
  misc_feature (1)..(363): Homolog of NCBI NO: 15232485 NR Description: oxidoreductase, zinc-binding dehydrogenase family
MRSLRGNSGAGLVFRPARLNSLRSVFTGCRAVILPRFGGPEVFELRENVPVPNLNPNEVLVKAKAVSVNPLDCRIRAGYGRSVFQPHLPIIVGRDVSGEVAAIGTSVKSLKVGQEVFGALHPTALRGTYTDYGILSEDELTEKPSSISHVEASAIPFAALTAWRALKSNARITEGQRLLVFGGGGAVGFSAIQLAVASGCHVTASCVGQTKDRILAAGAEQAVDYTTEDIELAVKGKFDAVLDTIGGPETERIGINFLRKGGNYMTLQGEAASLTDKYGFVVGLPLATSLLMKKKIQYQYSHGIDYWWTYMRADPEGLAEIQRLVGAGKLKIPVEKTFPITDVVAAHEAKEKKQIPGKVVLEF

SEQ ID NO: 22705 - DNA, 1312 bp, Arabidopsis thaliana
  misc_feature (1)..(1312): Ceres Seq. ID no. 12322145
  misc_feature: MA Experiment ID: 108488 Result: Down-regulated in Transcription
  misc_feature: MA Experiment ID: 108573 Result: Up-regulated in Transcription
  misc_feature: MA Experiment 108573 PARAMETER Experiment Name: At_Drought_cDNA_P Parameter: Timepoint (hr) Value: 6
  misc_feature: MA Experiment 108573 PARAMETER Experiment Name: At_Drought_cDNA_P Parameter: Tissue Value: Aerial
  misc_feature: MA Experiment 108573 PARAMETER Experiment Name: At_Drought_cDNA_P Parameter: Treatment Value: Drought vs. No Drought
  misc_feature: MA Experiment ID: 108585 Result: Up-regulated in Transcription
  misc_feature: MA Experiment 108585 PARAMETER Experiment Name: At_5mM_NaNP_cDNA_P Parameter: Timepoint (hr) Value: 6
  misc_feature: MA Experiment 108585 PARAMETER Experiment Name: At_5mM_NaNP_cDNA_P Parameter: Tissue Value: Aerial
  misc_feature: MA Experiment 108585 PARAMETER Experiment Name: At_5mM_NaNP_cDNA_P Parameter: Treatment Value: null
  misc_feature: MA Experiment ID: 20001451 Result: Up-regulated in Transcription
  misc_feature: MA Experiment 20001451 PARAMETER Experiment Name: At_Far-red-induction_P Parameter: Age (day) Value: 7
  misc_feature: MA Experiment 20001451 PARAMETER Experiment Name: At_Far-red-induction_P Parameter: Light Value: Far-red vs. White
  misc_feature: MA Experiment 20001451 PARAMETER Experiment Name: At_Far-red-induction_P Parameter: Organism Value: A. thaliana
  misc_feature: MA Experiment 20001451 PARAMETER Experiment Name: At_Far-red-induction_P Parameter: Plant Line Value: Columbia
  misc_feature: MA Experiment 20001451 PARAMETER Experiment Name: At_Far-red-induction_P Parameter: Timepoint (hr) Value: 24
  misc_feature: MA Experiment 20001451 PARAMETER Experiment Name: At_Far-red-induction_P Parameter: Tissue Value: Whole Plant
  misc_feature: MA Experiment ID: 20001905 Result: Up-regulated in Transcription
  misc_feature: MA Experiment 20001905 PARAMETER Experiment Name: At_Drought_Reproduction_P Parameter: Age (day) Value: 40
  misc_feature: MA Experiment 20001905 PARAMETER Experiment Name: At_Drought_Reproduction_P Parameter: Organism Value: A. thaliana
  misc_feature: MA Experiment 20001905 PARAMETER Experiment Name: At_Drought_Reproduction_P Parameter: Plant Line Value: WS
  misc_feature: MA Experiment 20001905 PARAMETER Experiment Name: At_Drought_Reproduction_P Parameter: Timepoint (day) Value: 10
  misc_feature: MA Experiment 20001905 PARAMETER Experiment Name: At_Drought_Reproduction_P Parameter: Tissue Value: Rosettes
  misc_feature: MA Experiment 20001905 PARAMETER Experiment Name: At_Drought_Reproduction_P Parameter: Treatment Value: Drought vs. No Drought
  misc_feature: MA Experiment ID: 20001911 Result: Up-regulated in Transcription
  misc_feature: MA Experiment 20001911 PARAMETER Experiment Name: At_Drought_Reproduction_P Parameter: Age (day) Value: 40
  misc_feature: MA Experiment 20001911 PARAMETER Experiment Name: At_Drought_Reproduction_P Parameter: Organism Value: A. thaliana
  misc_feature: MA Experiment 20001911 PARAMETER Experiment Name: At_Drought_Reproduction_P Parameter: Plant Line Value: WS
  misc_feature: MA Experiment 20001911 PARAMETER Experiment Name: At_Drought_Reproduction_P Parameter: Timepoint (day) Value: 10
  misc_feature: MA Experiment 20001911 PARAMETER Experiment Name: At_Drought_Reproduction_P Parameter: Tissue Value: Flowers
  misc_feature: MA Experiment 20001911 PARAMETER Experiment Name: At_Drought_Reproduction_P Parameter: Treatment Value: Drought vs. No Drought
tcctctgacggttcttttcttccttcgtcctctcgttttttttgtttcgtcgtctctctctcgcgctctgaaaaattcgcagaatccgtcatgtcttccggcgtaaattcaactggctccgccgcagcagcaccggaggttgacaagatgttcttctgctaccagtgcaatcaaacagtcacaatctcaatttcctcatccgctgatcctttttgtccaatttgtaaccaagggtttcttgaagaatacgaagaccctaaccctaatcaatccctcaatttcaaccctaactcttctgattcctttttccccatggccgatcctttctccaccttgctcccgctcatattcggctcttccgctgccgctccttccggcatggacttcatgagcttattcggtccttcgatgcaaccacaggctcgttccactcagcagaatcctcagtctgacgcgtttgatccgtttacgtttcttcagaatcatctccagactttgcgatctagcggtacgcactttgagttcgtgatcgagaatcatccttcggatccaggtaatcgtatgcctgggaatttcggtgattacttctttggtccaggtcttgagcagttgattcagcaactagctgagaatgatcctaatcgttacggaactcctcctgcttccaaatccgccattgatgctcttcctactgttaaggtaacgaaggatatgttgaaatcggagatgaaccaatgcgcggtgtgtatggatgagtttgaggatggtagcgatgttaagcagatgccttgtaagcacgtctttcatcaggactgtttgctcccttggctggagttgcataattcgtgtcctgtttgtcgattcgagttgcctacggatgatcctgattatgagaacaggagtcaaggaagtcaggggagtggtgatggacaaggatcggttgagggtcagcagacgccgaggtttagtatacaacttccttggccgttcaggagacaagatggctctggttcaggctcgggagcacctggtactggtggaggtaatcttgagaccaggggtgaagatttggattgagaatgtgttggccagtcattgcttggaaactggatcagaaggatatctatcccaagttctccaacaaaaaatgaaaaaacagttttattagggaaacaaaagtgacattgaggtcttaccatattttgtacatttaaaaaaagttatttttttcgttgttattttgggattatataacgaatgtgaaagtttttaaaaatcgcaaattttcaattgagtgttgtttatttttctc

SEQ ID NO: 22706 - protein, 358 aa, Arabidopsis thaliana
  peptide (1)..(358): Ceres Seq. ID no. 12322146
  misc_feature (246)..(286): Pfam Name: Zinc finger, C3HC4 type (RING finger) Pfam Description: Zinc finger, C3HC4 type (RING finger)
  misc_feature (190)..(309): Homolog of NCBI NO: 38454178 NR Description: At3g13430 [Arabidopsis thaliana]
  misc_feature (190)..(309): Homolog of NCBI NO: 15231238 NR Description: unknown protein; protein id: At3g13430.1
  misc_feature (31)..(331): Homolog of NCBI NO: 15219060 NR Description: hypothetical protein; protein id: At1g60360.1
  misc_feature (181)..(305): Homolog of NCBI NO: 15241188 NR Description: putative protein
  misc_feature (190)..(313): Homolog of NCBI NO: 18405411 NR Description: expressed protein
  misc_feature (52)..(356): Homolog of NCBI NO: 18405518 NR Description: expressed protein
  misc_feature (95)..(319): Homolog of NCBI NO: 37535546 NR Description: putative zinc finger protein
  misc_feature (238)..(358): Homolog of NCBI NO: 26451608 NR Description: unknown protein [Arabidopsis thaliana]
  misc_feature (31)..(358): Homolog of NCBI NO: 15231003 NR Description: unknown protein
  misc_feature (1)..(358): Homolog of NCBI NO: 11994207 NR Description: gene_id:MPN9.20~unknown protein [Arabidopsis
SSDGSFLPSSSRFFCFVVSLSRSEKFAESVMSSGVNSTGSAAAAPEVDKMFFCYQCNQTVTISISSSADPFCPICNQGFLEEYEDPNPNQSLNFNPNSSDSFFPMADPFSTLLPLIFGSSAAAPSGMDFMSLFGPSMQPQARSTQQNPQSDAFDPFTFLQNHLQTLRSSGTHFEFVIENHPSDPGNRMPGNFGDYFFGPGLEQLIQQLAENDPNRYGTPPASKSAIDALPTVKVTKDMLKSEMNQCAVCMDEFEDGSDVKQMPCKHVFHQDCLLPWLELHNSCPVCRFELPTDDPDYENRSQGSQGSGDGQGSVEGQQTPRFSIQLPWPFRRQDGSGSGSGAPGTGGGNLETRGEDLD

SEQ ID NO: 22707 - protein, 328 aa, Arabidopsis thaliana
  peptide (1)..(328): Ceres Seq. ID no. 12322147
  misc_feature (216)..(256): Pfam Name: Zinc finger, C3HC4 type (RING finger) Pfam Description: Zinc finger, C3HC4 type (RING finger)
  misc_feature (160)..(279): Homolog of NCBI NO: 38454178 NR Description: At3g13430 [Arabidopsis thaliana]
  misc_feature (160)..(279): Homolog of NCBI NO: 15231238 NR Description: unknown protein; protein id: At3g13430.1
  misc_feature (1)..(301): Homolog of NCBI NO: 15219060 NR Description: hypothetical protein; protein id: At1g60360.1
  misc_feature (151)..(275): Homolog of NCBI NO: 15241188 NR Description: putative protein
  misc_feature (160)..(283): Homolog of NCBI NO: 18405411 NR Description: expressed protein
  misc_feature (22)..(326): Homolog of NCBI NO: 18405518 NR Description: expressed protein
  misc_feature (65)..(289): Homolog of NCBI NO: 37535546 NR Description: putative zinc finger protein
  misc_feature (208)..(328): Homolog of NCBI NO: 26451608 NR Description: unknown protein [Arabidopsis thaliana]
  misc_feature (1)..(328): Homolog of NCBI NO: 15231003 NR Description: unknown protein
  misc_feature (1)..(328): Homolog of NCBI NO: 11994207 NR Description: gene_id:MPN9.20~unknown protein [Arabidopsis
MSSGVNSTGSAAAAPEVDKMFFCYQCNQTVTISISSSADPFCPICNQGFLEEYEDPNPNQSLNFNPNSSDSFFPMADPFSTLLPLIFGSSAAAPSGMDFMSLFGPSMQPQARSTQQNPQSDAFDPFTFLQNHLQTLRSSGTHFEFVIENHPSDPGNRMPGNFGDYFFGPGLEQLIQQLAENDPNRYGTPPASKSAIDALPTVKVTKDMLKSEMNQCAVCMDEFEDGSDVKQMPCKHVFHQDCLLPWLELHNSCPVCRFELPTDDPDYENRSQGSQGSGDGQGSVEGQQTPRFSIQLPWPFRRQDGSGSGSGAPGTGGGNLETRGEDLD

SEQ ID NO: 22708 - protein, 309 aa, Arabidopsis thaliana
  peptide (1)..(309): Ceres Seq. ID no. 12322148
  misc_feature (197)..(237): Pfam Name: Zinc finger, C3HC4 type (RING finger) Pfam Description: Zinc finger, C3HC4 type (RING finger)
  misc_feature (1)..(309): Homolog of NCBI NO: 11994207 NR Description: gene_id:MPN9.20~unknown protein [Arabidopsis
  misc_feature (141)..(260): Homolog of NCBI NO: 38454178 NR Description: At3g13430 [Arabidopsis thaliana]
  misc_feature (141)..(260): Homolog of NCBI NO: 15231238 NR Description: unknown protein; protein id: At3g13430.1
  misc_feature (1)..(282): Homolog of NCBI NO: 15219060 NR Description: hypothetical protein; protein id: At1g60360.1
  misc_feature (132)..(256): Homolog of NCBI NO: 15241188 NR Description: putative protein
  misc_feature (141)..(264): Homolog of NCBI NO: 18405411 NR Description: expressed protein
  misc_feature (3)..(307): Homolog of NCBI NO: 18405518 NR Description: expressed protein
  misc_feature (46)..(270): Homolog of NCBI NO: 37535546 NR Description: putative zinc finger protein
  misc_feature (189)..(309): Homolog of NCBI NO: 26451608 NR Description: unknown protein [Arabidopsis thaliana]
  misc_feature (1)..(309): Homolog of NCBI NO: 15231003 NR Description: unknown protein
MFFCYQCNQTVTISISSSADPFCPICNQGFLEEYEDPNPNQSLNFNPNSSDSFFPMADPFSTLLPLIFGSSAAAPSGMDFMSLFGPSMQPQARSTQQNPQSDAFDPFTFLQNHLQTLRSSGTHFEFVIENHPSDPGNRMPGNFGDYFFGPGLEQLIQQLAENDPNRYGTPPASKSAIDALPTVKVTKDMLKSEMNQCAVCMDEFEDGSDVKQMPCKHVFHQDCLLPWLELHNSCPVCRFELPTDDPDYENRSQGSQGSGDGQGSVEGQQTPRFSIQLPWPFRRQDGSGSGSGAPGTGGGNLETRGEDLD

SEQ ID NO: 22709 - DNA, 1220 bp, Arabidopsis thaliana
  misc_feature (1)..(1220): Ceres Seq. ID no. 12489325
  misc_feature: MA Experiment ID: 20000185 Result: Down-regulated in Transcription
  misc_feature: MA Experiment 20000185 PARAMETER Experiment Name: At_Roots__P Parameter: Age (day) Value: 7 vs. 21
  misc_feature: MA Experiment 20000185 PARAMETER Experiment Name: At_Roots__P Parameter: Organism Value: A. thaliana
  misc_feature: MA Experiment 20000185 PARAMETER Experiment Name: At_Roots__P Parameter: Tissue Value: Roots vs. Whole Plant
  misc_feature: MA Experiment ID: 20000234 Result: Down-regulated in Transcription
  misc_feature: MA Experiment 20000234 PARAMETER Experiment Name: At_Siliques_P Parameter: Age (day) Value: 21
  misc_feature: MA Experiment 20000234 PARAMETER Experiment Name: At_Siliques_P Parameter: Organism Value: A. thaliana
  misc_feature: MA Experiment 20000234 PARAMETER Experiment Name: At_Siliques_P Parameter: Plant Line Value: WS
  misc_feature: MA Experiment 20000234 PARAMETER Experiment Name: At_Siliques_P Parameter: Tissue Value: Less Than 5mm Siliques vs. Whole Plant
  misc_feature: MA Experiment ID: 20000264 Result: Down-regulated in Transcription
  misc_feature: MA Experiment 20000264 PARAMETER Experiment Name: At_Open_Flower_P Parameter: Age (day) Value: 21
  misc_feature: MA Experiment 20000264 PARAMETER Experiment Name: At_Open_Flower_P Parameter: Plant Line Value: WS
  misc_feature: MA Experiment 20000264 PARAMETER Experiment Name: At_Open_Flower_P Parameter: Tissue Value: Open Flower vs. Whole Plant
  misc_feature: MA Experiment ID: 20000269 Result: Down-regulated in Transcription
  misc_feature: MA Experiment 20000269 PARAMETER Experiment Name: At_1mM_KNO3_L-vs-H_Roots_P Parameter: Age (day) Value: 7,10,12
  misc_feature: MA Experiment 20000269 PARAMETER Experiment Name: At_1mM_KNO3_L-vs-H_Roots_P Parameter: Organism Value: A. thaliana
  misc_feature: MA Experiment 20000269 PARAMETER Experiment Name: At_1mM_KNO3_L-vs-H_Roots_P Parameter: Plant Line Value: WS
  misc_feature: MA Experiment 20000269 PARAMETER Experiment Name: At_1mM_KNO3_L-vs-H_Roots_P Parameter: Timepoint (day) Value: 7,10,12
  misc_feature: MA Experiment 20000269 PARAMETER Experiment Name: At_1mM_KNO3_L-vs-H_Roots_P Parameter: Tissue Value: Roots
  misc_feature: MA Experiment 20000269 PARAMETER Experiment Name: At_1mM_KNO3_L-vs-H_Roots_P Parameter: Treatment Value: 1mM KNO3 vs. 50mM KNO3
  misc_feature: MA Experiment ID: 20000286 Result: Down-regulated in Transcription
  misc_feature: MA Experiment 20000286 PARAMETER Experiment Name: At_Open_Flower_P Parameter: Age (day) Value: 21
  misc_feature: MA Experiment 20000286 PARAMETER Experiment Name: At_Open_Flower_P Parameter: Plant Line Value: WS
  misc_feature: MA Experiment 20000286 PARAMETER Experiment Name: At_Open_Flower_P Parameter: Tissue Value: Half Open vs. Whole Plant
  misc_feature: MA Experiment ID: 20000439 Result: Down-regulated in Transcription
  misc_feature: MA Experiment 20000439 PARAMETER Experiment Name: At_Roots__P Parameter: Age (day) Value: 14 vs. 21
  misc_feature: MA Experiment 20000439 PARAMETER Experiment Name: At_Roots__P Parameter: Organism Value: A. thaliana
  misc_feature: MA Experiment 20000439 PARAMETER Experiment Name: At_Roots__P Parameter: Tissue Value: Roots vs. Whole Plant
  misc_feature: MA Experiment ID: 20000451 Result: Down-regulated in Transcription
  misc_feature: MA Experiment 20000451 PARAMETER Experiment Name: At_CS6879_Shoots-Roots_P Parameter: Age (day) Value: 14
  misc_feature: MA Experiment 20000451 PARAMETER Experiment Name: At_CS6879_Shoots-Roots_P Parameter: Organism Value: A. thaliana
  misc_feature: MA Experiment 20000451 PARAMETER Experiment Name: At_CS6879_Shoots-Roots_P Parameter: Plant Line Value: CS6879 vs. WS
  misc_feature: MA Experiment 20000451 PARAMETER Experiment Name: At_CS6879_Shoots-Roots_P Parameter: Tissue Value: Roots
  misc_feature: MA Experiment ID: 20000573 Result: Up-regulated in Transcription
  misc_feature: MA Experiment 20000573 PARAMETER Experiment Name: At_100uM_ABA_Mutants__P Parameter: Organism Value: A. thaliana
  misc_feature: MA Experiment 20000573 PARAMETER Experiment Name: At_100uM_ABA_Mutants__P Parameter: Plant Line Value: CS22 vs. Ler wt
  misc_feature: MA Experiment 20000573 PARAMETER Experiment Name: At_100uM_ABA_Mutants__P Parameter: Timepoint (hr) Value: N/A
  misc_feature: MA Experiment 20000573 PARAMETER Experiment Name: At_100uM_ABA_Mutants__P Parameter: Tissue Value: Whole Plant
  misc_feature: MA Experiment 20000573 PARAMETER Experiment Name: At_100uM_ABA_Mutants__P Parameter: Treatment Value: None
  misc_feature: MA Experiment ID: 20000794 Result: Down-regulated in Transcription
  misc_feature: MA Experiment 20000794 PARAMETER Experiment Name: At_Petals_P Parameter: Age (day) Value: 23-25 days
  misc_feature: MA Experiment 20000794 PARAMETER Experiment Name: At_Petals_P Parameter: Plant Line Value: WS
  misc_feature: MA Experiment 20000794 PARAMETER Experiment Name: At_Petals_P Parameter: Tissue Value: Petals vs. Whole plant
  misc_feature: MA Experiment ID: 20001248 Result: Up-regulated in Transcription
  misc_feature: MA Experiment 20001248 PARAMETER Experiment Name: At_Far-red-induction_P Parameter: Age (day) Value: 7
  misc_feature: MA Experiment 20001248 PARAMETER Experiment Name: At_Far-red-induction_P Parameter: Light Value: Far-red vs. White
  misc_feature: MA Experiment 20001248 PARAMETER Experiment Name: At_Far-red-induction_P Parameter: Organism Value: A. thaliana
  misc_feature: MA Experiment 20001248 PARAMETER Experiment Name: At_Far-red-induction_P Parameter: Plant Line Value: Columbia
  misc_feature: MA Experiment 20001248 PARAMETER Experiment Name: At_Far-red-induction_P Parameter: Timepoint (hr) Value: 4
  misc_feature: MA Experiment 20001248 PARAMETER Experiment Name: At_Far-red-induction_P Parameter: Tissue Value: Whole Plant
  misc_feature: MA Experiment ID: 20001450 Result: Up-regulated in Transcription
  misc_feature: MA Experiment 20001450 PARAMETER Experiment Name: At_Far-red-induction_P Parameter: Age (day) Value: 7
  misc_feature: MA Experiment 20001450 PARAMETER Experiment Name: At_Far-red-induction_P Parameter: Light Value: Far-red vs. White
  misc_feature: MA Experiment 20001450 PARAMETER Experiment Name: At_Far-red-induction_P Parameter: Organism Value: A. thaliana
  misc_feature: MA Experiment 20001450 PARAMETER Experiment Name: At_Far-red-induction_P Parameter: Plant Line Value: Columbia
  misc_feature: MA Experiment 20001450 PARAMETER Experiment Name: At_Far-red-induction_P Parameter: Timepoint (hr) Value: 8
  misc_feature: MA Experiment 20001450 PARAMETER Experiment Name: At_Far-red-induction_P Parameter: Tissue Value: Whole Plant
  misc_feature: MA Experiment ID: 20001451 Result: Up-regulated in Transcription
  misc_feature: MA Experiment 20001451 PARAMETER Experiment Name: At_Far-red-induction_P Parameter: Age (day) Value: 7
  misc_feature: MA Experiment 20001451 PARAMETER Experiment Name: At_Far-red-induction_P Parameter: Light Value: Far-red vs. White
  misc_feature: MA Experiment 20001451 PARAMETER Experiment Name: At_Far-red-induction_P Parameter: Organism Value: A. thaliana
  misc_feature: MA Experiment 20001451 PARAMETER Experiment Name: At_Far-red-induction_P Parameter: Plant Line Value: Columbia
  misc_feature: MA Experiment 20001451 PARAMETER Experiment Name: At_Far-red-induction_P Parameter: Timepoint (hr) Value: 24
  misc_feature: MA Experiment 20001451 PARAMETER Experiment Name: At_Far-red-induction_P Parameter: Tissue Value: Whole Plant
  misc_feature: MA Experiment ID: 20001459 Result: Down-regulated in Transcription
  misc_feature: MA Experiment 20001459 PARAMETER Experiment Name: At_50mM_NH4NO3_L-to-H_P Parameter: Age (day) Value: Undefined
  misc_feature: MA Experiment 20001459 PARAMETER Experiment Name: At_50mM_NH4NO3_L-to-H_P Parameter: Organism Value: Undefined
  misc_feature: MA Experiment 20001459 PARAMETER Experiment Name: At_50mM_NH4NO3_L-to-H_P Parameter: Plant Line Value: Undefined
  misc_feature: MA Experiment 20001459 PARAMETER Experiment Name: At_50mM_NH4NO3_L-to-H_P Parameter: Timepoint (hr) Value: 4
  misc_feature: MA Experiment 20001459 PARAMETER Experiment Name: At_50mM_NH4NO3_L-to-H_P Parameter: Tissue Value: Siliques
  misc_feature: MA Experiment 20001459 PARAMETER Experiment Name: At_50mM_NH4NO3_L-to-H_P Parameter: Treatment Value: 50mM NH4NO3 vs. 100mM Manitol
  misc_feature: MA Experiment ID: 20001557 Result: Down-regulated in Transcription
  misc_feature: MA Experiment 20001557 PARAMETER Experiment Name: At_Drought_Soil_Dry_P Parameter: Age (day) Value: 27
  misc_feature: MA Experiment 20001557 PARAMETER Experiment Name: At_Drought_Soil_Dry_P Parameter: Organism Value: A. thaliana
  misc_feature: MA Experiment 20001557 PARAMETER Experiment Name: At_Drought_Soil_Dry_P Parameter: Plant Line Value: WS
  misc_feature: MA Experiment 20001557 PARAMETER Experiment Name: At_Drought_Soil_Dry_P Parameter: Post Timepoint (hr) Value: 3
  misc_feature: MA Experiment 20001557 PARAMETER Experiment Name: At_Drought_Soil_Dry_P Parameter: Post-Treatment Value: Re-Water vs. No Drought
  misc_feature: MA Experiment 20001557 PARAMETER Experiment Name: At_Drought_Soil_Dry_P Parameter: Timepoint (day) Value: 13
  misc_feature: MA Experiment 20001557 PARAMETER Experiment Name: At_Drought_Soil_Dry_P Parameter: Treatment Value: Drought vs. No Drought
  misc_feature: MA Experiment ID: 20001558 Result: Down-regulated in Transcription
  misc_feature: MA Experiment 20001558 PARAMETER Experiment Name: At_Drought_Soil_Dry_P Parameter: Age (day) Value: 27
  misc_feature: MA Experiment 20001558 PARAMETER Experiment Name: At_Drought_Soil_Dry_P Parameter: Organism Value: A. thaliana
  misc_feature: MA Experiment 20001558 PARAMETER Experiment Name: At_Drought_Soil_Dry_P Parameter: Plant Line Value: WS
  misc_feature: MA Experiment 20001558 PARAMETER Experiment Name: At_Drought_Soil_Dry_P Parameter: Post Timepoint (hr) Value: 6
  misc_feature: MA Experiment 20001558 PARAMETER Experiment Name: At_Drought_Soil_Dry_P Parameter: Post-Treatment Value: Re-Water vs. No Drought
  misc_feature: MA Experiment 20001558 PARAMETER Experiment Name: At_Drought_Soil_Dry_P Parameter: Timepoint (day) Value: 13
  misc_feature: MA Experiment 20001558 PARAMETER Experiment Name: At_Drought_Soil_Dry_P Parameter: Treatment Value: Drought vs. No Drought
  misc_feature: MA Experiment ID: 20001757 Result: Up-regulated in Transcription
  misc_feature: MA Experiment 20001757 PARAMETER Experiment Name: At_50mM_NH4NO3_L-to-H_P Parameter: Timepoint (hr) Value: 6
  misc_feature: MA Experiment 20001757 PARAMETER Experiment Name: At_50mM_NH4NO3_L-to-H_P Parameter: Tissue Value: Leaf
  misc_feature: MA Experiment 20001757 PARAMETER Experiment Name: At_50mM_NH4NO3_L-to-H_P Parameter: Treatment Value: 50mM NH4NO3 vs 100mM Mannitol
  misc_feature: MA Experiment ID: 20001905 Result: Down-regulated in Transcription
  misc_feature: MA Experiment 20001905 PARAMETER Experiment Name: At_Drought_Reproduction_P Parameter: Age (day) Value: 40
  misc_feature: MA Experiment 20001905 PARAMETER Experiment Name: At_Drought_Reproduction_P Parameter: Organism Value: A. thaliana
  misc_feature: MA Experiment 20001905 PARAMETER Experiment Name: At_Drought_Reproduction_P Parameter: Plant Line Value: WS
  misc_feature: MA Experiment 20001905 PARAMETER Experiment Name: At_Drought_Reproduction_P Parameter: Timepoint (day) Value: 10
  misc_feature: MA Experiment 20001905 PARAMETER Experiment Name: At_Drought_Reproduction_P Parameter: Tissue Value: Rosettes
  misc_feature: MA Experiment 20001905 PARAMETER Experiment Name: At_Drought_Reproduction_P Parameter: Treatment Value: Drought vs. No Drought
  misc_feature: MA Experiment ID: 20001906 Result: Down-regulated in Transcription
  misc_feature: MA Experiment 20001906 PARAMETER Experiment Name: At_Drought_Reproduction_P Parameter: Age (day) Value: 35
  misc_feature: MA Experiment 20001906 PARAMETER Experiment Name: At_Drought_Reproduction_P Parameter: Organism Value: A. thaliana
  misc_feature: MA Experiment 20001906 PARAMETER Experiment Name: At_Drought_Reproduction_P Parameter: Plant Line Value: WS
  misc_feature: MA Experiment 20001906 PARAMETER Experiment Name: At_Drought_Reproduction_P Parameter: Timepoint (day) Value: 5
  misc_feature: MA Experiment 20001906 PARAMETER Experiment Name: At_Drought_Reproduction_P Parameter: Tissue Value: Siliques
  misc_feature: MA Experiment 20001906 PARAMETER Experiment Name: At_Drought_Reproduction_P Parameter: Treatment Value: Drought vs. No Drought
  misc_feature: MA Experiment ID: 20001908 Result: Down-regulated in Transcription
  misc_feature: MA Experiment 20001908 PARAMETER Experiment Name: At_Drought_Reproduction_P Parameter: Age (day) Value: 40
  misc_feature: MA Experiment 20001908 PARAMETER Experiment Name: At_Drought_Reproduction_P Parameter: Organism Value: A. thaliana
  misc_feature: MA Experiment 20001908 PARAMETER Experiment Name: At_Drought_Reproduction_P Parameter: Plant Line Value: WS
  misc_feature: MA Experiment 20001908 PARAMETER Experiment Name: At_Drought_Reproduction_P Parameter: Timepoint (day) Value: 10
  misc_feature: MA Experiment 20001908 PARAMETER Experiment Name: At_Drought_Reproduction_P Parameter: Tissue Value: Siliques
  misc_feature: MA Experiment 20001908 PARAMETER Experiment Name: At_Drought_Reproduction_P Parameter: Treatment Value: Drought vs. No Drought
actacttcagtcttcaagcttcacttctcagaagaaagtaagatctgcgaatctctctcactctcacaaatggcaacgcttttaggtttctctcagactaagtttcaccattgcggcgtctggatttctacgccgccgtgctcatcttcttccacggtagtctcaatggtgggcttgaatcggactgattcgaaaaagctccgttcagatttcctcggccagattggttacgaagatcggagacaagtaagacacagttactgtagaagctcattagctgtgaaaatgtcgtgggacggtcctcttgcttccgtcaagttgatcatccaaggaaaaaacctcgagttatcagagccaattaagcagcatgttgaagagaaagtaggcaaatctgttcagaaacacagtcatcttgtgagagaagttgatgtaagactctctgttcgtggtggagagtttggtaaaggccctaggattcgaagatgtgaggtgacattgtttacaaagaagcatggtgttgtgcgtgctgaggaagatgctgagacagtatacgcttgtatcgacttggtatcaacgataatacagaggaagctgaggaagatcaaggagaaggactcagaccatggaaggcacatgaaaggtttcaacagattgaaggtaagggaaccagtgattgagccggttgtggaggatgttgaggacagtactgactcgagcgtaggagaagaagaagaagaggatgatttgatcaaggagattgtccgtaccaagactttcgagatgccaccattgactgtcgctgaggcagtcgagcagctggaactagtcagtcacgacttctatggcttccaaaatgaagaaactggtgagataaacatagtgtacaagagaaaagaaggaggttacggtctgataatcccaaagaaagacgggaaggccgagaaggttgagccgcttccaaccgagcaattgaatgaacactctttcgccgagtagactgcctctgctcacaccaaaaccgataagctcatctctccttacagtttacctgtgtaggagttagggttcttgaataaacaatgcaacaaagattgtagaagtcagtgtacataaaaaaatggccaaccactctttgttacttttgtggtgaaaaggaagatcttaattctctttccatcagatgatagcaatacattttttcataaacaagaatgttacat

SEQ ID NO: 22710 - protein, 331 aa, Arabidopsis thaliana
  peptide (1)..(331): Ceres Seq. ID no. 12489326
  misc_feature (106)..(208): Pfam Name: Sigma 54 modulation protein / S30EA ribosomal protein Pfam Description: Sigma 54 modulation protein / S30EA ribosomal
  misc_feature (106)..(208): Pfam Name: Sigma 54 modulation protein / S30EA ribosomal protein Pfam Description: Sigma 54 modulation protein / S30EA ribosomal
  misc_feature (105)..(308): Homolog of NCBI NO: 1346469 NR Description: LIGHT REPRESSED PROTEIN A
  misc_feature (105)..(308): Homolog of NCBI NO: 33239849 NR Description: Ribosome-associated protein Y
  misc_feature (105)..(307): Homolog of NCBI NO: 16331216 NR Description: light repressed protein [Synechocystis sp. PCC
  misc_feature (105)..(308): Homolog of NCBI NO: 33860957 NR Description: light repressed protein A homolog
  misc_feature (105)..(310): Homolog of NCBI NO: 17230676 NR Description: light-repressed protein [Nostoc sp. PCC 7120]
  misc_feature (105)..(308): Homolog of NCBI NO: 1346469 NR Description: LIGHT REPRESSED PROTEIN A
  misc_feature (105)..(307): Homolog of NCBI NO: 16331216 NR Description: light repressed protein [Synechocystis sp. PCC
  misc_feature (105)..(310): Homolog of NCBI NO: 17230676 NR Description: light-repressed protein [Nostoc sp. PCC 7120]
  misc_feature (24)..(331): Homolog of NCBI NO: 18420800 NR Description: putative protein
  misc_feature (62)..(331): Homolog of NCBI NO: 134034 NR Description: Plastid-specific 30S ribosomal protein 1,
  misc_feature (62)..(331): Homolog of NCBI NO: 170131 NR Description: ribosomal protein 30S subunit
  misc_feature (64)..(330): Homolog of NCBI NO: 30102988 NR Description: putative ribosomal protein
  misc_feature (62)..(228): Homolog of NCBI NO: 227070 NR Description: ribosomal protein CS-S5
  misc_feature (105)..(308): Homolog of NCBI NO: 33860957 NR Description: light repressed protein A homolog
  misc_feature (105)..(308): Homolog of NCBI NO: 33239849 NR Description: Ribosome-associated protein Y
  misc_feature (62)..(228): Homolog of NCBI NO: 227070 NR Description: ribosomal protein CS-S5
  misc_feature (64)..(330): Homolog of NCBI NO: 30102988 NR Description: putative ribosomal protein
  misc_feature (62)..(331): Homolog of NCBI NO: 170131 NR Description: ribosomal protein 30S subunit
  misc_feature (62)..(331): Homolog of NCBI NO: 134034 NR Description: Plastid-specific 30S ribosomal protein 1,
  misc_feature (24)..(331): Homolog of NCBI NO: 18420800 NR Description: putative protein
TTSVFKLHFSEESKICESLSLSQMATLLGFSQTKFHHCGVWISTPPCSSSSTVVSMVGLNRTDSKKLRSDFLGQIGYEDRRQVRHSYCRSSLAVKMSWDGPLASVKLIIQGKNLELSEPIKQHVEEKVGKSVQKHSHLVREVDVRLSVRGGEFGKGPRIRRCEVTLFTKKHGVVRAEEDAETVYACIDLVSTIIQRKLRKIKEKDSDHGRHMKGFNRLKVREPVIEPVVEDVEDSTDSSVGEEEEEDDLIKEIVRTKTFEMPPLTVAEAVEQLELVSHDFYGFQNEETGEINIVYKRKEGGYGLIIPKKDGKAEKVEPLPTEQLNEHSFAE

SEQ ID NO: 22711 - protein, 308 aa, Arabidopsis thaliana
  peptide (1)..(308): Ceres Seq. ID no. 12489327
  misc_feature (83)..(185): Pfam Name: Sigma 54 modulation protein / S30EA ribosomal protein Pfam Description: Sigma 54 modulation protein / S30EA ribosomal
  misc_feature (83)..(185): Pfam Name: Sigma 54 modulation protein / S30EA ribosomal protein Pfam Description: Sigma 54 modulation protein / S30EA ribosomal
  misc_feature (82)..(285): Homolog of NCBI NO: 1346469 NR Description: LIGHT REPRESSED PROTEIN A
  misc_feature (82)..(285): Homolog of NCBI NO: 33239849 NR Description: Ribosome-associated protein Y
  misc_feature (82)..(284): Homolog of NCBI NO: 16331216 NR Description: light repressed protein [Synechocystis sp. PCC
  misc_feature (82)..(285): Homolog of NCBI NO: 33860957 NR Description: light repressed protein A homolog
  misc_feature (82)..(287): Homolog of NCBI NO: 17230676 NR Description: light-repressed protein [Nostoc sp. PCC 7120]
  misc_feature (82)..(285): Homolog of NCBI NO: 1346469 NR Description: LIGHT REPRESSED PROTEIN A
  misc_feature (82)..(284): Homolog of NCBI NO: 16331216 NR Description: light repressed protein [Synechocystis sp. PCC
  misc_feature (82)..(287): Homolog of NCBI NO: 17230676 NR Description: light-repressed protein [Nostoc sp. PCC 7120]
  misc_feature (1)..(308): Homolog of NCBI NO: 18420800 NR Description: putative protein
  misc_feature (39)..(308): Homolog of NCBI NO: 134034 NR Description: Plastid-specific 30S ribosomal protein 1,
  misc_feature (39)..(308): Homolog of NCBI NO: 170131 NR Description: ribosomal protein 30S subunit
  misc_feature (41)..(307): Homolog of NCBI NO: 30102988 NR Description: putative ribosomal protein
  misc_feature (39)..(205): Homolog of NCBI NO: 227070 NR Description: ribosomal protein CS-S5
  misc_feature (82)..(285): Homolog of NCBI NO: 33860957 NR Description: light repressed protein A homolog
  misc_feature (82)..(285): Homolog of NCBI NO: 33239849 NR Description: Ribosome-associated protein Y
  misc_feature (39)..(205): Homolog of NCBI NO: 227070 NR Description: ribosomal protein CS-S5
  misc_feature (41)..(307): Homolog of NCBI NO: 30102988 NR Description: putative ribosomal protein
  misc_feature (39)..(308): Homolog of NCBI NO: 170131 NR Description: ribosomal protein 30S subunit
  misc_feature (39)..(308): Homolog of NCBI NO: 134034 NR Description: Plastid-specific 30S ribosomal protein 1,
  misc_feature (1)..(308): Homolog of NCBI NO: 18420800 NR Description: putative protein
MATLLGFSQTKFHHCGVWISTPPCSSSSTVVSMVGLNRTDSKKLRSDFLGQIGYEDRRQVRHSYCRSSLAVKMSWDGPLASVKLIIQGKNLELSEPIKQHVEEKVGKSVQKHSHLVREVDVRLSVRGGEFGKGPRIRRCEVTLFTKKHGVVRAEEDAETVYACIDLVSTIIQRKLRKIKEKDSDHGRHMKGFNRLKVREPVIEPVVEDVEDSTDSSVGEEEEEDDLIKEIVRTKTFEMPPLTVAEAVEQLELVSHDFYGFQNEETGEINIVYKRKEGGYGLIIPKKDGKAEKVEPLPTEQLNEHSFAE

SEQ ID NO: 22712 - protein, 276 aa, Arabidopsis thaliana
  peptide (1)..(276): Ceres Seq. ID no. 12489328
  misc_feature (51)..(153): Pfam Name: Sigma 54 modulation protein / S30EA ribosomal protein Pfam Description: Sigma 54 modulation protein / S30EA ribosomal
  misc_feature (51)..(153): Pfam Name: Sigma 54 modulation protein / S30EA ribosomal protein Pfam Description: Sigma 54 modulation protein / S30EA ribosomal
  misc_feature (50)..(253): Homolog of NCBI NO: 1346469 NR Description: LIGHT REPRESSED PROTEIN A
  misc_feature (50)..(253): Homolog of NCBI NO: 33239849 NR Description: Ribosome-associated protein Y
  misc_feature (50)..(252): Homolog of NCBI NO: 16331216 NR Description: light repressed protein [Synechocystis sp. PCC
  misc_feature (50)..(253): Homolog of NCBI NO: 33860957 NR Description: light repressed protein A homolog
  misc_feature (50)..(255): Homolog of NCBI NO: 17230676 NR Description: light-repressed protein [Nostoc sp. PCC 7120]
  misc_feature (50)..(253): Homolog of NCBI NO: 1346469 NR Description: LIGHT REPRESSED PROTEIN A
  misc_feature (50)..(252): Homolog of NCBI NO: 16331216 NR Description: light repressed protein [Synechocystis sp. PCC
  misc_feature (50)..(255): Homolog of NCBI NO: 17230676 NR Description: light-repressed protein [Nostoc sp. PCC 7120]
  misc_feature (1)..(276): Homolog of NCBI NO: 18420800 NR Description: putative protein
  misc_feature (7)..(276): Homolog of NCBI NO: 134034 NR Description: Plastid-specific 30S ribosomal protein 1,
  misc_feature (7)..(276): Homolog of NCBI NO: 170131 NR Description: ribosomal protein 30S subunit
  misc_feature (9)..(275): Homolog of NCBI NO: 30102988 NR Description: putative ribosomal protein
  misc_feature (7)..(173): Homolog of NCBI NO: 227070 NR Description: ribosomal protein CS-S5
  misc_feature (50)..(253): Homolog of NCBI NO: 33860957 NR Description: light repressed protein A homolog
  misc_feature (50)..(253): Homolog of NCBI NO: 33239849 NR Description: Ribosome-associated protein Y
  misc_feature (7)..(173): Homolog of NCBI NO: 227070 NR Description: ribosomal protein CS-S5
  misc_feature (9)..(275): Homolog of NCBI NO: 30102988 NR Description: putative ribosomal protein
  misc_feature (7)..(276): Homolog of NCBI NO: 170131 NR Description: ribosomal protein 30S subunit
  misc_feature (7)..(276): Homolog of NCBI NO: 134034 NR Description: Plastid-specific 30S ribosomal protein 1,
  misc_feature (1)..(276): Homolog of NCBI NO: 18420800 NR Description: putative protein
MVGLNRTDSKKLRSDFLGQIGYEDRRQVRHSYCRSSLAVKMSWDGPLASVKLIIQGKNLELSEPIKQHVEEKVGKSVQKHSHLVREVDVRLSVRGGEFGKGPRIRRCEVTLFTKKHGVVRAEEDAETVYACIDLVSTIIQRKLRKIKEKDSDHGRHMKGFNRLKVREPVIEPVVEDVEDSTDSSVGEEEEEDDLIKEIVRTKTFEMPPLTVAEAVEQLELVSHDFYGFQNEETGEINIVYKRKEGGYGLIIPKKDGKAEKVEPLPTEQLNEHSFAE

SEQ ID NO: 22713 - DNA, 1254 bp, Arabidopsis thaliana
  misc_feature (1)..(1254): Ceres Seq. ID no. 12726211
  misc_feature: MA Experiment ID: 20000328 Result: Up-regulated in Transcription
  misc_feature: MA Experiment 20000328 PARAMETER Experiment Name: At_42deg_Heat_Sub_P Parameter: Age (day) Value: 14
  misc_feature: MA Experiment 20000328 PARAMETER Experiment Name: At_42deg_Heat_Sub_P Parameter: Organism Value: A. thaliana
  misc_feature: MA Experiment 20000328 PARAMETER Experiment Name: At_42deg_Heat_Sub_P Parameter: Plant Line Value: WS
  misc_feature: MA Experiment 20000328 PARAMETER Experiment Name: At_42deg_Heat_Sub_P Parameter: Temperature (deg C) Value: 42 vs. 22
  misc_feature: MA Experiment 20000328 PARAMETER Experiment Name: At_42deg_Heat_Sub_P Parameter: Timepoint (hr) Value: 6
  misc_feature: MA Experiment 20000328 PARAMETER Experiment Name: At_42deg_Heat_Sub_P Parameter: Tissue Value: Aerial
gactggattactcacctactcgagagtggtttagcttttttgtaccgtacatcttcttcccagaaacatggctgaggcttctgatttgttggaatggcctaagaaggataaccgtcgttttctccatgttgtctaccgcgttggtgatcttgatcgcaccattgagttttacactgaggtctttggtatgaagctgttgaggaaaagagatatccctgaggagaagtattctaatgcttttcttggttttggacctgaaacatctaactttgttgtggagctcacatataactatggtgttagctcatatgatattggaactggctttgggcattttgccatttcaactcaagatgtttccaaactggttgagaacgtccgtgccaagggtggaaatgtgactagggaacctggtccagtcaaaggtggaggcagtgtcattgcgtttgtgaaggaccctgatggctacacttttgagctcatccagagaggtccaactcctgaacctttctgccaagtcatgcttcgtgttggtgatctcgaccgtgccatcaaattctatgaaaaggccctcgggatgagactcttgagaaagattgagagacctgagtacaagtacaccataggcatgatggggtatgctgaagaatacgagtcgatagttttggagctgacctataactacgacgtgactgagtacacaaagggcaatgcatatgcacagattgcaataggcacagatgatgtgtacaaaagcggtgaagttattaagatagtcaaccaagagctaggaggaaagatcactagagaagccggacctcttcctggactcggcaccaagattgtctcattccttgatccagatggctggaaaacggttttggtggacaacaaagattttctcaaggaactggaatgagaagagcgatgaatgaaggtcgagatcacaaaaccataataataaaaatgtgatcataaaataaaaggaagacttagagtttgatctaaaataagaagatgtggtttagtttgtgtcgtgctatgtgtgtgtgctcgtttcttttgtctttgagcttaaaagttaaaactctagtctatatggacctgaataaaaatatttccaccaccttgaggttttggtgtttgcggttatggacggtttattgaatgtaatattttcgtaccaaatcggtttactagatttgagacggatcatatggctcttcttggaaaaagagacggtttaaatcggtt

SEQ ID NO: 22714 - protein, 283 aa, Arabidopsis thaliana
  peptide (1)..(283): Ceres Seq. ID no. 12726212
  misc_feature (1)..(283): Homolog of NCBI NO: 11281993 NR Description: lactoylglutathione lyase (EC 4.4.1.5)
  misc_feature (1)..(283): Homolog of NCBI NO: 7619802 NR Description: putative glyoxalase I [Triticum aestivum]
  misc_feature (7)..(283): Homolog of NCBI NO: 16580747 NR Description: glyoxalase I [Oryza sativa (japonica
  misc_feature (7)..(283): Homolog of NCBI NO: 4126809 NR Description: glyoxalase I [Oryza sativa (japonica
  misc_feature (1)..(219): Homolog of NCBI NO: 30682449 NR Description: glyoxalase I, putative (lactoylglutathione lyase)
  misc_feature (1)..(283): Homolog of NCBI NO: 2213425 NR Description: hypothetical protein [Citrus x paradisi]
  misc_feature (28)..(283): Homolog of NCBI NO: 7488556 NR Description: hypothetical protein - wild cabbage (fragment)
  misc_feature (1)..(283): Homolog of NCBI NO: 2494843 NR Description: Putative lactoylglutathione lyase (Aldoketomutase) (Glyoxalase I) (Glx I) (Ketone-aldehyde mutase)
  misc_feature (1)..(283): Homolog of NCBI NO: 15810219 NR Description: putative lactoylglutathione lyase [Arabidopsis
  misc_feature (1)..(283): Homolog of NCBI NO: 15221116 NR Description: glyoxalase I, putative (lactoylglutathione lyase)
MAEASDLLEWPKKDNRRFLHVVYRVGDLDRTIEFYTEVFGMKLLRKRDIPEEKYSNAFLGFGPETSNFVVELTYNYGVSSYDIGTGFGHFAISTQDVSKLVENVRAKGGNVTREPGPVKGGGSVIAFVKDPDGYTFELIQRGPTPEPFCQVMLRVGDLDRAIKFYEKALGMRLLRKIERPEYKYTIGMMGYAEEYESIVLELTYNYDVTEYTKGNAYAQIAIGTDDVYKSGEVIKIVNQELGGKITREAGPLPGLGTKIVSFLDPDGWKTVLVDNKDFLKELE

SEQ ID NO: 22715 - protein, 243 aa, Arabidopsis thaliana
  peptide (1)..(243): Ceres Seq. ID no. 12726213
  misc_feature (1)..(243): Homolog of NCBI NO: 11281993 NR Description: lactoylglutathione lyase (EC 4.4.1.5)
  misc_feature (1)..(243): Homolog of NCBI NO: 7619802 NR Description: putative glyoxalase I [Triticum aestivum]
  misc_feature (1)..(243): Homolog of NCBI NO: 16580747 NR Description: glyoxalase I [Oryza sativa (japonica
  misc_feature (1)..(243): Homolog of NCBI NO: 4126809 NR Description: glyoxalase I [Oryza sativa (japonica
  misc_feature (1)..(179): Homolog of NCBI NO: 30682449 NR Description: glyoxalase I, putative (lactoylglutathione lyase)
  misc_feature (1)..(243): Homolog of NCBI NO: 2213425 NR Description: hypothetical protein [Citrus x paradisi]
  misc_feature (1)..(243): Homolog of NCBI NO: 7488556 NR Description: hypothetical protein - wild cabbage (fragment)
  misc_feature (1)..(243): Homolog of NCBI NO: 2494843 NR Description: Putative lactoylglutathione lyase (Aldoketomutase) (Glyoxalase I) (Glx I) (Ketone-aldehyde mutase)
  misc_feature (1)..(243): Homolog of NCBI NO: 15810219 NR Description: putative lactoylglutathione lyase [Arabidopsis
  misc_feature (1)..(243): Homolog of NCBI NO: 15221116 NR Description: glyoxalase I, putative (lactoylglutathione lyase)
MKLLRKRDIPEEKYSNAFLGFGPETSNFVVELTYNYGVSSYDIGTGFGHFAISTQDVSKLVENVRAKGGNVTREPGPVKGGGSVIAFVKDPDGYTFELIQRGPTPEPFCQVMLRVGDLDRAIKFYEKALGMRLLRKIERPEYKYTIGMMGYAEEYESIVLELTYNYDVTEYTKGNAYAQIAIGTDDVYKSGEVIKIVNQELGGKITREAGPLPGLGTKIVSFLDPDGWKTVLVDNKDFLKELE

SEQ ID NO: 22716 - DNA, 1318 bp, Arabidopsis thaliana
  misc_feature (1)..(1318): Ceres Seq. ID no. 12370474
  misc_feature: MA Experiment ID: 20000087 Result: Down-regulated in Transcription
  misc_feature: MA Experiment 20000087 PARAMETER Experiment Name: At_100uM_ABA_Mutants_cDNA_P Parameter: Plant Line Value: WS
  misc_feature: MA Experiment 20000087 PARAMETER Experiment Name: At_100uM_ABA_Mutants_cDNA_P Parameter: Timepoint (hr) Value: 6
  misc_feature: MA Experiment 20000087 PARAMETER Experiment Name: At_100uM_ABA_Mutants_cDNA_P Parameter: Tissue Value: Aerial
  misc_feature: MA Experiment 20000087 PARAMETER Experiment Name: At_100uM_ABA_Mutants_cDNA_P Parameter: Treatment Value: 100uM ABA vs. No Treatment
  misc_feature: MA Experiment ID: 20000179 Result: Up-regulated in Transcription
  misc_feature: MA Experiment 20000179 PARAMETER Experiment Name: At_Germinating_Seeds_P Parameter: Age (hr) Value: 6 vs. 0
  misc_feature: MA Experiment 20000179 PARAMETER Experiment Name: At_Germinating_Seeds_P Parameter: Tissue Value: Germinating Seeds
  misc_feature: MA Experiment ID: 20000185 Result: Up-regulated in Transcription
  misc_feature: MA Experiment 20000185 PARAMETER Experiment Name: At_Roots__P Parameter: Age (day) Value: 7 vs. 21
  misc_feature: MA Experiment 20000185 PARAMETER Experiment Name: At_Roots__P Parameter: Organism Value: A. thaliana
  misc_feature: MA Experiment 20000185 PARAMETER Experiment Name: At_Roots__P Parameter: Tissue Value: Roots vs. Whole Plant
  misc_feature: MA Experiment ID: 20000437 Result: Down-regulated in Transcription
  misc_feature: MA Experiment 20000437 PARAMETER Experiment Name: At_Drought_P Parameter: Age (day) Value: 8
  misc_feature: MA Experiment 20000437 PARAMETER Experiment Name: At_Drought_P Parameter: Organism Value: A. thaliana
  misc_feature: MA Experiment 20000437 PARAMETER Experiment Name: At_Drought_P Parameter: Plant Line Value: WS
  misc_feature: MA Experiment 20000437 PARAMETER Experiment Name: At_Drought_P Parameter: Timepoint (hr) Value: 24
  misc_feature: MA Experiment 20000437 PARAMETER Experiment Name: At_Drought_P Parameter: Tissue Value: Whole Plant
  misc_feature: MA Experiment 20000437 PARAMETER Experiment Name: At_Drought_P Parameter: Treatment Value: Drought vs. No Drought
  misc_feature: MA Experiment ID: 20000794 Result: Down-regulated in Transcription
  misc_feature: MA Experiment 20000794 PARAMETER Experiment Name: At_Petals_P Parameter: Age (day) Value: 23-25 days
  misc_feature: MA Experiment 20000794 PARAMETER Experiment Name: At_Petals_P Parameter: Plant Line Value: WS
  misc_feature: MA Experiment 20000794 PARAMETER Experiment Name: At_Petals_P Parameter: Tissue Value: Petals vs. Whole plant
  misc_feature: MA Experiment ID: 20001459 Result: Up-regulated in Transcription
  misc_feature: MA Experiment 20001459 PARAMETER Experiment Name: At_50mM_NH4NO3_L-to-H_P Parameter: Age (day) Value: Undefined
  misc_feature: MA Experiment 20001459 PARAMETER Experiment Name: At_50mM_NH4NO3_L-to-H_P Parameter: Organism Value: Undefined
  misc_feature: MA Experiment 20001459 PARAMETER Experiment Name: At_50mM_NH4NO3_L-to-H_P Parameter: Plant Line Value: Undefined
  misc_feature: MA Experiment 20001459 PARAMETER Experiment Name: At_50mM_NH4NO3_L-to-H_P Parameter: Timepoint (hr) Value: 4
  misc_feature: MA Experiment 20001459 PARAMETER Experiment Name: At_50mM_NH4NO3_L-to-H_P Parameter: Tissue Value: Siliques
  misc_feature: MA Experiment 20001459 PARAMETER Experiment Name: At_50mM_NH4NO3_L-to-H_P Parameter: Treatment Value: 50mM NH4NO3 vs. 100mM Manitol
  misc_feature: MA Experiment ID: 20001905 Result: Down-regulated in Transcription
  misc_feature: MA Experiment 20001905 PARAMETER Experiment Name: At_Drought_Reproduction_P Parameter: Age (day) Value: 40
  misc_feature: MA Experiment 20001905 PARAMETER Experiment Name: At_Drought_Reproduction_P Parameter: Organism Value: A. thaliana
  misc_feature: MA Experiment 20001905 PARAMETER Experiment Name: At_Drought_Reproduction_P Parameter: Plant Line Value: WS
  misc_feature: MA Experiment 20001905 PARAMETER Experiment Name: At_Drought_Reproduction_P Parameter: Timepoint (day) Value: 10
  misc_feature: MA Experiment 20001905 PARAMETER Experiment Name: At_Drought_Reproduction_P Parameter: Tissue Value: Rosettes
  misc_feature: MA Experiment 20001905 PARAMETER Experiment Name: At_Drought_Reproduction_P Parameter: Treatment Value: Drought vs. No Drought
aaaacccaaaccctcactcactattttcacattcttcttctctctcgatatcatctaaatctctctcttgatctcaatttcgcaaaatggctgacaagaagatcagaatcggaatcaacggtttcggaagaatcggtcgtttggttgctagagttgttcttcagagggatgatgttgagctcgtcgctgttaacgatcctttcatcaccaccgagtacatgacatacatgtttaagtatgacagtgttcacggtcagtggaagcaccatgagcttaaggtgaaggatgacaaaactcttctcttcggtgagaagccagtcactgttttcggcatcaggaaccctgaggacatcccatggggtgaggctggagctgactttgttgttgagtctactggtgtcttcactgacaaagacaaggctgctgctcacttgaagggtggtgctaaaaaggttgtcatctctgccccaagcaaagatgcgcccatgttcgttgttggtgtcaacgagcacgagtacaagtctgaccttgacattgtttccaacgctagttgcaccactaactgccttgctcctcttgccaaggttattaatgacaggtttggcattgttgagggactcatgaccactgtccactctatcactgctactcagaagacagttgatggtccatcaatgaaggactggagaggtggaagagctgcttccttcaacattattcctagcagcactggtgccgccaaggctgttgggaaagtgttgccatccctcaatggaaaattgaccggaatgtctttccgtgttccaaccgttgatgtctcagttgttgatctcaccgttagacttgagaaagctgcaacatacgacgaaatcaagaaggccatcaaggaggaatctgaaggcaaaatgaagggaattttgggatacactgaggatgatgttgtgtctaccgactttgttggtgacaacaggtcaagcattttcgatgccaaggctgggattgcattgagcgacaagtttgtgaagttggtgtcatggtacgacaacgaatggggttacagttctcgtgtcgttgaccttatcgttcacatgtcaaaggcctaagcttacaccggcgagagtttgtgtgtggttgagttcgtactgttctgaataaaaaaaaggagaaaagaaaactcgagttgttatgttttttcactgattccatgcgcagtcatgagagtttgtagcttttgtctttttgctttctcttaatgtttccctgctttatttactgaaaccattggtttggttttttatgttaattaagtttttagtcc

SEQ ID NO: 22717 - protein, 338 aa, Arabidopsis thaliana
  peptide (1)..(338): Ceres Seq. ID no. 12370475
  misc_feature (157)..(318): Pfam Name: Glyceraldehyde 3-phosphate dehydrogenase, Pfam Description: Glyceraldehyde 3-phosphate dehydrogenase,
  misc_feature (5)..(336): Homolog of NCBI NO: 4539543 NR Description: glyceraldehyde-3-phosphate dehydrogenase
  misc_feature (6)..(337): Homolog of NCBI NO: 462137 NR Description: GLYCERALDEHYDE 3-PHOSPHATE DEHYDROGENASE,
  misc_feature (5)..(337): Homolog of NCBI NO: 462141 NR Description: Glyceraldehyde 3-phosphate dehydrogenase (GAPDH)
  misc_feature (1)..(336): Homolog of NCBI NO: 120669 NR Description: Glyceraldehyde 3-phosphate dehydrogenase,
  misc_feature (1)..(338): Homolog of NCBI NO: 22094840 NR Description: glyceraldehyde 3-phosphate dehydrogenase [Solanum
  misc_feature (1)..(338): Homolog of NCBI NO: 120675 NR Description: Glyceraldehyde 3-phosphate dehydrogenase,
  misc_feature (1)..(338): Homolog of NCBI NO: 81622 NR Description: glyceraldehyde-3-phosphate dehydrogenase
  misc_feature (1)..(338): Homolog of NCBI NO: 21593240 NR Description: glyceraldehyde-3-phosphate dehydrogenase C
  misc_feature (1)..(338): Homolog of NCBI NO: 15229231 NR Description: glyceraldehyde-3-phosphate dehydrogenase C
  misc_feature (1)..(338): Homolog of NCBI NO: 15222848 NR Description: glyceraldehyde-3-phosphate dehydrogenase, putative
MADKKIRIGINGFGRIGRLVARVVLQRDDVELVAVNDPFITTEYMTYMFKYDSVHGQWKHHELKVKDDKTLLFGEKPVTVFGIRNPEDIPWGEAGADFVVESTGVFTDKDKAAAHLKGGAKKVVISAPSKDAPMFVVGVNEHEYKSDLDIVSNASCTTNCLAPLAKVINDRFGIVEGLMTTVHSITATQKTVDGPSMKDWRGGRAASFNIIPSSTGAAKAVGKVLPSLNGKLTGMSFRVPTVDVSVVDLTVRLEKAATYDEIKKAIKEESEGKMKGILGYTEDDVVSTDFVGDNRSSIFDAKAGIALSDKFVKLVSWYDNEWGYSSRVVDLIVHMSKA

SEQ ID NO: 22718 - protein, 294 aa, Arabidopsis thaliana
  peptide (1)..(294): Ceres Seq. ID no. 12370476
  misc_feature (113)..(274): Pfam Name: Glyceraldehyde 3-phosphate dehydrogenase, Pfam Description: Glyceraldehyde 3-phosphate dehydrogenase,
  misc_feature (1)..(294): Homolog of NCBI NO: 22094840 NR Description: glyceraldehyde 3-phosphate dehydrogenase [Solanum
  misc_feature (1)..(294): Homolog of NCBI NO: 120675 NR Description: Glyceraldehyde 3-phosphate dehydrogenase,
  misc_feature (1)..(294): Homolog of NCBI NO: 81622 NR Description: glyceraldehyde-3-phosphate dehydrogenase
  misc_feature (1)..(292): Homolog of NCBI NO: 4539543 NR Description: glyceraldehyde-3-phosphate dehydrogenase
  misc_feature (1)..(293): Homolog of NCBI NO: 462141 NR Description: Glyceraldehyde 3-phosphate dehydrogenase (GAPDH)
  misc_feature (1)..(292): Homolog of NCBI NO: 120669 NR Description: Glyceraldehyde 3-phosphate dehydrogenase,
  misc_feature (1)..(293): Homolog of NCBI NO: 462137 NR Description: GLYCERALDEHYDE 3-PHOSPHATE DEHYDROGENASE,
  misc_feature (1)..(294): Homolog of NCBI NO: 21593240 NR Description: glyceraldehyde-3-phosphate dehydrogenase C
  misc_feature (1)..(294): Homolog of NCBI NO: 15229231 NR Description: glyceraldehyde-3-phosphate dehydrogenase C
  misc_feature (1)..(294): Homolog of NCBI NO: 15222848 NR Description: glyceraldehyde-3-phosphate dehydrogenase, putative
MTYMFKYDSVHGQWKHHELKVKDDKTLLFGEKPVTVFGIRNPEDIPWGEAGADFVVESTGVFTDKDKAAAHLKGGAKKVVISAPSKDAPMFVVGVNEHEYKSDLDIVSNASCTTNCLAPLAKVINDRFGIVEGLMTTVHSITATQKTVDGPSMKDWRGGRAASFNIIPSSTGAAKAVGKVLPSLNGKLTGMSFRVPTVDVSVVDLTVRLEKAATYDEIKKAIKEESEGKMKGILGYTEDDVVSTDFVGDNRSSIFDAKAGIALSDKFVKLVSWYDNEWGYSSRVVDLIVHMSKA

SEQ ID NO: 22719 - protein, 291 aa, Arabidopsis thaliana
  peptide (1)..(291): Ceres Seq. ID no. 12370477
  misc_feature (110)..(271): Pfam Name: Glyceraldehyde 3-phosphate dehydrogenase, Pfam Description: Glyceraldehyde 3-phosphate dehydrogenase,
  misc_feature (1)..(289): Homolog of NCBI NO: 4539543 NR Description: glyceraldehyde-3-phosphate dehydrogenase
  misc_feature (1)..(290): Homolog of NCBI NO: 462137 NR Description: GLYCERALDEHYDE 3-PHOSPHATE DEHYDROGENASE,
  misc_feature (1)..(290): Homolog of NCBI NO: 462141 NR Description: Glyceraldehyde 3-phosphate dehydrogenase (GAPDH)
  misc_feature (1)..(289): Homolog of NCBI NO: 120669 NR Description: Glyceraldehyde 3-phosphate dehydrogenase,
  misc_feature (1)..(291): Homolog of NCBI NO: 22094840 NR Description: glyceraldehyde 3-phosphate dehydrogenase [Solanum
  misc_feature (1)..(291): Homolog of NCBI NO: 120675 NR Description: Glyceraldehyde 3-phosphate dehydrogenase,
  misc_feature (1)..(291): Homolog of NCBI NO: 81622 NR Description: glyceraldehyde-3-phosphate dehydrogenase
  misc_feature (1)..(291): Homolog of NCBI NO: 21593240 NR Description: glyceraldehyde-3-phosphate dehydrogenase C
  misc_feature (1)..(291): Homolog of NCBI NO: 15229231 NR Description: glyceraldehyde-3-phosphate dehydrogenase C
  misc_feature (1)..(291): Homolog of NCBI NO: 15222848 NR Description: glyceraldehyde-3-phosphate dehydrogenase, putative
MFKYDSVHGQWKHHELKVKDDKTLLFGEKPVTVFGIRNPEDIPWGEAGADFVVESTGVFTDKDKAAAHLKGGAKKVVISAPSKDAPMFVVGVNEHEYKSDLDIVSNASCTTNCLAPLAKVINDRFGIVEGLMTTVHSITATQKTVDGPSMKDWRGGRAASFNIIPSSTGAAKAVGKVLPSLNGKLTGMSFRVPTVDVSVVDLTVRLEKAATYDEIKKAIKEESEGKMKGILGYTEDDVVSTDFVGDNRSSIFDAKAGIALSDKFVKLVSWYDNEWGYSSRVVDLIVHMSKA

SEQ ID NO: 22720 - DNA, 1612 bp, Arabidopsis thaliana
  misc_feature (1)..(1612): Ceres Seq. ID no. 13490680
  misc_feature: MA Experiment ID: 108434 Result: Up-regulated in Transcription
  misc_feature: MA Experiment 108434 PARAMETER Experiment Name: At_Root_Tips_cDNA_P Parameter: Tissue Value: Root Tips
  misc_feature: MA Experiment ID: 108462 Result: Down-regulated in Transcription
  misc_feature: MA Experiment 108462 PARAMETER Experiment Name: At_Germinating_Seeds_cDNA_P Parameter: Age (day) Value: 2 vs. 0
  misc_feature: MA Experiment 108462 PARAMETER Experiment Name: At_Germinating_Seeds_cDNA_P Parameter: Tissue Value: Germinating Seeds
  misc_feature: MA Experiment ID: 108463 Result: Down-regulated in Transcription
  misc_feature: MA Experiment 108463 PARAMETER Experiment Name: At_Germinating_Seeds_cDNA_P Parameter: Age (day) Value: 3 vs. 0
  misc_feature: MA Experiment 108463 PARAMETER Experiment Name: At_Germinating_Seeds_cDNA_P Parameter: Tissue Value: Germinating Seeds
  misc_feature: MA Experiment ID: 108489 Result: Up-regulated in Transcription
  misc_feature: MA Experiment ID: 108595 Result: Down-regulated in Transcription
  misc_feature: MA Experiment 108595 PARAMETER Experiment Name: At_Ler-pi_Ovule_cDNA_P Parameter: Plant Line Value: null
  misc_feature: MA Experiment ID: 20000087 Result: Down-regulated in Transcription
  misc_feature: MA Experiment 20000087 PARAMETER Experiment Name: At_100uM_ABA_Mutants_cDNA_P Parameter: Plant Line Value: WS
  misc_feature: MA Experiment 20000087 PARAMETER Experiment Name: At_100uM_ABA_Mutants_cDNA_P Parameter: Timepoint (hr) Value: 6
  misc_feature: MA Experiment 20000087 PARAMETER Experiment Name: At_100uM_ABA_Mutants_cDNA_P Parameter: Tissue Value: Aerial
  misc_feature: MA Experiment 20000087 PARAMETER Experiment Name: At_100uM_ABA_Mutants_cDNA_P Parameter: Treatment Value: 100uM ABA vs. No Treatment
  misc_feature: MA Experiment ID: 20000179 Result: Up-regulated in Transcription
  misc_feature: MA Experiment 20000179 PARAMETER Experiment Name: At_Germinating_Seeds_P Parameter: Age (hr) Value: 6 vs. 0
  misc_feature: MA Experiment 20000179 PARAMETER Experiment Name: At_Germinating_Seeds_P Parameter: Tissue Value: Germinating Seeds
  misc_feature: MA Experiment ID: 20000227 Result: Up-regulated in Transcription
  misc_feature: MA Experiment 20000227 PARAMETER Experiment Name: At_Root-Tips-vs-Tops_P Parameter: Tissue Value: Root Tips vs. Root Tops
  misc_feature: MA Experiment ID: 20000496 Result: Up-regulated in Transcription
  misc_feature: MA Experiment 20000496 PARAMETER Experiment Name: At_Guard_Cells_P Parameter: Harvest Date Value: 7/19/2002
  misc_feature: MA Experiment 20000496 PARAMETER Experiment Name: At_Guard_Cells_P Parameter: Organism Value: Canola
  misc_feature: MA Experiment 20000496 PARAMETER Experiment Name: At_Guard_Cells_P Parameter: Tissue Value: Guard Cells vs. Leaves
  misc_feature: MA Experiment ID: 20001451 Result: Down-regulated in Transcription
  misc_feature: MA Experiment 20001451 PARAMETER Experiment Name: At_Far-red-induction_P Parameter: Age (day) Value: 7
  misc_feature: MA Experiment 20001451 PARAMETER Experiment Name: At_Far-red-induction_P Parameter: Light Value: Far-red vs. White
  misc_feature: MA Experiment 20001451 PARAMETER Experiment Name: At_Far-red-induction_P Parameter: Organism Value: A. thaliana
  misc_feature: MA Experiment 20001451 PARAMETER Experiment Name: At_Far-red-induction_P Parameter: Plant Line Value: Columbia
  misc_feature: MA Experiment 20001451 PARAMETER Experiment Name: At_Far-red-induction_P Parameter: Timepoint (hr) Value: 24
  misc_feature: MA Experiment 20001451 PARAMETER Experiment Name: At_Far-red-induction_P Parameter: Tissue Value: Whole Plant
  misc_feature: MA Experiment ID: 20001458 Result: Up-regulated in Transcription
  misc_feature: MA Experiment 20001458 PARAMETER Experiment Name: At_50mM_NH4NO3_L-to-H_P Parameter: Age (day) Value: Undefined
  misc_feature: MA Experiment 20001458 PARAMETER Experiment Name: At_50mM_NH4NO3_L-to-H_P Parameter: Organism Value: Undefined
  misc_feature: MA Experiment 20001458 PARAMETER Experiment Name: At_50mM_NH4NO3_L-to-H_P Parameter: Plant Line Value: Undefined
  misc_feature: MA Experiment 20001458 PARAMETER Experiment Name: At_50mM_NH4NO3_L-to-H_P Parameter: Timepoint (hr) Value: 2
  misc_feature: MA Experiment 20001458 PARAMETER Experiment Name: At_50mM_NH4NO3_L-to-H_P Parameter: Tissue Value: Siliques
  misc_feature: MA Experiment 20001458 PARAMETER Experiment Name: At_50mM_NH4NO3_L-to-H_P Parameter: Treatment Value: 50mM NH4NO3 vs. 100mM Manitol
  misc_feature: MA Experiment ID: 20001459 Result: Up-regulated in Transcription
  misc_feature: MA Experiment 20001459 PARAMETER Experiment Name: At_50mM_NH4NO3_L-to-H_P Parameter: Age (day) Value: Undefined
  misc_feature: MA Experiment 20001459 PARAMETER Experiment Name: At_50mM_NH4NO3_L-to-H_P Parameter: Organism Value: Undefined
  misc_feature: MA Experiment 20001459 PARAMETER Experiment Name: At_50mM_NH4NO3_L-to-H_P Parameter: Plant Line Value: Undefined
  misc_feature: MA Experiment 20001459 PARAMETER Experiment Name: At_50mM_NH4NO3_L-to-H_P Parameter: Timepoint (hr) Value: 4
  misc_feature: MA Experiment 20001459 PARAMETER Experiment Name: At_50mM_NH4NO3_L-to-H_P Parameter: Tissue Value: Siliques
  misc_feature: MA Experiment 20001459 PARAMETER Experiment Name: At_50mM_NH4NO3_L-to-H_P Parameter: Treatment Value: 50mM NH4NO3 vs. 100mM Manitol
  misc_feature: MA Experiment ID: 20001557 Result: Up-regulated in Transcription
  misc_feature: MA Experiment 20001557 PARAMETER Experiment Name: At_Drought_Soil_Dry_P Parameter: Age (day) Value: 27
  misc_feature: MA Experiment 20001557 PARAMETER Experiment Name: At_Drought_Soil_Dry_P Parameter: Organism Value: A. thaliana
  misc_feature: MA Experiment 20001557 PARAMETER Experiment Name: At_Drought_Soil_Dry_P Parameter: Plant Line Value: WS
  misc_feature: MA Experiment 20001557 PARAMETER Experiment Name: At_Drought_Soil_Dry_P Parameter: Post Timepoint (hr) Value: 3
  misc_feature: MA Experiment 20001557 PARAMETER Experiment Name: At_Drought_Soil_Dry_P Parameter: Post-Treatment Value: Re-Water vs. No Drought
  misc_feature: MA Experiment 20001557 PARAMETER Experiment Name: At_Drought_Soil_Dry_P Parameter: Timepoint (day) Value: 13
  misc_feature: MA Experiment 20001557 PARAMETER Experiment Name: At_Drought_Soil_Dry_P Parameter: Treatment Value: Drought vs. No Drought
  misc_feature: MA Experiment ID: 20001558 Result: Up-regulated in Transcription
  misc_feature: MA Experiment 20001558 PARAMETER Experiment Name: At_Drought_Soil_Dry_P Parameter: Age (day) Value: 27
  misc_feature: MA Experiment 20001558 PARAMETER Experiment Name: At_Drought_Soil_Dry_P Parameter: Organism Value: A. thaliana
  misc_feature: MA Experiment 20001558 PARAMETER Experiment Name: At_Drought_Soil_Dry_P Parameter: Plant Line Value: WS
  misc_feature: MA Experiment 20001558 PARAMETER Experiment Name: At_Drought_Soil_Dry_P Parameter: Post Timepoint (hr) Value: 6
  misc_feature: MA Experiment 20001558 PARAMETER Experiment Name: At_Drought_Soil_Dry_P Parameter: Post-Treatment Value: Re-Water vs. No Drought
  misc_feature: MA Experiment 20001558 PARAMETER Experiment Name: At_Drought_Soil_Dry_P Parameter: Timepoint (day) Value: 13
  misc_feature: MA Experiment 20001558 PARAMETER Experiment Name: At_Drought_Soil_Dry_P Parameter: Treatment Value: Drought vs. No Drought
  misc_feature: MA Experiment ID: 20001560 Result: Up-regulated in Transcription
  misc_feature: MA Experiment 20001560 PARAMETER Experiment Name: At_Drought_Soil_Dry_P Parameter: Age (day) Value: 28
  misc_feature: MA Experiment 20001560 PARAMETER Experiment Name: At_Drought_Soil_Dry_P Parameter: Organism Value: A. thaliana
  misc_feature: MA Experiment 20001560 PARAMETER Experiment Name: At_Drought_Soil_Dry_P Parameter: Plant Line Value: WS
  misc_feature: MA Experiment 20001560 PARAMETER Experiment Name: At_Drought_Soil_Dry_P Parameter: Post Timepoint (hr) Value: None
  misc_feature: MA Experiment 20001560 PARAMETER Experiment Name: At_Drought_Soil_Dry_P Parameter: Post-Treatment Value: None
  misc_feature: MA Experiment 20001560 PARAMETER Experiment Name: At_Drought_Soil_Dry_P Parameter: Timepoint (day) Value: 14
  misc_feature: MA Experiment 20001560 PARAMETER Experiment Name: At_Drought_Soil_Dry_P Parameter: Treatment Value: Drought vs. No Drought
  misc_feature: MA Experiment ID: 20001756 Result: Up-regulated in Transcription
  misc_feature: MA Experiment 20001756 PARAMETER Experiment Name: At_50mM_NH4NO3_L-to-H_P Parameter: Timepoint (hr) Value: 4
  misc_feature: MA Experiment 20001756 PARAMETER Experiment Name: At_50mM_NH4NO3_L-to-H_P Parameter: Tissue Value: Leaf
  misc_feature: MA Experiment 20001756 PARAMETER Experiment Name: At_50mM_NH4NO3_L-to-H_P Parameter: Treatment Value: 50mM NH4NO3 vs 100mM Mannitol
  misc_feature: MA Experiment ID: 20001757 Result: Up-regulated in Transcription
  misc_feature: MA Experiment 20001757 PARAMETER Experiment Name: At_50mM_NH4NO3_L-to-H_P Parameter: Timepoint (hr) Value: 6
  misc_feature: MA Experiment 20001757 PARAMETER Experiment Name: At_50mM_NH4NO3_L-to-H_P Parameter: Tissue Value: Leaf
  misc_feature: MA Experiment 20001757 PARAMETER Experiment Name: At_50mM_NH4NO3_L-to-H_P Parameter: Treatment Value: 50mM NH4NO3 vs 100mM Mannitol
  misc_feature: MA Experiment ID: 20001911 Result: Down-regulated in Transcription
  misc_feature: MA Experiment 20001911 PARAMETER Experiment Name: At_Drought_Reproduction_P Parameter: Age (day) Value: 40
  misc_feature: MA Experiment 20001911 PARAMETER Experiment Name: At_Drought_Reproduction_P Parameter: Organism Value: A. thaliana
  misc_feature: MA Experiment 20001911 PARAMETER Experiment Name: At_Drought_Reproduction_P Parameter: Plant Line Value: WS
  misc_feature: MA Experiment 20001911 PARAMETER Experiment Name: At_Drought_Reproduction_P Parameter: Timepoint (day) Value: 10
  misc_feature: MA Experiment 20001911 PARAMETER Experiment Name: At_Drought_Reproduction_P Parameter: Tissue Value: Flowers
  misc_feature: MA Experiment 20001911 PARAMETER Experiment Name: At_Drought_Reproduction_P Parameter: Treatment Value: Drought vs. No Drought
cgctacttctctctctatatataaactccttaccactctctttttctgattttttgacgttaagagatagaaacagagagagatagagagatagagttatggctttggcgatgatgatccgaaacgcagcttcgaagcgaggaatgactccgatctccggtcatttcggtggtttgagatctatgtcttcatggtggaagagcgttgagcctgctcctaaagatccgatcctcggagttaccgaagcttttctcgctgatcctagtcctgaaaaagttaatgttggtgtgggagcatatcgtgatgataatgggaagcctgttgtcttggaatgtgtcagagaagctgagaaaaggcttgctgggagcactttcatggagtaccttcctatgggaggaagtgccaaaatggtggacctaacattgaagcttgcctatggggacaatagtgaatttatcaaagataaaagaattgctgcagttcagactctgtctggcactggagcctgccggctctttgcagacttccagaaacgtttttctcctggttcacagatctacattcctgttccaacctggtccaaccaccacaacatctggaaagatgcacaagtccctcaaaagacatatcattactatcatccagaaaccaagggcttggatttctcagcattgatggatgatgtgaagaatgctccggaagggtcattcttccttcttcatgcttgtgctcataatcctactggagtagaccctacagaggaacaatggagagagatatcacagctattcaaggctaaaaagcatttcgcattcttcgatatggcttaccaaggttttgctagtggagatccagcgagagatgccaagtccatcaggatctttcttgaagatggtcatcatattggaatttctcagtcctatgcaaaaaacatgggactctacggccagagggtgggatgtctcagtgtgctttgtgaagatccgaagcaagccgtggctgtgaaaagtcaattgcagcagctagctagaccaatgtacagcaacccacctttgcatggtgctcagctggtctcaaccattcttgaagacccagagttaaagagtctgtggctaaaagaagttaaggtcatggctgataggatcatcggcatgagaactactttgcgagaaagccttgagaagttaggatcgcctttgtcatgggagcacgttaccaaacagattggaatgttctgctacagtgggttaacaccagaacaggttgaccgcttaacaagcgaatatcacatctatatgacccgtaacggccgtatcagtatggctggtgttacaacaggaaacgtgggataccttgcgaatgctatacatgaagtcaccaagtcatcttaaatcatttacttacatgtttcagccaaacatacaaattttgtttgaagagtcaataagacaggaggctagatttgtacttctgcaattggttttgtgggaactgaaagtttacccataaacagtaatttattagcgcattttttcgttagctgggcaataaaagcaaagcctaaacgatggatttttggatatacaaaattcggattgttttctttcttctc

SEQ ID NO: 22721 - protein, 430 aa, Arabidopsis thaliana
  peptide (1)..(430): Ceres Seq. ID no. 13490681
  misc_feature (110)..(427): Pfam Name: Aminotransferase class I and II Pfam Description: Aminotransferase class I and II
  misc_feature (30)..(428): Homolog of NCBI NO: 223867 NR Description: aminotransferase,Asp
  misc_feature (30)..(428): Homolog of NCBI NO: 6754036 NR Description: glutamate oxaloacetate transaminase 2,
  misc_feature (30)..(428): Homolog of NCBI NO: 2690302 NR Description: aspartate aminotransferase precursor [Mus
  misc_feature (30)..(428): Homolog of NCBI NO: 6980972 NR Description: glutamate oxaloacetate transaminase 2
  misc_feature (5)..(429): Homolog of NCBI NO: 1362046 NR Description: aspartate transaminase (EC 2.6.1.1) precursor -
  misc_feature (27)..(428): Homolog of NCBI NO: 100726 NR Description: aspartate transaminase (EC 2.6.1.1) AAT1
  misc_feature (27)..(428): Homolog of NCBI NO: 100728 NR Description: aspartate transaminase (EC 2.6.1.1) AAT3
  misc_feature (6)..(429): Homolog of NCBI NO: 2130067 NR Description: aspartate transaminase (EC 2.6.1.1) precursor,
  misc_feature (1)..(430): Homolog of NCBI NO: 15224592 NR Description: aspartate aminotransferase, mitochondrial
MALAMMIRNAASKRGMTPISGHFGGLRSMSSWWKSVEPAPKDPILGVTEAFLADPSPEKVNVGVGAYRDDNGKPVVLECVREAEKRLAGSTFMEYLPMGGSAKMVDLTLKLAYGDNSEFIKDKRIAAVQTLSGTGACRLFADFQKRFSPGSQIYIPVPTWSNHHNIWKDAQVPQKTYHYYHPETKGLDFSALMDDVKNAPEGSFFLLHACAHNPTGVDPTEEQWREISQLFKAKKHFAFFDMAYQGFASGDPARDAKSIRIFLEDGHHIGISQSYAKNMGLYGQRVGCLSVLCEDPKQAVAVKSQLQQLARPMYSNPPLHGAQLVSTILEDPELKSLWLKEVKVMADRIIGMRTTLRESLEKLGSPLSWEHVTKQIGMFCYSGLTPEQVDRLTSEYHIYMTRNGRISMAGVTTGNVGYLANAIHEVTKSS

SEQ ID NO: 22722 - protein, 426 aa, Arabidopsis thaliana
  peptide (1)..(426): Ceres Seq. ID no. 13490682
  misc_feature (106)..(423): Pfam Name: Aminotransferase class I and II Pfam Description: Aminotransferase class I and II
  misc_feature (26)..(424): Homolog of NCBI NO: 223867 NR Description: aminotransferase,Asp
  misc_feature (26)..(424): Homolog of NCBI NO: 6754036 NR Description: glutamate oxaloacetate transaminase 2,
  misc_feature (26)..(424): Homolog of NCBI NO: 2690302 NR Description: aspartate aminotransferase precursor [Mus
  misc_feature (26)..(424): Homolog of NCBI NO: 6980972 NR Description: glutamate oxaloacetate transaminase 2
  misc_feature (1)..(425): Homolog of NCBI NO: 1362046 NR Description: aspartate transaminase (EC 2.6.1.1) precursor -
  misc_feature (23)..(424): Homolog of NCBI NO: 100726 NR Description: aspartate transaminase (EC 2.6.1.1) AAT1
  misc_feature (23)..(424): Homolog of NCBI NO: 100728 NR Description: aspartate transaminase (EC 2.6.1.1) AAT3
  misc_feature (2)..(425): Homolog of NCBI NO: 2130067 NR Description: aspartate transaminase (EC 2.6.1.1) precursor,
  misc_feature (1)..(426): Homolog of NCBI NO: 15224592 NR Description: aspartate aminotransferase, mitochondrial
MMIRNAASKRGMTPISGHFGGLRSMSSWWKSVEPAPKDPILGVTEAFLADPSPEKVNVGVGAYRDDNGKPVVLECVREAEKRLAGSTFMEYLPMGGSAKMVDLTLKLAYGDNSEFIKDKRIAAVQTLSGTGACRLFADFQKRFSPGSQIYIPVPTWSNHHNIWKDAQVPQKTYHYYHPETKGLDFSALMDDVKNAPEGSFFLLHACAHNPTGVDPTEEQWREISQLFKAKKHFAFFDMAYQGFASGDPARDAKSIRIFLEDGHHIGISQSYAKNMGLYGQRVGCLSVLCEDPKQAVAVKSQLQQLARPMYSNPPLHGAQLVSTILEDPELKSLWLKEVKVMADRIIGMRTTLRESLEKLGSPLSWEHVTKQIGMFCYSGLTPEQVDRLTSEYHIYMTRNGRISMAGVTTGNVGYLANAIHEVTKSS

SEQ ID NO: 22723 - protein, 425 aa, Arabidopsis thaliana
  peptide (1)..(425): Ceres Seq. ID no. 13490683
  misc_feature (105)..(422): Pfam Name: Aminotransferase class I and II Pfam Description: Aminotransferase class I and II
  misc_feature (25)..(423): Homolog of NCBI NO: 223867 NR Description: aminotransferase,Asp
  misc_feature (25)..(423): Homolog of NCBI NO: 6754036 NR Description: glutamate oxaloacetate transaminase 2,
  misc_feature (25)..(423): Homolog of NCBI NO: 2690302 NR Description: aspartate aminotransferase precursor [Mus
  misc_feature (25)..(423): Homolog of NCBI NO: 6980972 NR Description: glutamate oxaloacetate transaminase 2
  misc_feature (1)..(424): Homolog of NCBI NO: 1362046 NR Description: aspartate transaminase (EC 2.6.1.1) precursor -
  misc_feature (22)..(423): Homolog of NCBI NO: 100726 NR Description: aspartate transaminase (EC 2.6.1.1) AAT1
  misc_feature (22)..(423): Homolog of NCBI NO: 100728 NR Description: aspartate transaminase (EC 2.6.1.1) AAT3
  misc_feature (1)..(424): Homolog of NCBI NO: 2130067 NR Description: aspartate transaminase (EC 2.6.1.1) precursor,
  misc_feature (1)..(425): Homolog of NCBI NO: 15224592 NR Description: aspartate aminotransferase, mitochondrial
MIRNAASKRGMTPISGHFGGLRSMSSWWKSVEPAPKDPILGVTEAFLADPSPEKVNVGVGAYRDDNGKPVVLECVREAEKRLAGSTFMEYLPMGGSAKMVDLTLKLAYGDNSEFIKDKRIAAVQTLSGTGACRLFADFQKRFSPGSQIYIPVPTWSNHHNIWKDAQVPQKTYHYYHPETKGLDFSALMDDVKNAPEGSFFLLHACAHNPTGVDPTEEQWREISQLFKAKKHFAFFDMAYQGFASGDPARDAKSIRIFLEDGHHIGISQSYAKNMGLYGQRVGCLSVLCEDPKQAVAVKSQLQQLARPMYSNPPLHGAQLVSTILEDPELKSLWLKEVKVMADRIIGMRTTLRESLEKLGSPLSWEHVTKQIGMFCYSGLTPEQVDRLTSEYHIYMTRNGRISMAGVTTGNVGYLANAIHEVTKSS

SEQ ID NO: 22724 - DNA, 1061 bp, Arabidopsis thaliana
  misc_feature (1)..(1061): Ceres Seq. ID no. 12324892
  misc_feature: MA Experiment ID: 108434 Result: Down-regulated in Transcription
  misc_feature: MA Experiment 108434 PARAMETER Experiment Name: At_Root_Tips_cDNA_P Parameter: Tissue Value: Root Tips
  misc_feature: MA Experiment ID: 108461 Result: Down-regulated in Transcription
  misc_feature: MA Experiment 108461 PARAMETER Experiment Name: At_Germinating_Seeds_cDNA_P Parameter: Age (day) Value: 1 vs. 0
  misc_feature: MA Experiment 108461 PARAMETER Experiment Name: At_Germinating_Seeds_cDNA_P Parameter: Tissue Value: Germinating Seeds
  misc_feature: MA Experiment ID: 108573 Result: Up-regulated in Transcription
  misc_feature: MA Experiment 108573 PARAMETER Experiment Name: At_Drought_cDNA_P Parameter: Timepoint (hr) Value: 6
  misc_feature: MA Experiment 108573 PARAMETER Experiment Name: At_Drought_cDNA_P Parameter: Tissue Value: Aerial
  misc_feature: MA Experiment 108573 PARAMETER Experiment Name: At_Drought_cDNA_P Parameter: Treatment Value: Drought vs. No Drought
  misc_feature: MA Experiment ID: 20000071 Result: Up-regulated in Transcription
  misc_feature: MA Experiment 20000071 PARAMETER Experiment Name: At_100uM_ABA_Mutants_cDNA_P Parameter: Plant Line Value: CS8104
  misc_feature: MA Experiment 20000071 PARAMETER Experiment Name: At_100uM_ABA_Mutants_cDNA_P Parameter: Timepoint (hr) Value: 6
  misc_feature: MA Experiment 20000071 PARAMETER Experiment Name: At_100uM_ABA_Mutants_cDNA_P Parameter: Tissue Value: Aerial
  misc_feature: MA Experiment 20000071 PARAMETER Experiment Name: At_100uM_ABA_Mutants_cDNA_P Parameter: Treatment Value: 100uM ABA vs. No Treatment
  misc_feature: MA Experiment ID: 20000184 Result: Down-regulated in Transcription
  misc_feature: MA Experiment 20000184 PARAMETER Experiment Name: At_Shoots__P Parameter: Age (day) Value: 7
  misc_feature: MA Experiment 20000184 PARAMETER Experiment Name: At_Shoots__P Parameter: Tissue Value: Shoots vs. Whole Plant
  misc_feature: MA Experiment ID: 20000438 Result: Down-regulated in Transcription
  misc_feature: MA Experiment 20000438 PARAMETER Experiment Name: At_Shoots__P Parameter: Age (day) Value: 14
  misc_feature: MA Experiment 20000438 PARAMETER Experiment Name: At_Shoots__P Parameter: Tissue Value: Shoots vs. Whole Plant
  misc_feature: MA Experiment ID: 20001557 Result: Down-regulated in Transcription
  misc_feature: MA Experiment 20001557 PARAMETER Experiment Name: At_Drought_Soil_Dry_P Parameter: Age (day) Value: 27
  misc_feature: MA Experiment 20001557 PARAMETER Experiment Name: At_Drought_Soil_Dry_P Parameter: Organism Value: A. thaliana
  misc_feature: MA Experiment 20001557 PARAMETER Experiment Name: At_Drought_Soil_Dry_P Parameter: Plant Line Value: WS
  misc_feature: MA Experiment 20001557 PARAMETER Experiment Name: At_Drought_Soil_Dry_P Parameter: Post Timepoint (hr) Value: 3
  misc_feature: MA Experiment 20001557 PARAMETER Experiment Name: At_Drought_Soil_Dry_P Parameter: Post-Treatment Value: Re-Water vs. No Drought
  misc_feature: MA Experiment 20001557 PARAMETER Experiment Name: At_Drought_Soil_Dry_P Parameter: Timepoint (day) Value: 13
  misc_feature: MA Experiment 20001557 PARAMETER Experiment Name: At_Drought_Soil_Dry_P Parameter: Treatment Value: Drought vs. No Drought
  misc_feature: MA Experiment ID: 20001558 Result: Down-regulated in Transcription
  misc_feature: MA Experiment 20001558 PARAMETER Experiment Name: At_Drought_Soil_Dry_P Parameter: Age (day) Value: 27
  misc_feature: MA Experiment 20001558 PARAMETER Experiment Name: At_Drought_Soil_Dry_P Parameter: Organism Value: A. thaliana
  misc_feature: MA Experiment 20001558 PARAMETER Experiment Name: At_Drought_Soil_Dry_P Parameter: Plant Line Value: WS
  misc_feature: MA Experiment 20001558 PARAMETER Experiment Name: At_Drought_Soil_Dry_P Parameter: Post Timepoint (hr) Value: 6
  misc_feature: MA Experiment 20001558 PARAMETER Experiment Name: At_Drought_Soil_Dry_P Parameter: Post-Treatment Value: Re-Water vs. No Drought
  misc_feature: MA Experiment 20001558 PARAMETER Experiment Name: At_Drought_Soil_Dry_P Parameter: Timepoint (day) Value: 13
  misc_feature: MA Experiment 20001558 PARAMETER Experiment Name: At_Drought_Soil_Dry_P Parameter: Treatment Value: Drought vs. No Drought
  misc_feature: MA Experiment ID: 20001560 Result: Down-regulated in Transcription
  misc_feature: MA Experiment 20001560 PARAMETER Experiment Name: At_Drought_Soil_Dry_P Parameter: Age (day) Value: 28
  misc_feature: MA Experiment 20001560 PARAMETER Experiment Name: At_Drought_Soil_Dry_P Parameter: Organism Value: A. thaliana
  misc_feature: MA Experiment 20001560 PARAMETER Experiment Name: At_Drought_Soil_Dry_P Parameter: Plant Line Value: WS
  misc_feature: MA Experiment 20001560 PARAMETER Experiment Name: At_Drought_Soil_Dry_P Parameter: Post Timepoint (hr) Value: None
  misc_feature: MA Experiment 20001560 PARAMETER Experiment Name: At_Drought_Soil_Dry_P Parameter: Post-Treatment Value: None
  misc_feature: MA Experiment 20001560 PARAMETER Experiment Name: At_Drought_Soil_Dry_P Parameter: Timepoint (day) Value: 14
  misc_feature: MA Experiment 20001560 PARAMETER Experiment Name: At_Drought_Soil_Dry_P Parameter: Treatment Value: Drought vs. No Drought
  misc_feature: MA Experiment ID: 20001911 Result: Up-regulated in Transcription
  misc_feature: MA Experiment 20001911 PARAMETER Experiment Name: At_Drought_Reproduction_P Parameter: Age (day) Value: 40
  misc_feature: MA Experiment 20001911 PARAMETER Experiment Name: At_Drought_Reproduction_P Parameter: Organism Value: A. thaliana
  misc_feature: MA Experiment 20001911 PARAMETER Experiment Name: At_Drought_Reproduction_P Parameter: Plant Line Value: WS
  misc_feature: MA Experiment 20001911 PARAMETER Experiment Name: At_Drought_Reproduction_P Parameter: Timepoint (day) Value: 10
  misc_feature: MA Experiment 20001911 PARAMETER Experiment Name: At_Drought_Reproduction_P Parameter: Tissue Value: Flowers
  misc_feature: MA Experiment 20001911 PARAMETER Experiment Name: At_Drought_Reproduction_P Parameter: Treatment Value: Drought vs. No Drought
gtcttcgttgctttttcgagcggtgcctagtctcaacttccatggctgacatcttaccttcaaattttctcaaaccaaccaaaaagcttcttctccttttctaaaatttcatcaaaccctatagggttttctcaatacaattgattttttttttcttcttcttctctatggatacgaccctttctcccgccgtggaggcggaacaaatcgccgactcaacgatcgacactgtttctcgtttgatcgccggcgttttctccggcgcacttactggaatcttcgctatggctggagcttttactggagctgtaactggtgcggtggcaggaagagctgcacagtatggagttctccgtggggctgcacttggcgctgttgctggagctatcctctctgttgaagtgttggaggcttctcgtgcgtattggtatttagagctgtcaggatcaaggggtccatcatctatggcagattttgtagagcaactgtttcgtgggagactggtagatgaacaacttatgtcaacaatgataaattcacaccattggcagttaaggatttccgatgtaagttatgaagagcgggaggatgtttatggtgaactggaagctagaggcttatcgggtgactctttaaggaaactaccatgctatataatgtcaagtgaaatggtcaggaggcaggtcactcactgcacaatttgtctgcaggacatcaaaacaggggaaatcacacgaagcttaccgaaatgtgatcatacgtttcatctggtatgtgttgataaatggctcatcagacacgggtcatgccccatttgcagacaggcagttaaagattaaaacacgactgttgccgagctgtgtacatagcaaaaacacattatccttatatgttgttgtaacttgtaagtctaaaacccctttcttctgtatttttcctcatttcatttagagcaatctcagcttgagccataggtttcgacttttgaatgtatattgttgtagacatgaataagaatacctacagatgtattgaaaagaatatagaactcgatcaagtcg

SEQ ID NO: 22725 - protein, 223 aa, Arabidopsis thaliana
  peptide (1)..(223): Ceres Seq. ID no. 12324893
  misc_feature (176)..(217): Pfam Name: Zinc finger, C3HC4 type (RING finger) Pfam Description: Zinc finger, C3HC4 type (RING finger)
  misc_feature (24)..(219): Homolog of NCBI NO: 18855037 NR Description: putative zinc finger protein [Oryza sativa]
  misc_feature (7)..(219): Homolog of NCBI NO: 27524902 NR Description: NEP1-interacting protein [Arabidopsis thaliana]
  misc_feature (12)..(216): Homolog of NCBI NO: 25411815 NR Description: hypothetical protein At2g17730 [imported] -
  misc_feature (7)..(219): Homolog of NCBI NO: 26451101 NR Description: unknown protein [Arabidopsis thaliana]
  misc_feature (12)..(221): Homolog of NCBI NO: 30680091 NR Description: expressed protein [Arabidopsis thaliana]
  misc_feature (12)..(221): Homolog of NCBI NO: 26452210 NR Description: unknown protein [Arabidopsis thaliana]
  misc_feature (4)..(219): Homolog of NCBI NO: 15239242 NR Description: putative protein; protein id: At5g66070.1
  misc_feature (118)..(223): Homolog of NCBI NO: 25406345 NR Description: probable RING zinc finger protein F1M20.9
  misc_feature (1)..(223): Homolog of NCBI NO: 21592935 NR Description: putative RING zinc finger protein [Arabidopsis
  misc_feature (1)..(223): Homolog of NCBI NO: 18410608 NR Description: putative RING zinc finger protein
MDTTLSPAVEAEQIADSTIDTVSRLIAGVFSGALTGIFAMAGAFTGAVTGAVAGRAAQYGVLRGAALGAVAGAILSVEVLEASRAYWYLELSGSRGPSSMADFVEQLFRGRLVDEQLMSTMINSHHWQLRISDVSYEEREDVYGELEARGLSGDSLRKLPCYIMSSEMVRRQVTHCTICLQDIKTGEITRSLPKCDHTFHLVCVDKWLIRHGSCPICRQAVKD

SEQ ID NO: 22726 - protein, 184 aa, Arabidopsis thaliana
  peptide (1)..(184): Ceres Seq. ID no. 12324894
  misc_feature (137)..(178): Pfam Name: Zinc finger, C3HC4 type (RING finger) Pfam Description: Zinc finger, C3HC4 type (RING finger)
  misc_feature (1)..(180): Homolog of NCBI NO: 18855037 NR Description: putative zinc finger protein [Oryza sativa]
  misc_feature (1)..(180): Homolog of NCBI NO: 27524902 NR Description: NEP1-interacting protein [Arabidopsis thaliana]
  misc_feature (1)..(177): Homolog of NCBI NO: 25411815 NR Description: hypothetical protein At2g17730 [imported] -
  misc_feature (1)..(180): Homolog of NCBI NO: 26451101 NR Description: unknown protein [Arabidopsis thaliana]
  misc_feature (1)..(182): Homolog of NCBI NO: 30680091 NR Description: expressed protein [Arabidopsis thaliana]
  misc_feature (1)..(182): Homolog of NCBI NO: 26452210 NR Description: unknown protein [Arabidopsis thaliana]
  misc_feature (1)..(180): Homolog of NCBI NO: 15239242 NR Description: putative protein; protein id: At5g66070.1
  misc_feature (79)..(184): Homolog of NCBI NO: 25406345 NR Description: probable RING zinc finger protein F1M20.9
  misc_feature (1)..(184): Homolog of NCBI NO: 21592935 NR Description: putative RING zinc finger protein [Arabidopsis
  misc_feature (1)..(184): Homolog of NCBI NO: 18410608 NR Description: putative RING zinc finger protein
MAGAFTGAVTGAVAGRAAQYGVLRGAALGAVAGAILSVEVLEASRAYWYLELSGSRGPSSMADFVEQLFRGRLVDEQLMSTMINSHHWQLRISDVSYEEREDVYGELEARGLSGDSLRKLPCYIMSSEMVRRQVTHCTICLQDIKTGEITRSLPKCDHTFHLVCVDKWLIRHGSCPICRQAVKD

SEQ ID NO: 22727 - protein, 124 aa, Arabidopsis thaliana
  peptide (1)..(124): Ceres Seq. ID no. 12324895
  misc_feature (77)..(118): Pfam Name: Zinc finger, C3HC4 type (RING finger) Pfam Description: Zinc finger, C3HC4 type (RING finger)
  misc_feature (1)..(120): Homolog of NCBI NO: 18855037 NR Description: putative zinc finger protein [Oryza sativa]
  misc_feature (1)..(120): Homolog of NCBI NO: 27524902 NR Description: NEP1-interacting protein [Arabidopsis thaliana]
  misc_feature (1)..(117): Homolog of NCBI NO: 25411815 NR Description: hypothetical protein At2g17730 [imported] -
  misc_feature (1)..(120): Homolog of NCBI NO: 26451101 NR Description: unknown protein [Arabidopsis thaliana]
  misc_feature (1)..(122): Homolog of NCBI NO: 30680091 NR Description: expressed protein [Arabidopsis thaliana]
  misc_feature (1)..(122): Homolog of NCBI NO: 26452210 NR Description: unknown protein [Arabidopsis thaliana]
  misc_feature (1)..(120): Homolog of NCBI NO: 15239242 NR Description: putative protein; protein id: At5g66070.1
  misc_feature (19)..(124): Homolog of NCBI NO: 25406345 NR Description: probable RING zinc finger protein F1M20.9
  misc_feature (1)..(124): Homolog of NCBI NO: 21592935 NR Description: putative RING zinc finger protein [Arabidopsis
  misc_feature (1)..(124): Homolog of NCBI NO: 18410608 NR Description: putative RING zinc finger protein
MADFVEQLFRGRLVDEQLMSTMINSHHWQLRISDVSYEEREDVYGELEARGLSGDSLRKLPCYIMSSEMVRRQVTHCTICLQDIKTGEITRSLPKCDHTFHLVCVDKWLIRHGSCPICRQAVKD

SEQ ID NO: 22728 - DNA, 1110 bp, Arabidopsis thaliana
  misc_feature (1)..(1110): Ceres Seq. ID no. 13491986
  misc_feature: MA Experiment ID: 108433 Result: Down-regulated in Transcription
  misc_feature: MA Experiment 108433 PARAMETER Experiment Name: At_rhl_Mutant2_cDNA_P Parameter: Age (day) Value: 7
  misc_feature: MA Experiment 108433 PARAMETER Experiment Name: At_rhl_Mutant2_cDNA_P Parameter: Organism Value: A. thaliana
  misc_feature: MA Experiment 108433 PARAMETER Experiment Name: At_rhl_Mutant2_cDNA_P Parameter: Plant Line Value: rhl Mutant vs. wt landsburg
  misc_feature: MA Experiment 108433 PARAMETER Experiment Name: At_rhl_Mutant2_cDNA_P Parameter: Tissue Value: Roots
  misc_feature: MA Experiment ID: 20000069 Result: Down-regulated in Transcription
  misc_feature: MA Experiment 20000069 PARAMETER Experiment Name: At_100uM_ABA_Mutants_cDNA_P Parameter: Plant Line Value: CS23
  misc_feature: MA Experiment 20000069 PARAMETER Experiment Name: At_100uM_ABA_Mutants_cDNA_P Parameter: Timepoint (hr) Value: 6
  misc_feature: MA Experiment 20000069 PARAMETER Experiment Name: At_100uM_ABA_Mutants_cDNA_P Parameter: Tissue Value: Aerial
  misc_feature: MA Experiment 20000069 PARAMETER Experiment Name: At_100uM_ABA_Mutants_cDNA_P Parameter: Treatment Value: 100uM ABA vs. No Treatment
  misc_feature: MA Experiment ID: 20000180 Result: Up-regulated in Transcription
  misc_feature: MA Experiment 20000180 PARAMETER Experiment Name: At_Germinating_Seeds_P Parameter: Age (hr) Value: 24 vs. 0
  misc_feature: MA Experiment 20000180 PARAMETER Experiment Name: At_Germinating_Seeds_P Parameter: Tissue Value: Germinating Seeds
aattatttccggccatcactttcttctctacttctttctttctctctctagttgttgttctctctctctctcgcatcctccaattcatcgtcctcacgttcccttttgtttattcatcttccttccttcttcacatttctgattttctctatttggggggtttgtttccacattatacatatctagggttttgagatggttaattgaaagataatggtcgaagtttcggaggaattggcttcacattgtgggtgtttctggcttcctcaggtttaaatctgaggttgatctcttttgttttttggtaaattgtgacatattttggctcgaagaagaagaagaagaggcaatgagcgcatcaaggttcataaagtgcgtcaccgttggtgatggagctgttggtaaaacctgtttgctgatttcttataccagcaacacctttcccacggattatgttccgactgttttcgataactttagtgcaaatgtggttgttaatggagccacggtgaatcttggattgtgggatactgcagggcaagaggactataacagattaagacctttgagttaccgtggtgctgatgttttcattcttgccttctctctcattagtaaggctagttatgagaatgtttccaagaagtggattcctgagttgaagcactatgctcctggtgtcccaattgtccttgttggaaccaaactagatcttcgagatgacaaacagtttttcatcgaccatcctggtgctgtccctattaccactgttcagggagaggagctgaagaagctaattggagcgccagcttacatcgagtgcagttcaaaatcacaagagaacgtgaagggcgtgtttgatgcagcgatcagagtggtccttcaacctccaaagcagaagaaaaagaagaacaaagcacaaaaggcctgctccatcttgtaatagcactcatggaagtcaagaagctctttgagatgaggatgacagggtggtttaaaaaagtatcgctttttcatttttgttgttgttttccgttttcatttgtgatctcttagttccgtacaaaacgaattgtgaggttaattcaacttctattttaactgatagcc

SEQ ID NO: 22729 - protein, 197 aa, Arabidopsis thaliana
  peptide (1)..(197): Ceres Seq. ID no. 13491987
  misc_feature (8)..(179): Pfam Name: Ras family Pfam Description: Ras family
  misc_feature (1)..(196): Homolog of NCBI NO: 27413411 NR Description: putative ROP family GTPase [Brassica napus]
  misc_feature (1)..(197): Homolog of NCBI NO: 20269985 NR Description: small G-protein ROP6 [Medicago truncatula]
  misc_feature (1)..(197): Homolog of NCBI NO: 20269987 NR Description: small G-protein ROP9 [Medicago truncatula]
  misc_feature (1)..(197): Homolog of NCBI NO: 14278856 NR Description: Rac-like GTPase 1 [Nicotiana tabacum]
  misc_feature (1)..(197): Homolog of NCBI NO: 15230443 NR Description: GTP binding protein, putative [Arabidopsis
  misc_feature (1)..(197): Homolog of NCBI NO: 2500195 NR Description: RAC-LIKE GTP BINDING PROTEIN RHO1
  misc_feature (1)..(197): Homolog of NCBI NO: 2500199 NR Description: RAC-LIKE GTP BINDING PROTEIN RHO1
  misc_feature (1)..(197): Homolog of NCBI NO: 27413417 NR Description: putative ROP family GTPase [Brassica napus]
  misc_feature (1)..(197): Homolog of NCBI NO: 15227902 NR Description: Rac-like GTP-binding protein (ARAC1) [Arabidopsis
  misc_feature (1)..(197): Homolog of NCBI NO: 15233418 NR Description: GTP-binding protein, putative [Arabidopsis
MSASRFIKCVTVGDGAVGKTCLLISYTSNTFPTDYVPTVFDNFSANVVVNGATVNLGLWDTAGQEDYNRLRPLSYRGADVFILAFSLISKASYENVSKKWIPELKHYAPGVPIVLVGTKLDLRDDKQFFIDHPGAVPITTVQGEELKKLIGAPAYIECSSKSQENVKGVFDAAIRVVLQPPKQKKKKNKAQKACSIL

SEQ ID NO: 22730 - DNA, 1620 bp, Arabidopsis thaliana
  misc_feature (1)..(1620): Ceres Seq. ID no. 12322395
  misc_feature: MA Experiment ID: 108489 Result: Up-regulated in Transcription
  misc_feature: MA Experiment ID: 20000264 Result: Up-regulated in Transcription
  misc_feature: MA Experiment 20000264 PARAMETER Experiment Name: At_Open_Flower_P Parameter: Age (day) Value: 21
  misc_feature: MA Experiment 20000264 PARAMETER Experiment Name: At_Open_Flower_P Parameter: Plant Line Value: WS
  misc_feature: MA Experiment 20000264 PARAMETER Experiment Name: At_Open_Flower_P Parameter: Tissue Value: Open Flower vs. Whole Plant
  misc_feature: MA Experiment ID: 20000286 Result: Up-regulated in Transcription
  misc_feature: MA Experiment 20000286 PARAMETER Experiment Name: At_Open_Flower_P Parameter: Age (day) Value: 21
  misc_feature: MA Experiment 20000286 PARAMETER Experiment Name: At_Open_Flower_P Parameter: Plant Line Value: WS
  misc_feature: MA Experiment 20000286 PARAMETER Experiment Name: At_Open_Flower_P Parameter: Tissue Value: Half Open vs. Whole Plant
  misc_feature: MA Experiment ID: 20000439 Result: Up-regulated in Transcription
  misc_feature: MA Experiment 20000439 PARAMETER Experiment Name: At_Roots__P Parameter: Age (day) Value: 14 vs. 21
  misc_feature: MA Experiment 20000439 PARAMETER Experiment Name: At_Roots__P Parameter: Organism Value: A. thaliana
  misc_feature: MA Experiment 20000439 PARAMETER Experiment Name: At_Roots__P Parameter: Tissue Value: Roots vs. Whole Plant
  misc_feature: MA Experiment ID: 20000495 Result: Up-regulated in Transcription
  misc_feature: MA Experiment 20000495 PARAMETER Experiment Name: At_Guard_Cells_P Parameter: Harvest Date Value: 8/2/2002
  misc_feature: MA Experiment 20000495 PARAMETER Experiment Name: At_Guard_Cells_P Parameter: Organism Value: A. thaliana
  misc_feature: MA Experiment 20000495 PARAMETER Experiment Name: At_Guard_Cells_P Parameter: Tissue Value: Guard Cells vs. Leaves
  misc_feature: MA Experiment ID: 20000496 Result: Up-regulated in Transcription
  misc_feature: MA Experiment 20000496 PARAMETER Experiment Name: At_Guard_Cells_P Parameter: Harvest Date Value: 7/19/2002
  misc_feature: MA Experiment 20000496 PARAMETER Experiment Name: At_Guard_Cells_P Parameter: Organism Value: Canola
  misc_feature: MA Experiment 20000496 PARAMETER Experiment Name: At_Guard_Cells_P Parameter: Tissue Value: Guard Cells vs. Leaves
  misc_feature: MA Experiment ID: 20000794 Result: Up-regulated in Transcription
  misc_feature: MA Experiment 20000794 PARAMETER Experiment Name: At_Petals_P Parameter: Age (day) Value: 23-25 days
  misc_feature: MA Experiment 20000794 PARAMETER Experiment Name: At_Petals_P Parameter: Plant Line Value: WS
  misc_feature: MA Experiment 20000794 PARAMETER Experiment Name: At_Petals_P Parameter: Tissue Value: Petals vs. Whole plant
  misc_feature: MA Experiment ID: 20001451 Result: Up-regulated in Transcription
  misc_feature: MA Experiment 20001451 PARAMETER Experiment Name: At_Far-red-induction_P Parameter: Age (day) Value: 7
  misc_feature: MA Experiment 20001451 PARAMETER Experiment Name: At_Far-red-induction_P Parameter: Light Value: Far-red vs. White
  misc_feature: MA Experiment 20001451 PARAMETER Experiment Name: At_Far-red-induction_P Parameter: Organism Value: A. thaliana
  misc_feature: MA Experiment 20001451 PARAMETER Experiment Name: At_Far-red-induction_P Parameter: Plant Line Value: Columbia
  misc_feature: MA Experiment 20001451 PARAMETER Experiment Name: At_Far-red-induction_P Parameter: Timepoint (hr) Value: 24
  misc_feature: MA Experiment 20001451 PARAMETER Experiment Name: At_Far-red-induction_P Parameter: Tissue Value: Whole Plant
attgtttagattccaggtcgatctgtgatccattatctttgctactaaactaagttcttttctctgatcgaatcaaaaagttttcaactttctaaatttttttagttctaaggaaaaaacctctccgagaatggttttatcggtgaagcaaacactctctccgaaaatcggacttttccgacgaaacccttcatcctcactaggaagatctcctgtttctctctcgtttccatcgacggagcttccaaaacgcaccgttttagccgtgtcaaagccgcttcatctctcttcttctctgagagctaagtctccggtagtgagatgtgaagcttatgaagctgaccgatcagagcctcatccgatcggtgatgatgctgcggcggcggaaacgaaatcagaggcggctaagaaattgaagatcgggatttactttgctacttggtgggctttgaacgttgtgttcaatatctacaacaagaaggtcttgaacgcttatccttacccatggcttacctcgacgctttctcttgccgctggttcgttgatgatgcttatctcttgggctgttgggatcgttgagactcccaagacggattttgatttctggaaaactctttttccggttgctgtggcacacacaattggtcatgtggctgcaacggtgagtatgtcaaaggttgctgtttctttcactcacatcatcaagagtggtgaacctgcgtttagtgtgcttgtctcgaggtttattttgggtgaaaccttccctacttcggtttacttgtctctcattccaatcattggtggttgcgctctgtctgcccttaccgagcttaacttcaacatgattggtttcatgggagctatgatttcgaacttggctttcgtgttccgtaacatcttctcgaagaagggaatgaagggaaagtctgtgagcgggatgaactactacgcctgtctctcaatgctgtccctattgatcctcactccctttgccattgctgttgaaggacctcagatgtgggtcgatggctggcagacagcgctcgctactgtcggaccacagtttgtctggtgggtggttgcgcagagtgtgttctatcacctctacaaccaagtgtcttacatgtctttagaccaaatctctcccttgacgtttagtgttggtaacaccatgaaacgtatctccgtcattgtctcctccatcattatcttccgcactccagtccagcccgtcaatgctcttggagcagccattgctatccttggaaccttcttgtattcccaggcaaagctctgatgcgaaagacataagagtgtaataagggtctggtgttgagctcctgacttcggttaaaaccgggaaaagagcttaatgtagatatttgtcctcaataatgaaagaaatgatgagattggacactaccatgtttagagtgtgttaggcagtttttttttttttacttttgagtttttttgaatttgggggaatgagaagattgcctctttgtaactaaagtgggaaatagatatttgtccccttgagaataagacaccctgcaactctctttttaacttggagagacatattataaaaagtagagaatatttatctcgagattg

SEQ ID NO: 22731 - protein, 388 aa, Arabidopsis thaliana
  peptide (1)..(388): Ceres Seq. ID no. 12322396
  misc_feature (40)..(387): Homolog of NCBI NO: 9295277 NR Description: glucose-6P/phosphate translocator precursor
  misc_feature (53)..(387): Homolog of NCBI NO: 27752361 NR Description: glucose-6-phosphate/phosphate translocator 2
  misc_feature (53)..(387): Homolog of NCBI NO: 7489258 NR Description: probable
  misc_feature (8)..(385): Homolog of NCBI NO: 7484980 NR Description: glucose-6-phosphate/phosphate translocator
  misc_feature (8)..(387): Homolog of NCBI NO: 14596173 NR Description: Similar to
  misc_feature (8)..(387): Homolog of NCBI NO: 18407336 NR Description: glucose-6-phosphate/phosphate-translocator
  misc_feature (1)..(387): Homolog of NCBI NO: 7488807 NR Description: glucose-6-phosphate/phosphate-translocator
  misc_feature (1)..(388): Homolog of NCBI NO: 9758260 NR Description: glucose-6-phosphate/phosphate translocator
  misc_feature (1)..(388): Homolog of NCBI NO: 21554690 NR Description: glucose-6-phosphate/phosphate translocator
  misc_feature (1)..(388): Homolog of NCBI NO: 18423670 NR Description: glucose-6-phosphate/phosphate translocator
  misc_feature (40)..(387): Homolog of NCBI NO: 9295277 NR Description: glucose-6P/phosphate translocator precursor
  misc_feature (53)..(387): Homolog of NCBI NO: 27752361 NR Description: glucose-6-phosphate/phosphate translocator 2
  misc_feature (53)..(387): Homolog of NCBI NO: 7489258 NR Description: probable
  misc_feature (8)..(385): Homolog of NCBI NO: 7484980 NR Description: glucose-6-phosphate/phosphate translocator
  misc_feature (8)..(387): Homolog of NCBI NO: 14596173 NR Description: Similar to
  misc_feature (8)..(387): Homolog of NCBI NO: 18407336 NR Description: glucose-6-phosphate/phosphate-translocator
  misc_feature (1)..(387): Homolog of NCBI NO: 7488807 NR Description: glucose-6-phosphate/phosphate-translocator
  misc_feature (1)..(388): Homolog of NCBI NO: 9758260 NR Description: glucose-6-phosphate/phosphate translocator
  misc_feature (1)..(388): Homolog of NCBI NO: 21554690 NR Description: glucose-6-phosphate/phosphate translocator
  misc_feature (1)..(388): Homolog of NCBI NO: 18423670 NR Description: glucose-6-phosphate/phosphate translocator
MVLSVKQTLSPKIGLFRRNPSSSLGRSPVSLSFPSTELPKRTVLAVSKPLHLSSSLRAKSPVVRCEAYEADRSEPHPIGDDAAAAETKSEAAKKLKIGIYFATWWALNVVFNIYNKKVLNAYPYPWLTSTLSLAAGSLMMLISWAVGIVETPKTDFDFWKTLFPVAVAHTIGHVAATVSMSKVAVSFTHIIKSGEPAFSVLVSRFILGETFPTSVYLSLIPIIGGCALSALTELNFNMIGFMGAMISNLAFVFRNIFSKKGMKGKSVSGMNYYACLSMLSLLILTPFAIAVEGPQMWVDGWQTALATVGPQFVWWVVAQSVFYHLYNQVSYMSLDQISPLTFSVGNTMKRISVIVSSIIIFRTPVQPVNALGAAIAILGTFLYSQAKL

SEQ ID NO: 22732 - protein, 250 aa, Arabidopsis thaliana
  peptide (1)..(250): Ceres Seq. ID no. 12322397
  misc_feature (1)..(249): Homolog of NCBI NO: 9295277 NR Description: glucose-6P/phosphate translocator precursor
  misc_feature (1)..(249): Homolog of NCBI NO: 27752361 NR Description: glucose-6-phosphate/phosphate translocator 2
  misc_feature (1)..(249): Homolog of NCBI NO: 7489258 NR Description: probable
  misc_feature (1)..(247): Homolog of NCBI NO: 7484980 NR Description: glucose-6-phosphate/phosphate translocator
  misc_feature (1)..(249): Homolog of NCBI NO: 14596173 NR Description: Similar to
  misc_feature (1)..(249): Homolog of NCBI NO: 18407336 NR Description: glucose-6-phosphate/phosphate-translocator
  misc_feature (1)..(249): Homolog of NCBI NO: 7488807 NR Description: glucose-6-phosphate/phosphate-translocator
  misc_feature (1)..(250): Homolog of NCBI NO: 9758260 NR Description: glucose-6-phosphate/phosphate translocator
  misc_feature (1)..(250): Homolog of NCBI NO: 21554690 NR Description: glucose-6-phosphate/phosphate translocator
  misc_feature (1)..(250): Homolog of NCBI NO: 18423670 NR Description: glucose-6-phosphate/phosphate translocator
  misc_feature (1)..(249): Homolog of NCBI NO: 9295277 NR Description: glucose-6P/phosphate translocator precursor
  misc_feature (1)..(249): Homolog of NCBI NO: 27752361 NR Description: glucose-6-phosphate/phosphate translocator 2
  misc_feature (1)..(249): Homolog of NCBI NO: 7489258 NR Description: probable
  misc_feature (1)..(247): Homolog of NCBI NO: 7484980 NR Description: glucose-6-phosphate/phosphate translocator
  misc_feature (1)..(249): Homolog of NCBI NO: 14596173 NR Description: Similar to
  misc_feature (1)..(249): Homolog of NCBI NO: 18407336 NR Description: glucose-6-phosphate/phosphate-translocator
  misc_feature (1)..(249): Homolog of NCBI NO: 7488807 NR Description: glucose-6-phosphate/phosphate-translocator
  misc_feature (1)..(250): Homolog of NCBI NO: 9758260 NR Description: glucose-6-phosphate/phosphate translocator
  misc_feature (1)..(250): Homolog of NCBI NO: 21554690 NR Description: glucose-6-phosphate/phosphate translocator
  misc_feature (1)..(250): Homolog of NCBI NO: 18423670 NR Description: glucose-6-phosphate/phosphate translocator
MMLISWAVGIVETPKTDFDFWKTLFPVAVAHTIGHVAATVSMSKVAVSFTHIIKSGEPAFSVLVSRFILGETFPTSVYLSLIPIIGGCALSALTELNFNMIGFMGAMISNLAFVFRNIFSKKGMKGKSVSGMNYYACLSMLSLLILTPFAIAVEGPQMWVDGWQTALATVGPQFVWWVVAQSVFYHLYNQVSYMSLDQISPLTFSVGNTMKRISVIVSSIIIFRTPVQPVNALGAAIAILGTFLYSQAKL

SEQ ID NO: 22733 - protein, 249 aa, Arabidopsis thaliana
  peptide (1)..(249): Ceres Seq. ID no. 12322398
  misc_feature (1)..(248): Homolog of NCBI NO: 9295277 NR Description: glucose-6P/phosphate translocator precursor
  misc_feature (1)..(248): Homolog of NCBI NO: 27752361 NR Description: glucose-6-phosphate/phosphate translocator 2
  misc_feature (1)..(248): Homolog of NCBI NO: 7489258 NR Description: probable
  misc_feature (1)..(246): Homolog of NCBI NO: 7484980 NR Description: glucose-6-phosphate/phosphate translocator
  misc_feature (1)..(248): Homolog of NCBI NO: 14596173 NR Description: Similar to
  misc_feature (1)..(248): Homolog of NCBI NO: 18407336 NR Description: glucose-6-phosphate/phosphate-translocator
  misc_feature (1)..(248): Homolog of NCBI NO: 7488807 NR Description: glucose-6-phosphate/phosphate-translocator
  misc_feature (1)..(249): Homolog of NCBI NO: 9758260 NR Description: glucose-6-phosphate/phosphate translocator
  misc_feature (1)..(249): Homolog of NCBI NO: 21554690 NR Description: glucose-6-phosphate/phosphate translocator
  misc_feature (1)..(249): Homolog of NCBI NO: 18423670 NR Description: glucose-6-phosphate/phosphate translocator
  misc_feature (1)..(248): Homolog of NCBI NO: 9295277 NR Description: glucose-6P/phosphate translocator precursor
  misc_feature (1)..(248): Homolog of NCBI NO: 27752361 NR Description: glucose-6-phosphate/phosphate translocator 2
  misc_feature (1)..(248): Homolog of NCBI NO: 7489258 NR Description: probable
  misc_feature (1)..(246): Homolog of NCBI NO: 7484980 NR Description: glucose-6-phosphate/phosphate translocator
  misc_feature (1)..(248): Homolog of NCBI NO: 14596173 NR Description: Similar to
  misc_feature (1)..(248): Homolog of NCBI NO: 18407336 NR Description: glucose-6-phosphate/phosphate-translocator
  misc_feature (1)..(248): Homolog of NCBI NO: 7488807 NR Description: glucose-6-phosphate/phosphate-translocator
  misc_feature (1)..(249): Homolog of NCBI NO: 9758260 NR Description: glucose-6-phosphate/phosphate translocator
  misc_feature (1)..(249): Homolog of NCBI NO: 21554690 NR Description: glucose-6-phosphate/phosphate translocator
  misc_feature (1)..(249): Homolog of NCBI NO: 18423670 NR Description: glucose-6-phosphate/phosphate translocator
MLISWAVGIVETPKTDFDFWKTLFPVAVAHTIGHVAATVSMSKVAVSFTHIIKSGEPAFSVLVSRFILGETFPTSVYLSLIPIIGGCALSALTELNFNMIGFMGAMISNLAFVFRNIFSKKGMKGKSVSGMNYYACLSMLSLLILTPFAIAVEGPQMWVDGWQTALATVGPQFVWWVVAQSVFYHLYNQVSYMSLDQISPLTFSVGNTMKRISVIVSSIIIFRTPVQPVNALGAAIAILGTFLYSQAKL

SEQ ID NO: 22734 - DNA, 1591 bp, Arabidopsis thaliana
  misc_feature (1)..(1591): Ceres Seq. ID no. 12348737
  misc_feature: MA Experiment ID: 108434 Result: Down-regulated in Transcription
  misc_feature: MA Experiment 108434 PARAMETER Experiment Name: At_Root_Tips_cDNA_P Parameter: Tissue Value: Root Tips
  misc_feature: MA Experiment ID: 108435 Result: Down-regulated in Transcription
  misc_feature: MA Experiment 108435 PARAMETER Experiment Name: At_stm_Mutants_cDNA_P Parameter: Plant Line Value: wt Landsburg vs stm
  misc_feature: MA Experiment 108435 PARAMETER Experiment Name: At_stm_Mutants_cDNA_P Parameter: Tissue Value: Shoot Apical Meristem Region
  misc_feature: MA Experiment ID: 108463 Result: Up-regulated in Transcription
  misc_feature: MA Experiment 108463 PARAMETER Experiment Name: At_Germinating_Seeds_cDNA_P Parameter: Age (day) Value: 3 vs. 0
  misc_feature: MA Experiment 108463 PARAMETER Experiment Name: At_Germinating_Seeds_cDNA_P Parameter: Tissue Value: Germinating Seeds
  misc_feature: MA Experiment ID: 108469 Result: Up-regulated in Transcription
  misc_feature: MA Experiment ID: 108488 Result: Down-regulated in Transcription
  misc_feature: MA Experiment ID: 108501 Result: Down-regulated in Transcription
  misc_feature: MA Experiment 108501 PARAMETER Experiment Name: At_ap2_floral_buds_cDNA_P Parameter: Plant Line Value: ap2 (Ler.)
  misc_feature: MA Experiment 108501 PARAMETER Experiment Name: At_ap2_floral_buds_cDNA_P Parameter: Tissue Value: Closed Flower
  misc_feature: MA Experiment ID: 108572 Result: Up-regulated in Transcription
  misc_feature: MA Experiment 108572 PARAMETER Experiment Name: At_Drought_cDNA_P Parameter: Timepoint (hr) Value: 1
  misc_feature: MA Experiment 108572 PARAMETER Experiment Name: At_Drought_cDNA_P Parameter: Tissue Value: Aerial
  misc_feature: MA Experiment 108572 PARAMETER Experiment Name: At_Drought_cDNA_P Parameter: Treatment Value: Drought vs. No Drought
  misc_feature: MA Experiment ID: 108573 Result: Up-regulated in Transcription
  misc_feature: MA Experiment 108573 PARAMETER Experiment Name: At_Drought_cDNA_P Parameter: Timepoint (hr) Value: 6
  misc_feature: MA Experiment 108573 PARAMETER Experiment Name: At_Drought_cDNA_P Parameter: Tissue Value: Aerial
  misc_feature: MA Experiment 108573 PARAMETER Experiment Name: At_Drought_cDNA_P Parameter: Treatment Value: Drought vs. No Drought
  misc_feature: MA Experiment ID: 108579 Result: Down-regulated in Transcription
  misc_feature: MA Experiment 108579 PARAMETER Experiment Name: At_4deg_Cold_cDNA_P Parameter: Temperature (deg C) Value: 4 vs. 22
  misc_feature: MA Experiment 108579 PARAMETER Experiment Name: At_4deg_Cold_cDNA_P Parameter: Timepoint (hr) Value: 6
  misc_feature: MA Experiment 108579 PARAMETER Experiment Name: At_4deg_Cold_cDNA_P Parameter: Tissue Value: Aerial
  misc_feature: MA Experiment ID: 108585 Result: Up-regulated in Transcription
  misc_feature: MA Experiment 108585 PARAMETER Experiment Name: At_5mM_NaNP_cDNA_P Parameter: Timepoint (hr) Value: 6
  misc_feature: MA Experiment 108585 PARAMETER Experiment Name: At_5mM_NaNP_cDNA_P Parameter: Tissue Value: Aerial
  misc_feature: MA Experiment 108585 PARAMETER Experiment Name: At_5mM_NaNP_cDNA_P Parameter: Treatment Value: null
  misc_feature: MA Experiment ID: 108594 Result: Down-regulated in Transcription
  misc_feature: MA Experiment 108594 PARAMETER Experiment Name: At_Ler-rhl_Root_cDNA_P Parameter: Plant Line Value: null
  misc_feature: MA Experiment ID: 108595 Result: Down-regulated in Transcription
  misc_feature: MA Experiment 108595 PARAMETER Experiment Name: At_Ler-pi_Ovule_cDNA_P Parameter: Plant Line Value: null
  misc_feature: MA Experiment ID: 108607 Result: Up-regulated in Transcription
  misc_feature: MA Experiment 108607 PARAMETER Experiment Name: At_100uM_ABA_cDNA_P Parameter: Timepoint (hr) Value: 4
  misc_feature: MA Experiment 108607 PARAMETER Experiment Name: At_100uM_ABA_cDNA_P Parameter: Tissue Value: Aerial
  misc_feature: MA Experiment 108607 PARAMETER Experiment Name: At_100uM_ABA_cDNA_P Parameter: Treatment Value: 100uM ABA vs. No Treatment
  misc_feature: MA Experiment ID: 108667 Result: Up-regulated in Transcription
  misc_feature: MA Experiment 108667 PARAMETER Experiment Name: At_2mM_SA_cDNA_P Parameter: Plant Line Value: WS
  misc_feature: MA Experiment 108667 PARAMETER Experiment Name: At_2mM_SA_cDNA_P Parameter: Timepoint (hr) Value: 1
  misc_feature: MA Experiment 108667 PARAMETER Experiment Name: At_2mM_SA_cDNA_P Parameter: Treatment Value: 2mM SA vs. No Treatment
  misc_feature: MA Experiment ID: 108668 Result: Up-regulated in Transcription
  misc_feature: MA Experiment 108668 PARAMETER Experiment Name: At_2mM_SA_cDNA_P Parameter: Plant Line Value: WS
  misc_feature: MA Experiment 108668 PARAMETER Experiment Name: At_2mM_SA_cDNA_P Parameter: Timepoint (hr) Value: 6
  misc_feature: MA Experiment 108668 PARAMETER Experiment Name: At_2mM_SA_cDNA_P Parameter: Treatment Value: 2mM SA vs. No Treatment
  misc_feature: MA Experiment ID: 20000069 Result: Up-regulated in Transcription
  misc_feature: MA Experiment 20000069 PARAMETER Experiment Name: At_100uM_ABA_Mutants_cDNA_P Parameter: Plant Line Value: CS23
  misc_feature: MA Experiment 20000069 PARAMETER Experiment Name: At_100uM_ABA_Mutants_cDNA_P Parameter: Timepoint (hr) Value: 6
  misc_feature: MA Experiment 20000069 PARAMETER Experiment Name: At_100uM_ABA_Mutants_cDNA_P Parameter: Tissue Value: Aerial
  misc_feature: MA Experiment 20000069 PARAMETER Experiment Name: At_100uM_ABA_Mutants_cDNA_P Parameter: Treatment Value: 100uM ABA vs. No Treatment
  misc_feature: MA Experiment ID: 20000070 Result: Up-regulated in Transcription
  misc_feature: MA Experiment 20000070 PARAMETER Experiment Name: At_100uM_ABA_Mutants_cDNA_P Parameter: Plant Line Value: CS24
  misc_feature: MA Experiment 20000070 PARAMETER Experiment Name: At_100uM_ABA_Mutants_cDNA_P Parameter: Timepoint (hr) Value: 6
  misc_feature: MA Experiment 20000070 PARAMETER Experiment Name: At_100uM_ABA_Mutants_cDNA_P Parameter: Tissue Value: Aerial
  misc_feature: MA Experiment 20000070 PARAMETER Experiment Name: At_100uM_ABA_Mutants_cDNA_P Parameter: Treatment Value: 100uM ABA vs. No Treatment
  misc_feature: MA Experiment ID: 20000071 Result: Up-regulated in Transcription
  misc_feature: MA Experiment 20000071 PARAMETER Experiment Name: At_100uM_ABA_Mutants_cDNA_P Parameter: Plant Line Value: CS8104
  misc_feature: MA Experiment 20000071 PARAMETER Experiment Name: At_100uM_ABA_Mutants_cDNA_P Parameter: Timepoint (hr) Value: 6
  misc_feature: MA Experiment 20000071 PARAMETER Experiment Name: At_100uM_ABA_Mutants_cDNA_P Parameter: Tissue Value: Aerial
  misc_feature: MA Experiment 20000071 PARAMETER Experiment Name: At_100uM_ABA_Mutants_cDNA_P Parameter: Treatment Value: 100uM ABA vs. No Treatment
  misc_feature: MA Experiment ID: 20000072 Result: Up-regulated in Transcription
  misc_feature: MA Experiment 20000072 PARAMETER Experiment Name: At_100uM_ABA_Mutants_cDNA_P Parameter: Plant Line Value: CS8105
  misc_feature: MA Experiment 20000072 PARAMETER Experiment Name: At_100uM_ABA_Mutants_cDNA_P Parameter: Timepoint (hr) Value: 6
  misc_feature: MA Experiment 20000072 PARAMETER Experiment Name: At_100uM_ABA_Mutants_cDNA_P Parameter: Tissue Value: Aerial
  misc_feature: MA Experiment 20000072 PARAMETER Experiment Name: At_100uM_ABA_Mutants_cDNA_P Parameter: Treatment Value: 100uM ABA vs. No Treatment
  misc_feature: MA Experiment ID: 20000086 Result: Up-regulated in Transcription
  misc_feature: MA Experiment 20000086 PARAMETER Experiment Name: At_100uM_ABA_Mutants_cDNA_P Parameter: Plant Line Value: CS22
  misc_feature: MA Experiment 20000086 PARAMETER Experiment Name: At_100uM_ABA_Mutants_cDNA_P Parameter: Timepoint (hr) Value: 6
  misc_feature: MA Experiment 20000086 PARAMETER Experiment Name: At_100uM_ABA_Mutants_cDNA_P Parameter: Tissue Value: Aerial
  misc_feature: MA Experiment 20000086 PARAMETER Experiment Name: At_100uM_ABA_Mutants_cDNA_P Parameter: Treatment Value: 100uM ABA vs. No Treatment
  misc_feature: MA Experiment ID: 20000087 Result: Up-regulated in Transcription
  misc_feature: MA Experiment 20000087 PARAMETER Experiment Name: At_100uM_ABA_Mutants_cDNA_P Parameter: Plant Line Value: WS
  misc_feature: MA Experiment 20000087 PARAMETER Experiment Name: At_100uM_ABA_Mutants_cDNA_P Parameter: Timepoint (hr) Value: 6
  misc_feature: MA Experiment 20000087 PARAMETER Experiment Name: At_100uM_ABA_Mutants_cDNA_P Parameter: Tissue Value: Aerial
  misc_feature: MA Experiment 20000087 PARAMETER Experiment Name: At_100uM_ABA_Mutants_cDNA_P Parameter: Treatment Value: 100uM ABA vs. No Treatment
  misc_feature: MA Experiment ID: 20000088 Result: Up-regulated in Transcription
  misc_feature: MA Experiment 20000088 PARAMETER Experiment Name: At_100uM_ABA_Mutants_cDNA_P Parameter: Plant Line Value: Landsberg
  misc_feature: MA Experiment 20000088 PARAMETER Experiment Name: At_100uM_ABA_Mutants_cDNA_P Parameter: Timepoint (hr) Value: 6
  misc_feature: MA Experiment 20000088 PARAMETER Experiment Name: At_100uM_ABA_Mutants_cDNA_P Parameter: Tissue Value: Aerial
  misc_feature: MA Experiment 20000088 PARAMETER Experiment Name: At_100uM_ABA_Mutants_cDNA_P Parameter: Treatment Value: 100uM ABA vs. No Treatment
  misc_feature: MA Experiment ID: 20000089 Result: Up-regulated in Transcription
  misc_feature: MA Experiment ID: 20000090 Result: Up-regulated in Transcription
  misc_feature: MA Experiment ID: 20000111 Result: Down-regulated in Transcription
  misc_feature: MA Experiment 20000111 PARAMETER Experiment Name: At_42deg_Heat_cDNA_P Parameter: Temperature (deg C) Value: 42 vs. 22
  misc_feature: MA Experiment 20000111 PARAMETER Experiment Name: At_42deg_Heat_cDNA_P Parameter: Timepoint (hr) Value: 6
  misc_feature: MA Experiment 20000111 PARAMETER Experiment Name: At_42deg_Heat_cDNA_P Parameter: Tissue Value: Aerial
  misc_feature: MA Experiment ID: 20000117 Result: Up-regulated in Transcription
  misc_feature: MA Experiment 20000117 PARAMETER Experiment Name: At_100uM_ABA_Mutants_cDNA_P Parameter: Plant Line Value: Columbia
  misc_feature: MA Experiment 20000117 PARAMETER Experiment Name: At_100uM_ABA_Mutants_cDNA_P Parameter: Timepoint (hr) Value: 6
  misc_feature: MA Experiment 20000117 PARAMETER Experiment Name: At_100uM_ABA_Mutants_cDNA_P Parameter: Tissue Value: Aerial
  misc_feature: MA Experiment 20000117 PARAMETER Experiment Name: At_100uM_ABA_Mutants_cDNA_P Parameter: Treatment Value: 100uM ABA vs. No Treatment
  misc_feature: MA Experiment ID: 20000171 Result: Down-regulated in Transcription
  misc_feature: MA Experiment 20000171 PARAMETER Experiment Name: At_42deg_Heat_P Parameter: Age (day) Value: 14
  misc_feature: MA Experiment 20000171 PARAMETER Experiment Name: At_42deg_Heat_P Parameter: Organism Value: A. thaliana
  misc_feature: MA Experiment 20000171 PARAMETER Experiment Name: At_42deg_Heat_P Parameter: Plant Line Value: WS
  misc_feature: MA Experiment 20000171 PARAMETER Experiment Name: At_42deg_Heat_P Parameter: Temperature (deg C) Value: 42 vs. 22
  misc_feature: MA Experiment 20000171 PARAMETER Experiment Name: At_42deg_Heat_P Parameter: Timepoint (hr) Value: 1
  misc_feature: MA Experiment 20000171 PARAMETER Experiment Name: At_42deg_Heat_P Parameter: Tissue Value: Aerial
  misc_feature: MA Experiment ID: 20000173 Result: Down-regulated in Transcription
  misc_feature: MA Experiment 20000173 PARAMETER Experiment Name: At_42deg_Heat_P Parameter: Age (day) Value: 14
  misc_feature: MA Experiment 20000173 PARAMETER Experiment Name: At_42deg_Heat_P Parameter: Organism Value: A. thaliana
  misc_feature: MA Experiment 20000173 PARAMETER Experiment Name: At_42deg_Heat_P Parameter: Plant Line Value: WS
  misc_feature: MA Experiment 20000173 PARAMETER Experiment Name: At_42deg_Heat_P Parameter: Temperature (deg C) Value: 42 vs. 22
  misc_feature: MA Experiment 20000173 PARAMETER Experiment Name: At_42deg_Heat_P Parameter: Timepoint (hr) Value: 6
  misc_feature: MA Experiment 20000173 PARAMETER Experiment Name: At_42deg_Heat_P Parameter: Tissue Value: Aerial
  misc_feature: MA Experiment ID: 20000179 Result: Down-regulated in Transcription
  misc_feature: MA Experiment 20000179 PARAMETER Experiment Name: At_Germinating_Seeds_P Parameter: Age (hr) Value: 6 vs. 0
  misc_feature: MA Experiment 20000179 PARAMETER Experiment Name: At_Germinating_Seeds_P Parameter: Tissue Value: Germinating Seeds
  misc_feature: MA Experiment ID: 20000182 Result: Up-regulated in Transcription
  misc_feature: MA Experiment 20000182 PARAMETER Experiment Name: At_2mM_SA_P Parameter: Age (day) Value: 14
  misc_feature: MA Experiment 20000182 PARAMETER Experiment Name: At_2mM_SA_P Parameter: Organism Value: A. thaliana
  misc_feature: MA Experiment 20000182 PARAMETER Experiment Name: At_2mM_SA_P Parameter: Plant Line Value: WS
  misc_feature: MA Experiment 20000182 PARAMETER Experiment Name: At_2mM_SA_P Parameter: Timepoint (hr) Value: 6
  misc_feature: MA Experiment 20000182 PARAMETER Experiment Name: At_2mM_SA_P Parameter: Tissue Value: Aerial
  misc_feature: MA Experiment 20000182 PARAMETER Experiment Name: At_2mM_SA_P Parameter: Treatment Value: 2mM SA vs. No Treatment
  misc_feature: MA Experiment ID: 20000227 Result: Up-regulated in Transcription
  misc_feature: MA Experiment 20000227 PARAMETER Experiment Name: At_Root-Tips-vs-Tops_P Parameter: Tissue Value: Root Tips vs. Root Tops
  misc_feature: MA Experiment ID: 20000234 Result: Down-regulated in Transcription
  misc_feature: MA Experiment 20000234 PARAMETER Experiment Name: At_Siliques_P Parameter: Age (day) Value: 21
  misc_feature: MA Experiment 20000234 PARAMETER Experiment Name: At_Siliques_P Parameter: Organism Value: A. thaliana
  misc_feature: MA Experiment 20000234 PARAMETER Experiment Name: At_Siliques_P Parameter: Plant Line Value: WS
  misc_feature: MA Experiment 20000234 PARAMETER Experiment Name: At_Siliques_P Parameter: Tissue Value: Less Than 5mm Siliques vs. Whole Plant
  misc_feature: MA Experiment ID: 20000235 Result: Down-regulated in Transcription
  misc_feature: MA Experiment 20000235 PARAMETER Experiment Name: At_Siliques_P Parameter: Age (day) Value: 21
  misc_feature: MA Experiment 20000235 PARAMETER Experiment Name: At_Siliques_P Parameter: Organism Value: A. thaliana
  misc_feature: MA Experiment 20000235 PARAMETER Experiment Name: At_Siliques_P Parameter: Plant Line Value: WS
  misc_feature: MA Experiment 20000235 PARAMETER Experiment Name: At_Siliques_P Parameter: Tissue Value: 5-10mm Siliques vs. Whole Plant
  misc_feature: MA Experiment ID: 20000264 Result: Down-regulated in Transcription
  misc_feature: MA Experiment 20000264 PARAMETER Experiment Name: At_Open_Flower_P Parameter: Age (day) Value: 21
  misc_feature: MA Experiment 20000264 PARAMETER Experiment Name: At_Open_Flower_P Parameter: Plant Line Value: WS
  misc_feature: MA Experiment 20000264 PARAMETER Experiment Name: At_Open_Flower_P Parameter: Tissue Value: Open Flower vs. Whole Plant
  misc_feature: MA Experiment ID: 20000265 Result: Down-regulated in Transcription
  misc_feature: MA Experiment 20000265 PARAMETER Experiment Name: At_Open_Flower_P Parameter: Age (day) Value: 21
  misc_feature: MA Experiment 20000265 PARAMETER Experiment Name: At_Open_Flower_P Parameter: Plant Line Value: WS
  misc_feature: MA Experiment 20000265 PARAMETER Experiment Name: At_Open_Flower_P Parameter: Tissue Value: Closed Flower vs. Whole Plant
  misc_feature: MA Experiment ID: 20000286 Result: Down-regulated in Transcription
  misc_feature: MA Experiment 20000286 PARAMETER Experiment Name: At_Open_Flower_P Parameter: Age (day) Value: 21
  misc_feature: MA Experiment 20000286 PARAMETER Experiment Name: At_Open_Flower_P Parameter: Plant Line Value: WS
  misc_feature: MA Experiment 20000286 PARAMETER Experiment Name: At_Open_Flower_P Parameter: Tissue Value: Half Open vs. Whole Plant
  misc_feature: MA Experiment ID: 20000709 Result: Up-regulated in Transcription
  misc_feature: MA Experiment 20000709 PARAMETER Experiment Name: At_15mM_NH4NO3_L-to-H_P Parameter: Age (hr) Value: 14
  misc_feature: MA Experiment 20000709 PARAMETER Experiment Name: At_15mM_NH4NO3_L-to-H_P Parameter: Organism Value: A. thaliana
  misc_feature: MA Experiment 20000709 PARAMETER Experiment Name: At_15mM_NH4NO3_L-to-H_P Parameter: Plant Line Value: WS
  misc_feature: MA Experiment 20000709 PARAMETER Experiment Name: At_15mM_NH4NO3_L-to-H_P Parameter: Timepoint (hr) Value: 4
  misc_feature: MA Experiment 20000709 PARAMETER Experiment Name: At_15mM_NH4NO3_L-to-H_P Parameter: Tissue Value: Aerial
  misc_feature: MA Experiment 20000709 PARAMETER Experiment Name: At_15mM_NH4NO3_L-to-H_P Parameter: Treatment Value: 15mM NH4NO3 vs. 30mM Mannitol
  misc_feature: MA Experiment ID: 20000794 Result: Down-regulated in Transcription
  misc_feature: MA Experiment 20000794 PARAMETER Experiment Name: At_Petals_P Parameter: Age (day) Value: 23-25 days
  misc_feature: MA Experiment 20000794 PARAMETER Experiment Name: At_Petals_P Parameter: Plant Line Value: WS
  misc_feature: MA Experiment 20000794 PARAMETER Experiment Name: At_Petals_P Parameter: Tissue Value: Petals vs. Whole plant
  misc_feature: MA Experiment ID: 20001247 Result: Up-regulated in Transcription
  misc_feature: MA Experiment 20001247 PARAMETER Experiment Name: At_Far-red-induction_P Parameter: Age (day) Value: 7
  misc_feature: MA Experiment 20001247 PARAMETER Experiment Name: At_Far-red-induction_P Parameter: Light Value: Far-red vs. White
  misc_feature: MA Experiment 20001247 PARAMETER Experiment Name: At_Far-red-induction_P Parameter: Organism Value: A. thaliana
  misc_feature: MA Experiment 20001247 PARAMETER Experiment Name: At_Far-red-induction_P Parameter: Plant Line Value: Columbia
  misc_feature: MA Experiment 20001247 PARAMETER Experiment Name: At_Far-red-induction_P Parameter: Timepoint (hr) Value: 1
  misc_feature: MA Experiment 20001247 PARAMETER Experiment Name: At_Far-red-induction_P Parameter: Tissue Value: Whole Plant
  misc_feature: MA Experiment ID: 20001558 Result: Up-regulated in Transcription
  misc_feature: MA Experiment 20001558 PARAMETER Experiment Name: At_Drought_Soil_Dry_P Parameter: Age (day) Value: 27
  misc_feature: MA Experiment 20001558 PARAMETER Experiment Name: At_Drought_Soil_Dry_P Parameter: Organism Value: A. thaliana
  misc_feature: MA Experiment 20001558 PARAMETER Experiment Name: At_Drought_Soil_Dry_P Parameter: Plant Line Value: WS
  misc_feature: MA Experiment 20001558 PARAMETER Experiment Name: At_Drought_Soil_Dry_P Parameter: Post Timepoint (hr) Value: 6
  misc_feature: MA Experiment 20001558 PARAMETER Experiment Name: At_Drought_Soil_Dry_P Parameter: Post-Treatment Value: Re-Water vs. No Drought
  misc_feature: MA Experiment 20001558 PARAMETER Experiment Name: At_Drought_Soil_Dry_P Parameter: Timepoint (day) Value: 13
  misc_feature: MA Experiment 20001558 PARAMETER Experiment Name: At_Drought_Soil_Dry_P Parameter: Treatment Value: Drought vs. No Drought
  misc_feature: MA Experiment ID: 20001560 Result: Up-regulated in Transcription
  misc_feature: MA Experiment 20001560 PARAMETER Experiment Name: At_Drought_Soil_Dry_P Parameter: Age (day) Value: 28
  misc_feature: MA Experiment 20001560 PARAMETER Experiment Name: At_Drought_Soil_Dry_P Parameter: Organism Value: A. thaliana
  misc_feature: MA Experiment 20001560 PARAMETER Experiment Name: At_Drought_Soil_Dry_P Parameter: Plant Line Value: WS
  misc_feature: MA Experiment 20001560 PARAMETER Experiment Name: At_Drought_Soil_Dry_P Parameter: Post Timepoint (hr) Value: None
  misc_feature: MA Experiment 20001560 PARAMETER Experiment Name: At_Drought_Soil_Dry_P Parameter: Post-Treatment Value: None
  misc_feature: MA Experiment 20001560 PARAMETER Experiment Name: At_Drought_Soil_Dry_P Parameter: Timepoint (day) Value: 14
  misc_feature: MA Experiment 20001560 PARAMETER Experiment Name: At_Drought_Soil_Dry_P Parameter: Treatment Value: Drought vs. No Drought
  misc_feature: MA Experiment ID: 20001772 Result: Down-regulated in Transcription
  misc_feature: MA Experiment 20001772 PARAMETER Experiment Name: At_Far-red-enriched-adult_P Parameter: Age (day) Value: 29
  misc_feature: MA Experiment 20001772 PARAMETER Experiment Name: At_Far-red-enriched-adult_P Parameter: Light Value: Far-red enriched vs. White
  misc_feature: MA Experiment 20001772 PARAMETER Experiment Name: At_Far-red-enriched-adult_P Parameter: Organism Value: A. thaliana
  misc_feature: MA Experiment 20001772 PARAMETER Experiment Name: At_Far-red-enriched-adult_P Parameter: Plant Line Value: Columbia
  misc_feature: MA Experiment 20001772 PARAMETER Experiment Name: At_Far-red-enriched-adult_P Parameter: Timepoint (hr) Value: 24
  misc_feature: MA Experiment 20001772 PARAMETER Experiment Name: At_Far-red-enriched-adult_P Parameter: Tissue Value: Aerial
  misc_feature: MA Experiment ID: 20001773 Result: Down-regulated in Transcription
  misc_feature: MA Experiment 20001773 PARAMETER Experiment Name: At_Far-red-enriched-adult_P Parameter: Age (day) Value: 30
  misc_feature: MA Experiment 20001773 PARAMETER Experiment Name: At_Far-red-enriched-adult_P Parameter: Light Value: Far-red enriched vs. White
  misc_feature: MA Experiment 20001773 PARAMETER Experiment Name: At_Far-red-enriched-adult_P Parameter: Organism Value: A. thaliana
  misc_feature: MA Experiment 20001773 PARAMETER Experiment Name: At_Far-red-enriched-adult_P Parameter: Plant Line Value: Columbia
  misc_feature: MA Experiment 20001773 PARAMETER Experiment Name: At_Far-red-enriched-adult_P Parameter: Timepoint (hr) Value: 48
  misc_feature: MA Experiment 20001773 PARAMETER Experiment Name: At_Far-red-enriched-adult_P Parameter: Tissue Value: Aerial
  misc_feature: MA Experiment ID: 20001904 Result: Up-regulated in Transcription
  misc_feature: MA Experiment 20001904 PARAMETER Experiment Name: At_Drought_Reproduction_P Parameter: Age (day) Value: 37
  misc_feature: MA Experiment 20001904 PARAMETER Experiment Name: At_Drought_Reproduction_P Parameter: Organism Value: A. thaliana
  misc_feature: MA Experiment 20001904 PARAMETER Experiment Name: At_Drought_Reproduction_P Parameter: Plant Line Value: WS
  misc_feature: MA Experiment 20001904 PARAMETER Experiment Name: At_Drought_Reproduction_P Parameter: Timepoint (day) Value: 7
  misc_feature: MA Experiment 20001904 PARAMETER Experiment Name: At_Drought_Reproduction_P Parameter: Tissue Value: Rosettes
  misc_feature: MA Experiment 20001904 PARAMETER Experiment Name: At_Drought_Reproduction_P Parameter: Treatment Value: Drought vs. No Drought
  misc_feature: MA Experiment ID: 20001906 Result: Up-regulated in Transcription
  misc_feature: MA Experiment 20001906 PARAMETER Experiment Name: At_Drought_Reproduction_P Parameter: Age (day) Value: 35
  misc_feature: MA Experiment 20001906 PARAMETER Experiment Name: At_Drought_Reproduction_P Parameter: Organism Value: A. thaliana
  misc_feature: MA Experiment 20001906 PARAMETER Experiment Name: At_Drought_Reproduction_P Parameter: Plant Line Value: WS
  misc_feature: MA Experiment 20001906 PARAMETER Experiment Name: At_Drought_Reproduction_P Parameter: Timepoint (day) Value: 5
  misc_feature: MA Experiment 20001906 PARAMETER Experiment Name: At_Drought_Reproduction_P Parameter: Tissue Value: Siliques
  misc_feature: MA Experiment 20001906 PARAMETER Experiment Name: At_Drought_Reproduction_P Parameter: Treatment Value: Drought vs. No Drought
  misc_feature: MA Experiment ID: 20001910 Result: Up-regulated in Transcription
  misc_feature: MA Experiment 20001910 PARAMETER Experiment Name: At_Drought_Reproduction_P Parameter: Age (day) Value: 37
  misc_feature: MA Experiment 20001910 PARAMETER Experiment Name: At_Drought_Reproduction_P Parameter: Organism Value: A. thaliana
  misc_feature: MA Experiment 20001910 PARAMETER Experiment Name: At_Drought_Reproduction_P Parameter: Plant Line Value: WS
  misc_feature: MA Experiment 20001910 PARAMETER Experiment Name: At_Drought_Reproduction_P Parameter: Timepoint (day) Value: 7
  misc_feature: MA Experiment 20001910 PARAMETER Experiment Name: At_Drought_Reproduction_P Parameter: Tissue Value: Flowers
  misc_feature: MA Experiment 20001910 PARAMETER Experiment Name: At_Drought_Reproduction_P Parameter: Treatment Value: Drought vs. No Drought
attttggttaaagcaaaagattttaagagagaaagggggagaagtgagagagatggagcataagagaggacatgtattagcagtgccgtacccaacgcaaggacacatcacaccattccgccaattctgcaaacgacttcacttcaaaggtctcaaaaccactctcgctctcaccactttcgtcttcaactccatcaatcctgacctatccggtccaatctccatagccaccatctccgatggctatgaccatgggggtttcgagacagctgactccatcgacgactacctcaaagactttaaaacttccggctcgaaaaccattgcagacatcatccaaaaacaccagactagtgataaccccatcacttgtatcgtctatgatgctttcctgccttgggcacttgacgttgctagagagtttggtttagttgcgactcctttctttacgcagccttgtgctgttaactatgtttattatctttcttacataaacaatggaagcttgcaacttcccattgaggaattgccttttcttgagctccaagatttgccttctttcttctctgtttctggctcttatcctgcttactttgagatggtgcttcaacagttcataaatttcgaaaaagctgatttcgttctcgttaatagcttccaagagttggaactgcatgagaatgaattgtggtcgaaagcttgtcctgtgttgacaattggtccaactattccatcaatttacttagaccaacgtatcaaatcagacaccggctatgatcttaatctctttgaatcgaaagatgattccttctgcattaactggctcgacacaaggccacaagggtcggtggtgtacgtagcattcggaagcatggctcagctgactaatgtgcagatggaggagcttgcttcagcagtaagcaacttcagcttcctgtgggtggtcagatcttcagaggaggaaaaactcccatcagggtttcttgagacagtgaataaagaaaagagcttggtcttgaaatggagtcctcagcttcaagttctgtcaaacaaagccatcggttgtttcttgactcactgtggctggaactcaaccatggaggctttgaccttcggggttcccatggtggcaatgccccaatggactgatcaaccgatgaacgcaaagtacatacaagatgtgtggaaggctggagttcgtgtgaagacagagaaggagagtgggattgccaagagagaggagattgagtttagcattaaggaagtgatggaaggagagaggagcaaagagatgaagaagaacgtgaagaaatggagagacttggctgtcaagtcactcaatgaaggaggttctacggatactaacattgatacatttgtatcaagggttcagagcaaataggtaactcacatacagtagcaaaggtccttctataatatcttgttttgtacgtctttcattcagcataatcttttgttgacttttcttatgttgtatgttcaaatccccatattgcttcttgttgtatgttcaaatccccatattgcttcttgttgacaataataataataaaaacaatgcaactttacc

SEQ ID NO: 22735 - protein, 466 aa, Arabidopsis thaliana
  peptide (1)..(466): Ceres Seq. ID no. 12348738
  misc_feature (23)..(466): Pfam Name: UDP-glucoronosyl and UDP-glucosyl transferase Pfam Description: UDP-glucoronosyl and UDP-glucosyl transferase
  misc_feature (19)..(463): Homolog of NCBI NO: 15225134 NR Description: putative glucosyltransferase
  misc_feature (19)..(463): Homolog of NCBI NO: 21536917 NR Description: putative glucosyltransferase [Arabidopsis
  misc_feature (23)..(465): Homolog of NCBI NO: 38345013 NR Description: OSJNBa0052O21.16 [Oryza sativa (japonica
  misc_feature (22)..(460): Homolog of NCBI NO: 15221668 NR Description: UDP-glycosyltransferase family
  misc_feature (20)..(466): Homolog of NCBI NO: 15824451 NR Description: thiohydroximate S-glucosyltransferase [Brassica
  misc_feature (19)..(461): Homolog of NCBI NO: 15225138 NR Description: UDP-glycosyltransferase family
  misc_feature (24)..(461): Homolog of NCBI NO: 15221233 NR Description: putative indole-3-acetate beta-glucosyltransferase
  misc_feature (18)..(463): Homolog of NCBI NO: 7385017 NR Description: UDP-glucose:salicylic acid glucosyltransferase
  misc_feature (18)..(466): Homolog of NCBI NO: 15224372 NR Description: putative glucosyltransferase; protein id:
  misc_feature (18)..(466): Homolog of NCBI NO: 15224368 NR Description: putative glucosyltransferase
FWLKQKILREKGGEVREMEHKRGHVLAVPYPTQGHITPFRQFCKRLHFKGLKTTLALTTFVFNSINPDLSGPISIATISDGYDHGGFETADSIDDYLKDFKTSGSKTIADIIQKHQTSDNPITCIVYDAFLPWALDVAREFGLVATPFFTQPCAVNYVYYLSYINNGSLQLPIEELPFLELQDLPSFFSVSGSYPAYFEMVLQQFINFEKADFVLVNSFQELELHENELWSKACPVLTIGPTIPSIYLDQRIKSDTGYDLNLFESKDDSFCINWLDTRPQGSVVYVAFGSMAQLTNVQMEELASAVSNFSFLWVVRSSEEEKLPSGFLETVNKEKSLVLKWSPQLQVLSNKAIGCFLTHCGWNSTMEALTFGVPMVAMPQWTDQPMNAKYIQDVWKAGVRVKTEKESGIAKREEIEFSIKEVMEGERSKEMKKNVKKWRDLAVKSLNEGGSTDTNIDTFVSRVQSK

SEQ ID NO: 22736 - protein, 449 aa, Arabidopsis thaliana
  peptide (1)..(449): Ceres Seq. ID no. 12348739
  misc_feature (6)..(449): Pfam Name: UDP-glucoronosyl and UDP-glucosyl transferase Pfam Description: UDP-glucoronosyl and UDP-glucosyl transferase
  misc_feature (2)..(446): Homolog of NCBI NO: 15225134 NR Description: putative glucosyltransferase
  misc_feature (2)..(446): Homolog of NCBI NO: 21536917 NR Description: putative glucosyltransferase [Arabidopsis
  misc_feature (6)..(448): Homolog of NCBI NO: 38345013 NR Description: OSJNBa0052O21.16 [Oryza sativa (japonica
  misc_feature (5)..(443): Homolog of NCBI NO: 15221668 NR Description: UDP-glycosyltransferase family
  misc_feature (3)..(449): Homolog of NCBI NO: 15824451 NR Description: thiohydroximate S-glucosyltransferase [Brassica
  misc_feature (2)..(444): Homolog of NCBI NO: 15225138 NR Description: UDP-glycosyltransferase family
  misc_feature (7)..(444): Homolog of NCBI NO: 15221233 NR Description: putative indole-3-acetate beta-glucosyltransferase
  misc_feature (1)..(446): Homolog of NCBI NO: 7385017 NR Description: UDP-glucose:salicylic acid glucosyltransferase
  misc_feature (1)..(449): Homolog of NCBI NO: 15224372 NR Description: putative glucosyltransferase; protein id:
  misc_feature (1)..(449): Homolog of NCBI NO: 15224368 NR Description: putative glucosyltransferase
MEHKRGHVLAVPYPTQGHITPFRQFCKRLHFKGLKTTLALTTFVFNSINPDLSGPISIATISDGYDHGGFETADSIDDYLKDFKTSGSKTIADIIQKHQTSDNPITCIVYDAFLPWALDVAREFGLVATPFFTQPCAVNYVYYLSYINNGSLQLPIEELPFLELQDLPSFFSVSGSYPAYFEMVLQQFINFEKADFVLVNSFQELELHENELWSKACPVLTIGPTIPSIYLDQRIKSDTGYDLNLFESKDDSFCINWLDTRPQGSVVYVAFGSMAQLTNVQMEELASAVSNFSFLWVVRSSEEEKLPSGFLETVNKEKSLVLKWSPQLQVLSNKAIGCFLTHCGWNSTMEALTFGVPMVAMPQWTDQPMNAKYIQDVWKAGVRVKTEKESGIAKREEIEFSIKEVMEGERSKEMKKNVKKWRDLAVKSLNEGGSTDTNIDTFVSRVQSK

SEQ ID NO: 22737 - protein, 267 aa, Arabidopsis thaliana
  peptide (1)..(267): Ceres Seq. ID no. 12348740
  misc_feature (1)..(267): Pfam Name: UDP-glucoronosyl and UDP-glucosyl transferase Pfam Description: UDP-glucoronosyl and UDP-glucosyl transferase
  misc_feature (1)..(264): Homolog of NCBI NO: 15225134 NR Description: putative glucosyltransferase
  misc_feature (1)..(264): Homolog of NCBI NO: 21536917 NR Description: putative glucosyltransferase [Arabidopsis
  misc_feature (1)..(266): Homolog of NCBI NO: 38345013 NR Description: OSJNBa0052O21.16 [Oryza sativa (japonica
  misc_feature (1)..(261): Homolog of NCBI NO: 15221668 NR Description: UDP-glycosyltransferase family
  misc_feature (1)..(267): Homolog of NCBI NO: 15824451 NR Description: thiohydroximate S-glucosyltransferase [Brassica
  misc_feature (1)..(262): Homolog of NCBI NO: 15225138 NR Description: UDP-glycosyltransferase family
  misc_feature (1)..(262): Homolog of NCBI NO: 15221233 NR Description: putative indole-3-acetate beta-glucosyltransferase
  misc_feature (1)..(264): Homolog of NCBI NO: 7385017 NR Description: UDP-glucose:salicylic acid glucosyltransferase
  misc_feature (1)..(267): Homolog of NCBI NO: 15224372 NR Description: putative glucosyltransferase; protein id:
  misc_feature (1)..(267): Homolog of NCBI NO: 15224368 NR Description: putative glucosyltransferase
MVLQQFINFEKADFVLVNSFQELELHENELWSKACPVLTIGPTIPSIYLDQRIKSDTGYDLNLFESKDDSFCINWLDTRPQGSVVYVAFGSMAQLTNVQMEELASAVSNFSFLWVVRSSEEEKLPSGFLETVNKEKSLVLKWSPQLQVLSNKAIGCFLTHCGWNSTMEALTFGVPMVAMPQWTDQPMNAKYIQDVWKAGVRVKTEKESGIAKREEIEFSIKEVMEGERSKEMKKNVKKWRDLAVKSLNEGGSTDTNIDTFVSRVQSK

SEQ ID NO: 22738 - DNA, 995 bp, Arabidopsis thaliana
  misc_feature (1)..(995): Ceres Seq. ID no. 12394813
  misc_feature: MA Experiment ID: 108461 Result: Up-regulated in Transcription
  misc_feature: MA Experiment 108461 PARAMETER Experiment Name: At_Germinating_Seeds_cDNA_P Parameter: Age (day) Value: 1 vs. 0
  misc_feature: MA Experiment 108461 PARAMETER Experiment Name: At_Germinating_Seeds_cDNA_P Parameter: Tissue Value: Germinating Seeds
  misc_feature: MA Experiment ID: 20000180 Result: Up-regulated in Transcription
  misc_feature: MA Experiment 20000180 PARAMETER Experiment Name: At_Germinating_Seeds_P Parameter: Age (hr) Value: 24 vs. 0
  misc_feature: MA Experiment 20000180 PARAMETER Experiment Name: At_Germinating_Seeds_P Parameter: Tissue Value: Germinating Seeds
  misc_feature: MA Experiment ID: 20000227 Result: Up-regulated in Transcription
  misc_feature: MA Experiment 20000227 PARAMETER Experiment Name: At_Root-Tips-vs-Tops_P Parameter: Tissue Value: Root Tips vs. Root Tops
  misc_feature: MA Experiment ID: 20000234 Result: Up-regulated in Transcription
  misc_feature: MA Experiment 20000234 PARAMETER Experiment Name: At_Siliques_P Parameter: Age (day) Value: 21
  misc_feature: MA Experiment 20000234 PARAMETER Experiment Name: At_Siliques_P Parameter: Organism Value: A. thaliana
  misc_feature: MA Experiment 20000234 PARAMETER Experiment Name: At_Siliques_P Parameter: Plant Line Value: WS
  misc_feature: MA Experiment 20000234 PARAMETER Experiment Name: At_Siliques_P Parameter: Tissue Value: Less Than 5mm Siliques vs. Whole Plant
  misc_feature: MA Experiment ID: 20000235 Result: Up-regulated in Transcription
  misc_feature: MA Experiment 20000235 PARAMETER Experiment Name: At_Siliques_P Parameter: Age (day) Value: 21
  misc_feature: MA Experiment 20000235 PARAMETER Experiment Name: At_Siliques_P Parameter: Organism Value: A. thaliana
  misc_feature: MA Experiment 20000235 PARAMETER Experiment Name: At_Siliques_P Parameter: Plant Line Value: WS
  misc_feature: MA Experiment 20000235 PARAMETER Experiment Name: At_Siliques_P Parameter: Tissue Value: 5-10mm Siliques vs. Whole Plant
atttttaacgctcactggatttataagtagagattttttgtgtctcacaaaaacaaaaaaatcatcgtgaaacgttcgaaggccattttctttggacgaccatcggcgttaaggagagagcttagatctcgtgccgtcgtgcgacgttgttttccggcttgatcaaaatggggttgtcattcggaaagttgttcagcaggctctttgcgaagaaagagatgcgtattctgatggttggtctcgatgctgctggtaagacgactatcctctacaagctcaaacttggagagatcgtcaccactattccaaccattgggttcaacgttgagactgttgaatacaagaacatcagcttcaccgtgtgggatgttgggggtcaagacaagatccgtccattgtggagacattacttccagaacacacagggacttatctttgttgtggacagcaatgatcgtgaccgtgttgttgaagccagggacgagcttcacaggatgctgaatgaggatgaattgagggatgcagttctgcttgtatttgctaacaagcaagatcttcccaacgcgatgaacgctgctgagataactgacaagcttgggcttcattctcttcgtcaacgacactggtacattcagagcacatgtgccacctctggagaaggactctatgagggacttgactggctctccaacaacatcgcaagcaaggcatagatggaatgttagccagattcctcttctgcttgtttggtttacaaatcaaagacagaggtctgtttctctagtactaaaagatttattattatattcttcttcgtcacttatctcaaacgcagatcattttacactttgtacttccccttcaataacttgttacttctctcgtttgcttccgaatttgagtatatcatttttacatctgcttttcatcaaagcataaagcatctttcgaaacaaaaattgaaccgaatttttctgtaaactgatcaaatgtgc

SEQ ID NO: 22739 - protein, 181 aa, Arabidopsis thaliana
  peptide (1)..(181): Ceres Seq. ID no. 12394814
  misc_feature (4)..(177): Pfam Name: ADP-ribosylation factor family Pfam Description: ADP-ribosylation factor family
  misc_feature (1)..(180): Homolog of NCBI NO: 17154685 NR Description: ADP-ribosylation factor [Gossypium hirsutum]
  misc_feature (1)..(181): Homolog of NCBI NO: 11131026 NR Description: ADP-ribosylation factor
  misc_feature (1)..(181): Homolog of NCBI NO: 34900342 NR Description: ADP-ribosylation factor 1
  misc_feature (1)..(181): Homolog of NCBI NO: 39653273 NR Description: ADP-ribosylation factor [Medicago sativa]
  misc_feature (1)..(180): Homolog of NCBI NO: 6573751 NR Description: F20B24.7 [Arabidopsis thaliana]
  misc_feature (1)..(181): Homolog of NCBI NO: 15223164 NR Description: putative ADP-ribosylation factor 1
  misc_feature (1)..(181): Homolog of NCBI NO: 30681825 NR Description: ADP-ribosylation factor, putative [Arabidopsis
  misc_feature (1)..(181): Homolog of NCBI NO: 15228723 NR Description: ADP-ribosylation factor-like protein
  misc_feature (1)..(181): Homolog of NCBI NO: 25294169 NR Description: ADP-ribosylation factor [imported] - pepper
  misc_feature (1)..(181): Homolog of NCBI NO: 15226521 NR Description: ADP-ribosylation factor 1
MGLSFGKLFSRLFAKKEMRILMVGLDAAGKTTILYKLKLGEIVTTIPTIGFNVETVEYKNISFTVWDVGGQDKIRPLWRHYFQNTQGLIFVVDSNDRDRVVEARDELHRMLNEDELRDAVLLVFANKQDLPNAMNAAEITDKLGLHSLRQRHWYIQSTCATSGEGLYEGLDWLSNNIASKA

SEQ ID NO: 22740 - protein, 164 aa, Arabidopsis thaliana
  peptide (1)..(164): Ceres Seq. ID no. 12394815
  misc_feature (1)..(160): Pfam Name: ADP-ribosylation factor family Pfam Description: ADP-ribosylation factor family
  misc_feature (1)..(164): Homolog of NCBI NO: 30681825 NR Description: ADP-ribosylation factor, putative [Arabidopsis
  misc_feature (1)..(164): Homolog of NCBI NO: 15228723 NR Description: ADP-ribosylation factor-like protein
  misc_feature (1)..(163): Homolog of NCBI NO: 17154685 NR Description: ADP-ribosylation factor [Gossypium hirsutum]
  misc_feature (1)..(164): Homolog of NCBI NO: 34900342 NR Description: ADP-ribosylation factor 1
  misc_feature (1)..(163): Homolog of NCBI NO: 6573751 NR Description: F20B24.7 [Arabidopsis thaliana]
  misc_feature (1)..(164): Homolog of NCBI NO: 15223164 NR Description: putative ADP-ribosylation factor 1
  misc_feature (1)..(164): Homolog of NCBI NO: 39653273 NR Description: ADP-ribosylation factor [Medicago sativa]
  misc_feature (1)..(164): Homolog of NCBI NO: 11131026 NR Description: ADP-ribosylation factor
  misc_feature (1)..(164): Homolog of NCBI NO: 25294169 NR Description: ADP-ribosylation factor [imported] - pepper
  misc_feature (1)..(164): Homolog of NCBI NO: 15226521 NR Description: ADP-ribosylation factor 1
MRILMVGLDAAGKTTILYKLKLGEIVTTIPTIGFNVETVEYKNISFTVWDVGGQDKIRPLWRHYFQNTQGLIFVVDSNDRDRVVEARDELHRMLNEDELRDAVLLVFANKQDLPNAMNAAEITDKLGLHSLRQRHWYIQSTCATSGEGLYEGLDWLSNNIASKA

SEQ ID NO: 22741 - protein, 160 aa, Arabidopsis thaliana
  peptide (1)..(160): Ceres Seq. ID no. 12394816
  misc_feature (1)..(156): Pfam Name: ADP-ribosylation factor family Pfam Description: ADP-ribosylation factor family
  misc_feature (1)..(159): Homolog of NCBI NO: 17154685 NR Description: ADP-ribosylation factor [Gossypium hirsutum]
  misc_feature (1)..(160): Homolog of NCBI NO: 11131026 NR Description: ADP-ribosylation factor
  misc_feature (1)..(160): Homolog of NCBI NO: 34900342 NR Description: ADP-ribosylation factor 1
  misc_feature (1)..(160): Homolog of NCBI NO: 39653273 NR Description: ADP-ribosylation factor [Medicago sativa]
  misc_feature (1)..(159): Homolog of NCBI NO: 6573751 NR Description: F20B24.7 [Arabidopsis thaliana]
  misc_feature (1)..(160): Homolog of NCBI NO: 15223164 NR Description: putative ADP-ribosylation factor 1
  misc_feature (1)..(160): Homolog of NCBI NO: 30681825 NR Description: ADP-ribosylation factor, putative [Arabidopsis
  misc_feature (1)..(160): Homolog of NCBI NO: 15228723 NR Description: ADP-ribosylation factor-like protein
  misc_feature (1)..(160): Homolog of NCBI NO: 25294169 NR Description: ADP-ribosylation factor [imported] - pepper
  misc_feature (1)..(160): Homolog of NCBI NO: 15226521 NR Description: ADP-ribosylation factor 1
MVGLDAAGKTTILYKLKLGEIVTTIPTIGFNVETVEYKNISFTVWDVGGQDKIRPLWRHYFQNTQGLIFVVDSNDRDRVVEARDELHRMLNEDELRDAVLLVFANKQDLPNAMNAAEITDKLGLHSLRQRHWYIQSTCATSGEGLYEGLDWLSNNIASKA

SEQ ID NO: 22742 - DNA, 1351 bp, Arabidopsis thaliana
  misc_feature (1)..(1351): Ceres Seq. ID no. 12738245
  misc_feature: MA Experiment ID: 108462 Result: Up-regulated in Transcription
  misc_feature: MA Experiment 108462 PARAMETER Experiment Name: At_Germinating_Seeds_cDNA_P Parameter: Age (day) Value: 2 vs. 0
  misc_feature: MA Experiment 108462 PARAMETER Experiment Name: At_Germinating_Seeds_cDNA_P Parameter: Tissue Value: Germinating Seeds
  misc_feature: MA Experiment ID: 108463 Result: Up-regulated in Transcription
  misc_feature: MA Experiment 108463 PARAMETER Experiment Name: At_Germinating_Seeds_cDNA_P Parameter: Age (day) Value: 3 vs. 0
  misc_feature: MA Experiment 108463 PARAMETER Experiment Name: At_Germinating_Seeds_cDNA_P Parameter: Tissue Value: Germinating Seeds
  misc_feature: MA Experiment ID: 108464 Result: Up-regulated in Transcription
  misc_feature: MA Experiment 108464 PARAMETER Experiment Name: At_Germinating_Seeds_cDNA_P Parameter: Age (day) Value: 4 vs. 0
  misc_feature: MA Experiment 108464 PARAMETER Experiment Name: At_Germinating_Seeds_cDNA_P Parameter: Tissue Value: Germinating Seeds
  misc_feature: MA Experiment ID: 108573 Result: Up-regulated in Transcription
  misc_feature: MA Experiment 108573 PARAMETER Experiment Name: At_Drought_cDNA_P Parameter: Timepoint (hr) Value: 6
  misc_feature: MA Experiment 108573 PARAMETER Experiment Name: At_Drought_cDNA_P Parameter: Tissue Value: Aerial
  misc_feature: MA Experiment 108573 PARAMETER Experiment Name: At_Drought_cDNA_P Parameter: Treatment Value: Drought vs. No Drought
  misc_feature: MA Experiment ID: 108574 Result: Down-regulated in Transcription
  misc_feature: MA Experiment 108574 PARAMETER Experiment Name: At_Wounding__cDNA_P Parameter: Timepoint (hr) Value: 1
  misc_feature: MA Experiment 108574 PARAMETER Experiment Name: At_Wounding__cDNA_P Parameter: Tissue Value: Aerial
  misc_feature: MA Experiment 108574 PARAMETER Experiment Name: At_Wounding__cDNA_P Parameter: Treatment Value: Wounding vs. No Wounding
  misc_feature: MA Experiment ID: 108577 Result: Up-regulated in Transcription
  misc_feature: MA Experiment 108577 PARAMETER Experiment Name: At_42deg_Heat_cDNA_P Parameter: Temperature (deg C) Value: 42 vs. 22
  misc_feature: MA Experiment 108577 PARAMETER Experiment Name: At_42deg_Heat_cDNA_P Parameter: Timepoint (hr) Value: 6
  misc_feature: MA Experiment 108577 PARAMETER Experiment Name: At_42deg_Heat_cDNA_P Parameter: Tissue Value: Aerial
  misc_feature: MA Experiment ID: 108579 Result: Down-regulated in Transcription
  misc_feature: MA Experiment 108579 PARAMETER Experiment Name: At_4deg_Cold_cDNA_P Parameter: Temperature (deg C) Value: 4 vs. 22
  misc_feature: MA Experiment 108579 PARAMETER Experiment Name: At_4deg_Cold_cDNA_P Parameter: Timepoint (hr) Value: 6
  misc_feature: MA Experiment 108579 PARAMETER Experiment Name: At_4deg_Cold_cDNA_P Parameter: Tissue Value: Aerial
  misc_feature: MA Experiment ID: 108595 Result: Down-regulated in Transcription
  misc_feature: MA Experiment 108595 PARAMETER Experiment Name: At_Ler-pi_Ovule_cDNA_P Parameter: Plant Line Value: null
  misc_feature: MA Experiment ID: 20000069 Result: Down-regulated in Transcription
  misc_feature: MA Experiment 20000069 PARAMETER Experiment Name: At_100uM_ABA_Mutants_cDNA_P Parameter: Plant Line Value: CS23
  misc_feature: MA Experiment 20000069 PARAMETER Experiment Name: At_100uM_ABA_Mutants_cDNA_P Parameter: Timepoint (hr) Value: 6
  misc_feature: MA Experiment 20000069 PARAMETER Experiment Name: At_100uM_ABA_Mutants_cDNA_P Parameter: Tissue Value: Aerial
  misc_feature: MA Experiment 20000069 PARAMETER Experiment Name: At_100uM_ABA_Mutants_cDNA_P Parameter: Treatment Value: 100uM ABA vs. No Treatment
  misc_feature: MA Experiment ID: 20000070 Result: Down-regulated in Transcription
  misc_feature: MA Experiment 20000070 PARAMETER Experiment Name: At_100uM_ABA_Mutants_cDNA_P Parameter: Plant Line Value: CS24
  misc_feature: MA Experiment 20000070 PARAMETER Experiment Name: At_100uM_ABA_Mutants_cDNA_P Parameter: Timepoint (hr) Value: 6
  misc_feature: MA Experiment 20000070 PARAMETER Experiment Name: At_100uM_ABA_Mutants_cDNA_P Parameter: Tissue Value: Aerial
  misc_feature: MA Experiment 20000070 PARAMETER Experiment Name: At_100uM_ABA_Mutants_cDNA_P Parameter: Treatment Value: 100uM ABA vs. No Treatment
  misc_feature: MA Experiment ID: 20000071 Result: Down-regulated in Transcription
  misc_feature: MA Experiment 20000071 PARAMETER Experiment Name: At_100uM_ABA_Mutants_cDNA_P Parameter: Plant Line Value: CS8104
  misc_feature: MA Experiment 20000071 PARAMETER Experiment Name: At_100uM_ABA_Mutants_cDNA_P Parameter: Timepoint (hr) Value: 6
  misc_feature: MA Experiment 20000071 PARAMETER Experiment Name: At_100uM_ABA_Mutants_cDNA_P Parameter: Tissue Value: Aerial
  misc_feature: MA Experiment 20000071 PARAMETER Experiment Name: At_100uM_ABA_Mutants_cDNA_P Parameter: Treatment Value: 100uM ABA vs. No Treatment
  misc_feature: MA Experiment ID: 20000072 Result: Down-regulated in Transcription
  misc_feature: MA Experiment 20000072 PARAMETER Experiment Name: At_100uM_ABA_Mutants_cDNA_P Parameter: Plant Line Value: CS8105
  misc_feature: MA Experiment 20000072 PARAMETER Experiment Name: At_100uM_ABA_Mutants_cDNA_P Parameter: Timepoint (hr) Value: 6
  misc_feature: MA Experiment 20000072 PARAMETER Experiment Name: At_100uM_ABA_Mutants_cDNA_P Parameter: Tissue Value: Aerial
  misc_feature: MA Experiment 20000072 PARAMETER Experiment Name: At_100uM_ABA_Mutants_cDNA_P Parameter: Treatment Value: 100uM ABA vs. No Treatment
  misc_feature: MA Experiment ID: 20000086 Result: Down-regulated in Transcription
  misc_feature: MA Experiment 20000086 PARAMETER Experiment Name: At_100uM_ABA_Mutants_cDNA_P Parameter: Plant Line Value: CS22
  misc_feature: MA Experiment 20000086 PARAMETER Experiment Name: At_100uM_ABA_Mutants_cDNA_P Parameter: Timepoint (hr) Value: 6
  misc_feature: MA Experiment 20000086 PARAMETER Experiment Name: At_100uM_ABA_Mutants_cDNA_P Parameter: Tissue Value: Aerial
  misc_feature: MA Experiment 20000086 PARAMETER Experiment Name: At_100uM_ABA_Mutants_cDNA_P Parameter: Treatment Value: 100uM ABA vs. No Treatment
  misc_feature: MA Experiment ID: 20000087 Result: Down-regulated in Transcription
  misc_feature: MA Experiment 20000087 PARAMETER Experiment Name: At_100uM_ABA_Mutants_cDNA_P Parameter: Plant Line Value: WS
  misc_feature: MA Experiment 20000087 PARAMETER Experiment Name: At_100uM_ABA_Mutants_cDNA_P Parameter: Timepoint (hr) Value: 6
  misc_feature: MA Experiment 20000087 PARAMETER Experiment Name: At_100uM_ABA_Mutants_cDNA_P Parameter: Tissue Value: Aerial
  misc_feature: MA Experiment 20000087 PARAMETER Experiment Name: At_100uM_ABA_Mutants_cDNA_P Parameter: Treatment Value: 100uM ABA vs. No Treatment
  misc_feature: MA Experiment ID: 20000088 Result: Down-regulated in Transcription
  misc_feature: MA Experiment 20000088 PARAMETER Experiment Name: At_100uM_ABA_Mutants_cDNA_P Parameter: Plant Line Value: Landsberg
  misc_feature: MA Experiment 20000088 PARAMETER Experiment Name: At_100uM_ABA_Mutants_cDNA_P Parameter: Timepoint (hr) Value: 6
  misc_feature: MA Experiment 20000088 PARAMETER Experiment Name: At_100uM_ABA_Mutants_cDNA_P Parameter: Tissue Value: Aerial
  misc_feature: MA Experiment 20000088 PARAMETER Experiment Name: At_100uM_ABA_Mutants_cDNA_P Parameter: Treatment Value: 100uM ABA vs. No Treatment
  misc_feature: MA Experiment ID: 20000089 Result: Down-regulated in Transcription
  misc_feature: MA Experiment ID: 20000090 Result: Down-regulated in Transcription
  misc_feature: MA Experiment ID: 20000111 Result: Up-regulated in Transcription
  misc_feature: MA Experiment 20000111 PARAMETER Experiment Name: At_42deg_Heat_cDNA_P Parameter: Temperature (deg C) Value: 42 vs. 22
  misc_feature: MA Experiment 20000111 PARAMETER Experiment Name: At_42deg_Heat_cDNA_P Parameter: Timepoint (hr) Value: 6
  misc_feature: MA Experiment 20000111 PARAMETER Experiment Name: At_42deg_Heat_cDNA_P Parameter: Tissue Value: Aerial
  misc_feature: MA Experiment ID: 20000113 Result: Up-regulated in Transcription
  misc_feature: MA Experiment 20000113 PARAMETER Experiment Name: At_42deg_Heat_cDNA_P Parameter: Temperature (deg C) Value: 42 vs. 22
  misc_feature: MA Experiment 20000113 PARAMETER Experiment Name: At_42deg_Heat_cDNA_P Parameter: Timepoint (hr) Value: 8
  misc_feature: MA Experiment 20000113 PARAMETER Experiment Name: At_42deg_Heat_cDNA_P Parameter: Tissue Value: Aerial
  misc_feature: MA Experiment ID: 20000117 Result: Down-regulated in Transcription
  misc_feature: MA Experiment 20000117 PARAMETER Experiment Name: At_100uM_ABA_Mutants_cDNA_P Parameter: Plant Line Value: Columbia
  misc_feature: MA Experiment 20000117 PARAMETER Experiment Name: At_100uM_ABA_Mutants_cDNA_P Parameter: Timepoint (hr) Value: 6
  misc_feature: MA Experiment 20000117 PARAMETER Experiment Name: At_100uM_ABA_Mutants_cDNA_P Parameter: Tissue Value: Aerial
  misc_feature: MA Experiment 20000117 PARAMETER Experiment Name: At_100uM_ABA_Mutants_cDNA_P Parameter: Treatment Value: 100uM ABA vs. No Treatment
  misc_feature: MA Experiment ID: 20000173 Result: Up-regulated in Transcription
  misc_feature: MA Experiment 20000173 PARAMETER Experiment Name: At_42deg_Heat_P Parameter: Age (day) Value: 14
  misc_feature: MA Experiment 20000173 PARAMETER Experiment Name: At_42deg_Heat_P Parameter: Organism Value: A. thaliana
  misc_feature: MA Experiment 20000173 PARAMETER Experiment Name: At_42deg_Heat_P Parameter: Plant Line Value: WS
  misc_feature: MA Experiment 20000173 PARAMETER Experiment Name: At_42deg_Heat_P Parameter: Temperature (deg C) Value: 42 vs. 22
  misc_feature: MA Experiment 20000173 PARAMETER Experiment Name: At_42deg_Heat_P Parameter: Timepoint (hr) Value: 6
  misc_feature: MA Experiment 20000173 PARAMETER Experiment Name: At_42deg_Heat_P Parameter: Tissue Value: Aerial
  misc_feature: MA Experiment ID: 20000224 Result: Down-regulated in Transcription
  misc_feature: MA Experiment ID: 20000234 Result: Down-regulated in Transcription
  misc_feature: MA Experiment 20000234 PARAMETER Experiment Name: At_Siliques_P Parameter: Age (day) Value: 21
  misc_feature: MA Experiment 20000234 PARAMETER Experiment Name: At_Siliques_P Parameter: Organism Value: A. thaliana
  misc_feature: MA Experiment 20000234 PARAMETER Experiment Name: At_Siliques_P Parameter: Plant Line Value: WS
  misc_feature: MA Experiment 20000234 PARAMETER Experiment Name: At_Siliques_P Parameter: Tissue Value: Less Than 5mm Siliques vs. Whole Plant
  misc_feature: MA Experiment ID: 20000235 Result: Down-regulated in Transcription
  misc_feature: MA Experiment 20000235 PARAMETER Experiment Name: At_Siliques_P Parameter: Age (day) Value: 21
  misc_feature: MA Experiment 20000235 PARAMETER Experiment Name: At_Siliques_P Parameter: Organism Value: A. thaliana
  misc_feature: MA Experiment 20000235 PARAMETER Experiment Name: At_Siliques_P Parameter: Plant Line Value: WS
  misc_feature: MA Experiment 20000235 PARAMETER Experiment Name: At_Siliques_P Parameter: Tissue Value: 5-10mm Siliques vs. Whole Plant
  misc_feature: MA Experiment ID: 20000264 Result: Down-regulated in Transcription
  misc_feature: MA Experiment 20000264 PARAMETER Experiment Name: At_Open_Flower_P Parameter: Age (day) Value: 21
  misc_feature: MA Experiment 20000264 PARAMETER Experiment Name: At_Open_Flower_P Parameter: Plant Line Value: WS
  misc_feature: MA Experiment 20000264 PARAMETER Experiment Name: At_Open_Flower_P Parameter: Tissue Value: Open Flower vs. Whole Plant
  misc_feature: MA Experiment ID: 20000265 Result: Down-regulated in Transcription
  misc_feature: MA Experiment 20000265 PARAMETER Experiment Name: At_Open_Flower_P Parameter: Age (day) Value: 21
  misc_feature: MA Experiment 20000265 PARAMETER Experiment Name: At_Open_Flower_P Parameter: Plant Line Value: WS
  misc_feature: MA Experiment 20000265 PARAMETER Experiment Name: At_Open_Flower_P Parameter: Tissue Value: Closed Flower vs. Whole Plant
  misc_feature: MA Experiment ID: 20000286 Result: Down-regulated in Transcription
  misc_feature: MA Experiment 20000286 PARAMETER Experiment Name: At_Open_Flower_P Parameter: Age (day) Value: 21
  misc_feature: MA Experiment 20000286 PARAMETER Experiment Name: At_Open_Flower_P Parameter: Plant Line Value: WS
  misc_feature: MA Experiment 20000286 PARAMETER Experiment Name: At_Open_Flower_P Parameter: Tissue Value: Half Open vs. Whole Plant
  misc_feature: MA Experiment ID: 20000441 Result: Up-regulated in Transcription
  misc_feature: MA Experiment 20000441 PARAMETER Experiment Name: At_1uM_BR-BRZ__P Parameter: Tissue Value: Shoot Apices
  misc_feature: MA Experiment 20000441 PARAMETER Experiment Name: At_1uM_BR-BRZ__P Parameter: Treatment Value: 1uM BR vs. No Treatment
  misc_feature: MA Experiment ID: 20000443 Result: Up-regulated in Transcription
  misc_feature: MA Experiment 20000443 PARAMETER Experiment Name: At_1uM_BR-BRZ__P Parameter: Tissue Value: Shoot Apices
  misc_feature: MA Experiment 20000443 PARAMETER Experiment Name: At_1uM_BR-BRZ__P Parameter: Treatment Value: 1uM BRZ vs. No Treatment
  misc_feature: MA Experiment ID: 20000573 Result: Down-regulated in Transcription
  misc_feature: MA Experiment 20000573 PARAMETER Experiment Name: At_100uM_ABA_Mutants__P Parameter: Organism Value: A. thaliana
  misc_feature: MA Experiment 20000573 PARAMETER Experiment Name: At_100uM_ABA_Mutants__P Parameter: Plant Line Value: CS22 vs. Ler wt
  misc_feature: MA Experiment 20000573 PARAMETER Experiment Name: At_100uM_ABA_Mutants__P Parameter: Timepoint (hr) Value: N/A
  misc_feature: MA Experiment 20000573 PARAMETER Experiment Name: At_100uM_ABA_Mutants__P Parameter: Tissue Value: Whole Plant
  misc_feature: MA Experiment 20000573 PARAMETER Experiment Name: At_100uM_ABA_Mutants__P Parameter: Treatment Value: None
  misc_feature: MA Experiment ID: 20000574 Result: Down-regulated in Transcription
  misc_feature: MA Experiment 20000574 PARAMETER Experiment Name: At_100uM_ABA_Mutants__P Parameter: Organism Value: A. thaliana
  misc_feature: MA Experiment 20000574 PARAMETER Experiment Name: At_100uM_ABA_Mutants__P Parameter: Plant Line Value: CS23 vs. Ler wt
  misc_feature: MA Experiment 20000574 PARAMETER Experiment Name: At_100uM_ABA_Mutants__P Parameter: Timepoint (hr) Value: N/A
  misc_feature: MA Experiment 20000574 PARAMETER Experiment Name: At_100uM_ABA_Mutants__P Parameter: Tissue Value: Whole Plant
  misc_feature: MA Experiment 20000574 PARAMETER Experiment Name: At_100uM_ABA_Mutants__P Parameter: Treatment Value: None
  misc_feature: MA Experiment ID: 20001247 Result: Up-regulated in Transcription
  misc_feature: MA Experiment 20001247 PARAMETER Experiment Name: At_Far-red-induction_P Parameter: Age (day) Value: 7
  misc_feature: MA Experiment 20001247 PARAMETER Experiment Name: At_Far-red-induction_P Parameter: Light Value: Far-red vs. White
  misc_feature: MA Experiment 20001247 PARAMETER Experiment Name: At_Far-red-induction_P Parameter: Organism Value: A. thaliana
  misc_feature: MA Experiment 20001247 PARAMETER Experiment Name: At_Far-red-induction_P Parameter: Plant Line Value: Columbia
  misc_feature: MA Experiment 20001247 PARAMETER Experiment Name: At_Far-red-induction_P Parameter: Timepoint (hr) Value: 1
  misc_feature: MA Experiment 20001247 PARAMETER Experiment Name: At_Far-red-induction_P Parameter: Tissue Value: Whole Plant
  misc_feature: MA Experiment ID: 20001450 Result: Up-regulated in Transcription
  misc_feature: MA Experiment 20001450 PARAMETER Experiment Name: At_Far-red-induction_P Parameter: Age (day) Value: 7
  misc_feature: MA Experiment 20001450 PARAMETER Experiment Name: At_Far-red-induction_P Parameter: Light Value: Far-red vs. White
  misc_feature: MA Experiment 20001450 PARAMETER Experiment Name: At_Far-red-induction_P Parameter: Organism Value: A. thaliana
  misc_feature: MA Experiment 20001450 PARAMETER Experiment Name: At_Far-red-induction_P Parameter: Plant Line Value: Columbia
  misc_feature: MA Experiment 20001450 PARAMETER Experiment Name: At_Far-red-induction_P Parameter: Timepoint (hr) Value: 8
  misc_feature: MA Experiment 20001450 PARAMETER Experiment Name: At_Far-red-induction_P Parameter: Tissue Value: Whole Plant
  misc_feature: MA Experiment ID: 20001451 Result: Up-regulated in Transcription
  misc_feature: MA Experiment 20001451 PARAMETER Experiment Name: At_Far-red-induction_P Parameter: Age (day) Value: 7
  misc_feature: MA Experiment 20001451 PARAMETER Experiment Name: At_Far-red-induction_P Parameter: Light Value: Far-red vs. White
  misc_feature: MA Experiment 20001451 PARAMETER Experiment Name: At_Far-red-induction_P Parameter: Organism Value: A. thaliana
  misc_feature: MA Experiment 20001451 PARAMETER Experiment Name: At_Far-red-induction_P Parameter: Plant Line Value: Columbia
  misc_feature: MA Experiment 20001451 PARAMETER Experiment Name: At_Far-red-induction_P Parameter: Timepoint (hr) Value: 24
  misc_feature: MA Experiment 20001451 PARAMETER Experiment Name: At_Far-red-induction_P Parameter: Tissue Value: Whole Plant
  misc_feature: MA Experiment ID: 20001557 Result: Down-regulated in Transcription
  misc_feature: MA Experiment 20001557 PARAMETER Experiment Name: At_Drought_Soil_Dry_P Parameter: Age (day) Value: 27
  misc_feature: MA Experiment 20001557 PARAMETER Experiment Name: At_Drought_Soil_Dry_P Parameter: Organism Value: A. thaliana
  misc_feature: MA Experiment 20001557 PARAMETER Experiment Name: At_Drought_Soil_Dry_P Parameter: Plant Line Value: WS
  misc_feature: MA Experiment 20001557 PARAMETER Experiment Name: At_Drought_Soil_Dry_P Parameter: Post Timepoint (hr) Value: 3
  misc_feature: MA Experiment 20001557 PARAMETER Experiment Name: At_Drought_Soil_Dry_P Parameter: Post-Treatment Value: Re-Water vs. No Drought
  misc_feature: MA Experiment 20001557 PARAMETER Experiment Name: At_Drought_Soil_Dry_P Parameter: Timepoint (day) Value: 13
  misc_feature: MA Experiment 20001557 PARAMETER Experiment Name: At_Drought_Soil_Dry_P Parameter: Treatment Value: Drought vs. No Drought
aaaaccccttctctcttcagtctctctctctctagacgatctctatcttgaataaaataccgataatgacctcaaccaatccggtggtcgccgaagtaataccggcggaaacttctacagatgctacagagacgacgattgcaacgacggaagctggtgaagcaccggagaagaaggtgaggaaagcttatacaatcaccaagtctagagagagttggactgaaggagaacacgacaagtttctggaagctcttcaattgtttgatcgtgactggaaaaagatagaagattttgttggttcaaagacagttattcagatcagtagccatgcccaaaaatactttctaaaggtccaaaaaaatgggactttagcacatgttccaccccctaggcctaagcgcaaagctgctcatccatatcctcaaaaggcatcgaaaaatgctcaaatgtcgcttcacgtttccatgtcctttcctactcaaataaataacctgcctggatatactccatgggatgatgatacatctgcattgttaaacattgctgtaagtggggttattccaccagaagatgaacttgatactctttgtggagcagaagttgatgttggatcaaatgacatgataagtgaaactagtccttcagcatctggtatcggaagctcaagcagaacactatcagattctaagggtttgagactggcgaaacaagctccctcaatgcatggtcttcctgattttgctgaggtttataacttcattgggagtgtgttcgatcctgacagcaaaggccgcatgaaaaagctcaaggaaatggatcctataaatttcgaaactgttttgctgttgatgagaaacctcacagtgaacttgtcaaaccctgactttgaacctacttctgaatatgttgatgctgcagaggaaggtcatgaacacttaagctcttagctgtttgtgcactcaacaagttatatatcttcttgacgacttcttgctcgcaacaactctctaccagctatcaaatgcatcgtacggttgttgtctgaggagaacataactgagtcgtcgtcacaaacaagaggaacatatgcagtttcggtcagaaccagtcgtgtgaatggtagatatatgtatgtgtgtgtagaaaatggttaccaattgtatcttctttttgataattattttttcatgccttttgtaatatgtaagtttctttacctcgttctctgattggttattttctcgttatctgtttaaccaaaagctatgtaacacagtagcaaattgttacttaactcggaagtgagatacataactctgttgtattgcacttgtatcaagcgttaacgtcc

SEQ ID NO: 22743 - protein, 293 aa, Arabidopsis thaliana
  peptide (1)..(293): Ceres Seq. ID no. 12738246
  misc_feature (48)..(93): Pfam Name: Myb-like DNA-binding domain Pfam Description: Myb-like DNA-binding domain
  misc_feature (1)..(124): Homolog of NCBI NO: 2505876 NR Description: MYB-related protein [Arabidopsis thaliana]
  misc_feature (3)..(125): Homolog of NCBI NO: 6682239 NR Description: putative MYB-related protein [Arabidopsis
  misc_feature (17)..(274): Homolog of NCBI NO: 15234118 NR Description: myb family transcription factor; protein id:
  misc_feature (14)..(275): Homolog of NCBI NO: 8953721 NR Description: contains similarity to MYB-related DNA-binding
  misc_feature (14)..(289): Homolog of NCBI NO: 30696225 NR Description: myb family transcription factor [Arabidopsis
  misc_feature (14)..(289): Homolog of NCBI NO: 30696221 NR Description: myb family transcription factor [Arabidopsis
  misc_feature (3)..(277): Homolog of NCBI NO: 30680926 NR Description: myb family transcription factor [Arabidopsis
  misc_feature (1)..(293): Homolog of NCBI NO: 11357907 NR Description: hypothetical protein F9G14.150 - Arabidopsis
  misc_feature (1)..(293): Homolog of NCBI NO: 14596213 NR Description: putative protein [Arabidopsis thaliana]
  misc_feature (1)..(293): Homolog of NCBI NO: 18414039 NR Description: myb family transcription factor
MTSTNPVVAEVIPAETSTDATETTIATTEAGEAPEKKVRKAYTITKSRESWTEGEHDKFLEALQLFDRDWKKIEDFVGSKTVIQISSHAQKYFLKVQKNGTLAHVPPPRPKRKAAHPYPQKASKNAQMSLHVSMSFPTQINNLPGYTPWDDDTSALLNIAVSGVIPPEDELDTLCGAEVDVGSNDMISETSPSASGIGSSSRTLSDSKGLRLAKQAPSMHGLPDFAEVYNFIGSVFDPDSKGRMKKLKEMDPINFETVLLLMRNLTVNLSNPDFEPTSEYVDAAEEGHEHLSS

SEQ ID NO: 22744 - protein, 166 aa, Arabidopsis thaliana
  peptide (1)..(166): Ceres Seq. ID no. 12738247
  misc_feature (95)..(163): Homolog of NCBI NO: 34897744 NR Description: Similar to Arabidopsis thaliana DNA chromosome 4,
  misc_feature (96)..(156): Homolog of NCBI NO: 15223419 NR Description: myb family transcription factor; protein id:
  misc_feature (1)..(147): Homolog of NCBI NO: 15234118 NR Description: myb family transcription factor; protein id:
  misc_feature (1)..(148): Homolog of NCBI NO: 8953721 NR Description: contains similarity to MYB-related DNA-binding
  misc_feature (1)..(162): Homolog of NCBI NO: 30696225 NR Description: myb family transcription factor [Arabidopsis
  misc_feature (1)..(162): Homolog of NCBI NO: 30696221 NR Description: myb family transcription factor [Arabidopsis
  misc_feature (1)..(150): Homolog of NCBI NO: 30680926 NR Description: myb family transcription factor [Arabidopsis
  misc_feature (1)..(166): Homolog of NCBI NO: 11357907 NR Description: hypothetical protein F9G14.150 - Arabidopsis
  misc_feature (1)..(166): Homolog of NCBI NO: 14596213 NR Description: putative protein [Arabidopsis thaliana]
  misc_feature (1)..(166): Homolog of NCBI NO: 18414039 NR Description: myb family transcription factor
MSLHVSMSFPTQINNLPGYTPWDDDTSALLNIAVSGVIPPEDELDTLCGAEVDVGSNDMISETSPSASGIGSSSRTLSDSKGLRLAKQAPSMHGLPDFAEVYNFIGSVFDPDSKGRMKKLKEMDPINFETVLLLMRNLTVNLSNPDFEPTSEYVDAAEEGHEHLSS

SEQ ID NO: 22745 - protein, 160 aa, Arabidopsis thaliana
  peptide (1)..(160): Ceres Seq. ID no. 12738248
  misc_feature (89)..(157): Homolog of NCBI NO: 34897744 NR Description: Similar to Arabidopsis thaliana DNA chromosome 4,
  misc_feature (90)..(150): Homolog of NCBI NO: 15223419 NR Description: myb family transcription factor; protein id:
  misc_feature (1)..(141): Homolog of NCBI NO: 15234118 NR Description: myb family transcription factor; protein id:
  misc_feature (1)..(142): Homolog of NCBI NO: 8953721 NR Description: contains similarity to MYB-related DNA-binding
  misc_feature (1)..(156): Homolog of NCBI NO: 30696225 NR Description: myb family transcription factor [Arabidopsis
  misc_feature (1)..(156): Homolog of NCBI NO: 30696221 NR Description: myb family transcription factor [Arabidopsis
  misc_feature (1)..(144): Homolog of NCBI NO: 30680926 NR Description: myb family transcription factor [Arabidopsis
  misc_feature (1)..(160): Homolog of NCBI NO: 11357907 NR Description: hypothetical protein F9G14.150 - Arabidopsis
  misc_feature (1)..(160): Homolog of NCBI NO: 14596213 NR Description: putative protein [Arabidopsis thaliana]
  misc_feature (1)..(160): Homolog of NCBI NO: 18414039 NR Description: myb family transcription factor
MSFPTQINNLPGYTPWDDDTSALLNIAVSGVIPPEDELDTLCGAEVDVGSNDMISETSPSASGIGSSSRTLSDSKGLRLAKQAPSMHGLPDFAEVYNFIGSVFDPDSKGRMKKLKEMDPINFETVLLLMRNLTVNLSNPDFEPTSEYVDAAEEGHEHLSS

SEQ ID NO: 22746 - DNA, 1203 bp, Arabidopsis thaliana
  misc_feature (1)..(1203): Ceres Seq. ID no. 12396189
  misc_feature: MA Experiment ID: 108488 Result: Down-regulated in Transcription
  misc_feature: MA Experiment ID: 20000224 Result: Up-regulated in Transcription
  misc_feature: MA Experiment ID: 20001911 Result: Up-regulated in Transcription
  misc_feature: MA Experiment 20001911 PARAMETER Experiment Name: At_Drought_Reproduction_P Parameter: Age (day) Value: 40
  misc_feature: MA Experiment 20001911 PARAMETER Experiment Name: At_Drought_Reproduction_P Parameter: Organism Value: A. thaliana
  misc_feature: MA Experiment 20001911 PARAMETER Experiment Name: At_Drought_Reproduction_P Parameter: Plant Line Value: WS
  misc_feature: MA Experiment 20001911 PARAMETER Experiment Name: At_Drought_Reproduction_P Parameter: Timepoint (day) Value: 10
  misc_feature: MA Experiment 20001911 PARAMETER Experiment Name: At_Drought_Reproduction_P Parameter: Tissue Value: Flowers
  misc_feature: MA Experiment 20001911 PARAMETER Experiment Name: At_Drought_Reproduction_P Parameter: Treatment Value: Drought vs. No Drought
aaaagtttgcatctttacttgggttgtgtctggaatcaattacttcctaaaggctgccatttgttaacttactctgttagtctactaccaccaataactatgtttttcgatggataccattatcatggaacaacctttgagcagagttaccggtgttatccggcatcttttattgacaagccacaacttgaaagtggtgacaagattataatgccaccatcagcccttgatcgtctagcctctttgcatattgactatccgatgctgtttgagcttcgtaatgctggaattgaacgtgttacacactgtggagtccttgagttcattgcagaagaaggcatgatttacatgccatattggatgatgcaaaatctgctgctgcaagaaggagacattgtgagagttagaaatgtcactcttccaaagggaacttacgttaaactacagccccacacaacagacttcctggatatatccaacccgaaagccatcttggagactgctttgagaaattattcatgcctaactagtggggatagcattatggttccatacaacaataagaagtacttcatagatatagttgaaacaaagcctgctaacgcaatcagcatcatagaaacagactgtgaggttgatttcgcacctcccctcgattacaaggagcctgaacgtcccacagcacctgctgcagctaagggtccggcaaaagctgaggaggttgtggatgaacctgaaaccaaagttcaaccctttcacgggatctggaagacggttagatgggagacctcttgcctatgagccagcgccagcctctagctcaaaagacaaacaacctgttgtcgctaatggtaatggacagtcatctgtagcaagtagctcagagaaagctacacgagctcagggaaagcttgtatttggggccaacgcaaaccgtgctccaaaagaagctgctcctaaagttggagctgcaaaagagacaaagaaagaggaacaggagaagaatgacgagcccaagtttcaagctttctctgggaagaagtattcattgaggggttgatcaactcacacaatgggtctactcagtctatttatgacctctcatgttgtgtactaaaaatacaaggaaaacaaataagtgaataaatctctggctcctcttgacgcggcttgttttctttatcagattcaatgcaactttct

SEQ ID NO: 22747 - protein, 266 aa, Arabidopsis thaliana
  peptide (1)..(266): Ceres Seq. ID no. 12396190
  misc_feature (43)..(217): Pfam Name: Ubiquitin fusion degradation protein UFD1 Pfam Description: Ubiquitin fusion degradation protein UFD1
  misc_feature (46)..(226): Homolog of NCBI NO: 20891983 NR Description: ubiquitin fusion degradation 1 like [Mus
  misc_feature (46)..(226): Homolog of NCBI NO: 16758158 NR Description: ubiquitin fusion degradation 1-like [Rattus
  misc_feature (71)..(252): Homolog of NCBI NO: 30684115 NR Description: ubiquitin fusion degradation (UFD) protein,
  misc_feature (65)..(252): Homolog of NCBI NO: 7488408 NR Description: probable ubiquitin fusion-degradation protein
  misc_feature (34)..(266): Homolog of NCBI NO: 38345534 NR Description: OSJNBa0020J04.9 [Oryza sativa (japonica
  misc_feature (34)..(254): Homolog of NCBI NO: 18420341 NR Description: putative ubiquitin-dependent proteolytic protein
  misc_feature (34)..(254): Homolog of NCBI NO: 7488221 NR Description: probable ubiquitin-dependent proteolytic protein
  misc_feature (35)..(254): Homolog of NCBI NO: 25347017 NR Description: probable ubiquitin fusion-degradation protein
  misc_feature (34)..(254): Homolog of NCBI NO: 18399646 NR Description: putative ubiquitin fusion-degradation protein
  misc_feature (34)..(254): Homolog of NCBI NO: 21592947 NR Description: putative ubiquitin fusion-degradation protein
KSLHLYLGCVWNQLLPKGCHLLTYSVSLLPPITMFFDGYHYHGTTFEQSYRCYPASFIDKPQLESGDKIIMPPSALDRLASLHIDYPMLFELRNAGIERVTHCGVLEFIAEEGMIYMPYWMMQNLLLQEGDIVRVRNVTLPKGTYVKLQPHTTDFLDISNPKAILETALRNYSCLTSGDSIMVPYNNKKYFIDIVETKPANAISIIETDCEVDFAPPLDYKEPERPTAPAAAKGPAKAEEVVDEPETKVQPFHGIWKTVRWETSCL

SEQ ID NO: 22748 - protein, 233 aa, Arabidopsis thaliana
  peptide (1)..(233): Ceres Seq. ID no. 12396191
  misc_feature (10)..(184): Pfam Name: Ubiquitin fusion degradation protein UFD1 Pfam Description: Ubiquitin fusion degradation protein UFD1
  misc_feature (13)..(193): Homolog of NCBI NO: 20891983 NR Description: ubiquitin fusion degradation 1 like [Mus
  misc_feature (13)..(193): Homolog of NCBI NO: 16758158 NR Description: ubiquitin fusion degradation 1-like [Rattus
  misc_feature (38)..(219): Homolog of NCBI NO: 30684115 NR Description: ubiquitin fusion degradation (UFD) protein,
  misc_feature (32)..(219): Homolog of NCBI NO: 7488408 NR Description: probable ubiquitin fusion-degradation protein
  misc_feature (1)..(233): Homolog of NCBI NO: 38345534 NR Description: OSJNBa0020J04.9 [Oryza sativa (japonica
  misc_feature (1)..(221): Homolog of NCBI NO: 18420341 NR Description: putative ubiquitin-dependent proteolytic protein
  misc_feature (1)..(221): Homolog of NCBI NO: 7488221 NR Description: probable ubiquitin-dependent proteolytic protein
  misc_feature (2)..(221): Homolog of NCBI NO: 25347017 NR Description: probable ubiquitin fusion-degradation protein
  misc_feature (1)..(221): Homolog of NCBI NO: 18399646 NR Description: putative ubiquitin fusion-degradation protein
  misc_feature (1)..(221): Homolog of NCBI NO: 21592947 NR Description: putative ubiquitin fusion-degradation protein
MFFDGYHYHGTTFEQSYRCYPASFIDKPQLESGDKIIMPPSALDRLASLHIDYPMLFELRNAGIERVTHCGVLEFIAEEGMIYMPYWMMQNLLLQEGDIVRVRNVTLPKGTYVKLQPHTTDFLDISNPKAILETALRNYSCLTSGDSIMVPYNNKKYFIDIVETKPANAISIIETDCEVDFAPPLDYKEPERPTAPAAAKGPAKAEEVVDEPETKVQPFHGIWKTVRWETSCL

SEQ ID NO: 22749 - protein, 196 aa, Arabidopsis thaliana
  peptide (1)..(196): Ceres Seq. ID no. 12396192
  misc_feature (1)..(147): Pfam Name: Ubiquitin fusion degradation protein UFD1 Pfam Description: Ubiquitin fusion degradation protein UFD1
  misc_feature (1)..(156): Homolog of NCBI NO: 20891983 NR Description: ubiquitin fusion degradation 1 like [Mus
  misc_feature (1)..(156): Homolog of NCBI NO: 16758158 NR Description: ubiquitin fusion degradation 1-like [Rattus
  misc_feature (1)..(182): Homolog of NCBI NO: 30684115 NR Description: ubiquitin fusion degradation (UFD) protein,
  misc_feature (1)..(182): Homolog of NCBI NO: 7488408 NR Description: probable ubiquitin fusion-degradation protein
  misc_feature (1)..(196): Homolog of NCBI NO: 38345534 NR Description: OSJNBa0020J04.9 [Oryza sativa (japonica
  misc_feature (1)..(184): Homolog of NCBI NO: 18420341 NR Description: putative ubiquitin-dependent proteolytic protein
  misc_feature (1)..(184): Homolog of NCBI NO: 7488221 NR Description: probable ubiquitin-dependent proteolytic protein
  misc_feature (1)..(184): Homolog of NCBI NO: 25347017 NR Description: probable ubiquitin fusion-degradation protein
  misc_feature (1)..(184): Homolog of NCBI NO: 18399646 NR Description: putative ubiquitin fusion-degradation protein
  misc_feature (1)..(184): Homolog of NCBI NO: 21592947 NR Description: putative ubiquitin fusion-degradation protein
MPPSALDRLASLHIDYPMLFELRNAGIERVTHCGVLEFIAEEGMIYMPYWMMQNLLLQEGDIVRVRNVTLPKGTYVKLQPHTTDFLDISNPKAILETALRNYSCLTSGDSIMVPYNNKKYFIDIVETKPANAISIIETDCEVDFAPPLDYKEPERPTAPAAAKGPAKAEEVVDEPETKVQPFHGIWKTVRWETSCL

SEQ ID NO: 22750 - DNA, 1190 bp, Arabidopsis thaliana
  misc_feature (1)..(1190): Ceres Seq. ID no. 13497142
  misc_feature: MA Experiment ID: 108595 Result: Down-regulated in Transcription
  misc_feature: MA Experiment 108595 PARAMETER Experiment Name: At_Ler-pi_Ovule_cDNA_P Parameter: Plant Line Value: null
  misc_feature: MA Experiment ID: 20000184 Result: Down-regulated in Transcription
  misc_feature: MA Experiment 20000184 PARAMETER Experiment Name: At_Shoots__P Parameter: Age (day) Value: 7
  misc_feature: MA Experiment 20000184 PARAMETER Experiment Name: At_Shoots__P Parameter: Tissue Value: Shoots vs. Whole Plant
  misc_feature: MA Experiment ID: 20000185 Result: Down-regulated in Transcription
  misc_feature: MA Experiment 20000185 PARAMETER Experiment Name: At_Roots__P Parameter: Age (day) Value: 7 vs. 21
  misc_feature: MA Experiment 20000185 PARAMETER Experiment Name: At_Roots__P Parameter: Organism Value: A. thaliana
  misc_feature: MA Experiment 20000185 PARAMETER Experiment Name: At_Roots__P Parameter: Tissue Value: Roots vs. Whole Plant
  misc_feature: MA Experiment ID: 20000224 Result: Up-regulated in Transcription
  misc_feature: MA Experiment ID: 20000438 Result: Down-regulated in Transcription
  misc_feature: MA Experiment 20000438 PARAMETER Experiment Name: At_Shoots__P Parameter: Age (day) Value: 14
  misc_feature: MA Experiment 20000438 PARAMETER Experiment Name: At_Shoots__P Parameter: Tissue Value: Shoots vs. Whole Plant
  misc_feature: MA Experiment ID: 20000439 Result: Down-regulated in Transcription
  misc_feature: MA Experiment 20000439 PARAMETER Experiment Name: At_Roots__P Parameter: Age (day) Value: 14 vs. 21
  misc_feature: MA Experiment 20000439 PARAMETER Experiment Name: At_Roots__P Parameter: Organism Value: A. thaliana
  misc_feature: MA Experiment 20000439 PARAMETER Experiment Name: At_Roots__P Parameter: Tissue Value: Roots vs. Whole Plant
  misc_feature: MA Experiment ID: 20001247 Result: Down-regulated in Transcription
  misc_feature: MA Experiment 20001247 PARAMETER Experiment Name: At_Far-red-induction_P Parameter: Age (day) Value: 7
  misc_feature: MA Experiment 20001247 PARAMETER Experiment Name: At_Far-red-induction_P Parameter: Light Value: Far-red vs. White
  misc_feature: MA Experiment 20001247 PARAMETER Experiment Name: At_Far-red-induction_P Parameter: Organism Value: A. thaliana
  misc_feature: MA Experiment 20001247 PARAMETER Experiment Name: At_Far-red-induction_P Parameter: Plant Line Value: Columbia
  misc_feature: MA Experiment 20001247 PARAMETER Experiment Name: At_Far-red-induction_P Parameter: Timepoint (hr) Value: 1
  misc_feature: MA Experiment 20001247 PARAMETER Experiment Name: At_Far-red-induction_P Parameter: Tissue Value: Whole Plant
  misc_feature: Phenotype: WHOLE PLANT Color-Yellow-Green Viable 1
  misc_feature: Phenotype: WHOLE PLANT Size-Small
  misc_feature: Phenotype: WHOLE PLANT Color-Yellow-Green Viable 1
  misc_feature: Phenotype: WHOLE PLANT Size-Small
  misc_feature: Phenotype: WHOLE PLANT Color-Yellow-Green Viable 1
  misc_feature: Phenotype: WHOLE PLANT Size-Small
  misc_feature: Phenotype: WHOLE PLANT Color-Yellow-Green Viable 1
  misc_feature: Phenotype: WHOLE PLANT Size-Small
  misc_feature: Phenotype: WHOLE PLANT Color-Yellow-Green Viable 1
  misc_feature: Phenotype: WHOLE PLANT Size-Small
  misc_feature: Phenotype: WHOLE PLANT Color-Yellow-Green Viable 1
  misc_feature: Phenotype: WHOLE PLANT Size-Small
  misc_feature: Phenotype: WHOLE PLANT Color-Yellow-Green Viable 1
  misc_feature: Phenotype: WHOLE PLANT Size-Small
  misc_feature: Phenotype: INFLORESCENCE Height-Short
ctctttagcaaaaaatctcagaactcaaaaaaaaaacatccaacaccaaagacaatggagatgagtttgcgtctcgcttcatcttcaacctcaaacccaatttgtctactaaaccctggaaaaaaccttaatttcccaatccgaaaccatagaatccctaaaacttcgaaacccttttgcgttaggtcttcaatgagcttgtctaaaccacccagacaaaccttatctagtaactgggatgtatctagcttctccattgattccgttgctcaatctccttcaagactcccaagtttcgaagaactcgataccaccaacatgttgctccgtcaaagaatcgtctttttgggttctcaggttgatgatatgacggcggatttggttataagtcagctattgttactagatgctgaggactcagaaagagacattacgctttttatcaattcacccggtggatctattactgctgggatgggaatatatgatgcaatgaaacaatgtaaggcggatgtatctactgtttgcttagggttagctgcatctatgggtgcgtttcttcttgcttctggttcaaaagggaaacggtattgtatgcctaactctaaagttatgatccatcagccacttggtactgctggaggcaaagcaacggaaatgagcatacgtataagagaaatgatgtaccacaagattaaacttaacaaaatcttctctagaatcactgggaagcctgaatcagagatcgaaagtgacacagaccgtgataacttcttgaatccatgggaggcgaaagaatatggtttgatcgacgctgtaatcgatgatgggaaaccgggactaatcgctccaattggagatggtactcctcctcctaaaaccaaagtctgggatctttggaaagtcgaaggaaccaagaaagacaacactaacttgccatctgagcgctccatgacacagaatggttatgccgccattgaatagaactgttgttgcagcgtttacgccttttatatgttattctggtggtacctgtaaccatataacgttgcatttcctgtgtttgtaccatttctctgatagatttttggaataatttgaaggcaaaagatagattatttgttgtagaagaagctacaaaatttaatgattaaattgaatcatcaagccatgagaagctttgtgttttc

SEQ ID NO: 22751 - protein, 327 aa, Arabidopsis thaliana
  peptide (1)..(327): Ceres Seq. ID no. 13497143
  misc_feature (98)..(277): Pfam Name: Clp protease Pfam Description: Clp protease
  misc_feature (19)..(327): Homolog of NCBI NO: 18408572 NR Description: ATP-dependent Clp protease proteolytic subunit
  misc_feature (4)..(274): Homolog of NCBI NO: 25019682 NR Description: ClpP2 [Synechococcus sp. PCC 7942]
  misc_feature (159)..(322): Homolog of NCBI NO: 21449427 NR Description: ATP-dependent Clp protease [Oryza sativa (indica
  misc_feature (61)..(322): Homolog of NCBI NO: 34914540 NR Description: putative ATP-dependent Clp protease
  misc_feature (52)..(327): Homolog of NCBI NO: 17028170 NR Description: ClpP [Brassica oleracea]
  misc_feature (21)..(327): Homolog of NCBI NO: 6069464 NR Description: S-locus protein 2 [Brassica rapa]
  misc_feature (19)..(327): Homolog of NCBI NO: 7657879 NR Description: ClpP [Brassica napus var. napus]
  misc_feature (19)..(327): Homolog of NCBI NO: 15864561 NR Description: ClpP putative protein [Brassica napus]
  misc_feature (23)..(327): Homolog of NCBI NO: 25456012 NR Description: probable ATP-dependent clp proteinase (EC
  misc_feature (19)..(327): Homolog of NCBI NO: 13899067 NR Description: ATP-dependent Clp protease; nClpP3 [Arabidopsis
LFSKKSQNSKKKHPTPKTMEMSLRLASSSTSNPICLLNPGKNLNFPIRNHRIPKTSKPFCVRSSMSLSKPPRQTLSSNWDVSSFSIDSVAQSPSRLPSFEELDTTNMLLRQRIVFLGSQVDDMTADLVISQLLLLDAEDSERDITLFINSPGGSITAGMGIYDAMKQCKADVSTVCLGLAASMGAFLLASGSKGKRYCMPNSKVMIHQPLGTAGGKATEMSIRIREMMYHKIKLNKIFSRITGKPESEIESDTDRDNFLNPWEAKEYGLIDAVIDDGKPGLIAPIGDGTPPPKTKVWDLWKVEGTKKDNTNLPSERSMTQNGYAAIE

SEQ ID NO: 22752 - protein, 309 aa, Arabidopsis thaliana
  peptide (1)..(309): Ceres Seq. ID no. 13497144
  misc_feature (80)..(259): Pfam Name: Clp protease Pfam Description: Clp protease
  misc_feature (1)..(256): Homolog of NCBI NO: 25019682 NR Description: ClpP2 [Synechococcus sp. PCC 7942]
  misc_feature (141)..(304): Homolog of NCBI NO: 21449427 NR Description: ATP-dependent Clp protease [Oryza sativa (indica
  misc_feature (43)..(304): Homolog of NCBI NO: 34914540 NR Description: putative ATP-dependent Clp protease
  misc_feature (34)..(309): Homolog of NCBI NO: 17028170 NR Description: ClpP [Brassica oleracea]
  misc_feature (3)..(309): Homolog of NCBI NO: 6069464 NR Description: S-locus protein 2 [Brassica rapa]
  misc_feature (1)..(309): Homolog of NCBI NO: 7657879 NR Description: ClpP [Brassica napus var. napus]
  misc_feature (1)..(309): Homolog of NCBI NO: 15864561 NR Description: ClpP putative protein [Brassica napus]
  misc_feature (5)..(309): Homolog of NCBI NO: 25456012 NR Description: probable ATP-dependent clp proteinase (EC
  misc_feature (1)..(309): Homolog of NCBI NO: 13899067 NR Description: ATP-dependent Clp protease; nClpP3 [Arabidopsis
  misc_feature (1)..(309): Homolog of NCBI NO: 18408572 NR Description: ATP-dependent Clp protease proteolytic subunit
MEMSLRLASSSTSNPICLLNPGKNLNFPIRNHRIPKTSKPFCVRSSMSLSKPPRQTLSSNWDVSSFSIDSVAQSPSRLPSFEELDTTNMLLRQRIVFLGSQVDDMTADLVISQLLLLDAEDSERDITLFINSPGGSITAGMGIYDAMKQCKADVSTVCLGLAASMGAFLLASGSKGKRYCMPNSKVMIHQPLGTAGGKATEMSIRIREMMYHKIKLNKIFSRITGKPESEIESDTDRDNFLNPWEAKEYGLIDAVIDDGKPGLIAPIGDGTPPPKTKVWDLWKVEGTKKDNTNLPSERSMTQNGYAAIE

SEQ ID NO: 22753 - protein, 307 aa, Arabidopsis thaliana
  peptide (1)..(307): Ceres Seq. ID no. 13497145
  misc_feature (78)..(257): Pfam Name: Clp protease Pfam Description: Clp protease
  misc_feature (1)..(254): Homolog of NCBI NO: 25019682 NR Description: ClpP2 [Synechococcus sp. PCC 7942]
  misc_feature (139)..(302): Homolog of NCBI NO: 21449427 NR Description: ATP-dependent Clp protease [Oryza sativa (indica
  misc_feature (41)..(302): Homolog of NCBI NO: 34914540 NR Description: putative ATP-dependent Clp protease
  misc_feature (32)..(307): Homolog of NCBI NO: 17028170 NR Description: ClpP [Brassica oleracea]
  misc_feature (1)..(307): Homolog of NCBI NO: 6069464 NR Description: S-locus protein 2 [Brassica rapa]
  misc_feature (1)..(307): Homolog of NCBI NO: 7657879 NR Description: ClpP [Brassica napus var. napus]
  misc_feature (1)..(307): Homolog of NCBI NO: 15864561 NR Description: ClpP putative protein [Brassica napus]
  misc_feature (3)..(307): Homolog of NCBI NO: 25456012 NR Description: probable ATP-dependent clp proteinase (EC
  misc_feature (1)..(307): Homolog of NCBI NO: 13899067 NR Description: ATP-dependent Clp protease; nClpP3 [Arabidopsis
  misc_feature (1)..(307): Homolog of NCBI NO: 18408572 NR Description: ATP-dependent Clp protease proteolytic subunit
MSLRLASSSTSNPICLLNPGKNLNFPIRNHRIPKTSKPFCVRSSMSLSKPPRQTLSSNWDVSSFSIDSVAQSPSRLPSFEELDTTNMLLRQRIVFLGSQVDDMTADLVISQLLLLDAEDSERDITLFINSPGGSITAGMGIYDAMKQCKADVSTVCLGLAASMGAFLLASGSKGKRYCMPNSKVMIHQPLGTAGGKATEMSIRIREMMYHKIKLNKIFSRITGKPESEIESDTDRDNFLNPWEAKEYGLIDAVIDDGKPGLIAPIGDGTPPPKTKVWDLWKVEGTKKDNTNLPSERSMTQNGYAAIE

SEQ ID NO: 22754 - DNA, 1396 bp, Arabidopsis thaliana
  misc_feature (1)..(1396): Ceres Seq. ID no. 12334854
  misc_feature: MA Experiment ID: 108434 Result: Up-regulated in Transcription
  misc_feature: MA Experiment 108434 PARAMETER Experiment Name: At_Root_Tips_cDNA_P Parameter: Tissue Value: Root Tips
  misc_feature: MA Experiment ID: 108461 Result: Up-regulated in Transcription
  misc_feature: MA Experiment 108461 PARAMETER Experiment Name: At_Germinating_Seeds_cDNA_P Parameter: Age (day) Value: 1 vs. 0
  misc_feature: MA Experiment 108461 PARAMETER Experiment Name: At_Germinating_Seeds_cDNA_P Parameter: Tissue Value: Germinating Seeds
  misc_feature: MA Experiment ID: 108464 Result: Down-regulated in Transcription
  misc_feature: MA Experiment 108464 PARAMETER Experiment Name: At_Germinating_Seeds_cDNA_P Parameter: Age (day) Value: 4 vs. 0
  misc_feature: MA Experiment 108464 PARAMETER Experiment Name: At_Germinating_Seeds_cDNA_P Parameter: Tissue Value: Germinating Seeds
  misc_feature: MA Experiment ID: 20000087 Result: Down-regulated in Transcription
  misc_feature: MA Experiment 20000087 PARAMETER Experiment Name: At_100uM_ABA_Mutants_cDNA_P Parameter: Plant Line Value: WS
  misc_feature: MA Experiment 20000087 PARAMETER Experiment Name: At_100uM_ABA_Mutants_cDNA_P Parameter: Timepoint (hr) Value: 6
  misc_feature: MA Experiment 20000087 PARAMETER Experiment Name: At_100uM_ABA_Mutants_cDNA_P Parameter: Tissue Value: Aerial
  misc_feature: MA Experiment 20000087 PARAMETER Experiment Name: At_100uM_ABA_Mutants_cDNA_P Parameter: Treatment Value: 100uM ABA vs. No Treatment
  misc_feature: MA Experiment ID: 20000179 Result: Up-regulated in Transcription
  misc_feature: MA Experiment 20000179 PARAMETER Experiment Name: At_Germinating_Seeds_P Parameter: Age (hr) Value: 6 vs. 0
  misc_feature: MA Experiment 20000179 PARAMETER Experiment Name: At_Germinating_Seeds_P Parameter: Tissue Value: Germinating Seeds
  misc_feature: MA Experiment ID: 20000180 Result: Up-regulated in Transcription
  misc_feature: MA Experiment 20000180 PARAMETER Experiment Name: At_Germinating_Seeds_P Parameter: Age (hr) Value: 24 vs. 0
  misc_feature: MA Experiment 20000180 PARAMETER Experiment Name: At_Germinating_Seeds_P Parameter: Tissue Value: Germinating Seeds
  misc_feature: MA Experiment ID: 20000184 Result: Up-regulated in Transcription
  misc_feature: MA Experiment 20000184 PARAMETER Experiment Name: At_Shoots__P Parameter: Age (day) Value: 7
  misc_feature: MA Experiment 20000184 PARAMETER Experiment Name: At_Shoots__P Parameter: Tissue Value: Shoots vs. Whole Plant
  misc_feature: MA Experiment ID: 20000185 Result: Up-regulated in Transcription
  misc_feature: MA Experiment 20000185 PARAMETER Experiment Name: At_Roots__P Parameter: Age (day) Value: 7 vs. 21
  misc_feature: MA Experiment 20000185 PARAMETER Experiment Name: At_Roots__P Parameter: Organism Value: A. thaliana
  misc_feature: MA Experiment 20000185 PARAMETER Experiment Name: At_Roots__P Parameter: Tissue Value: Roots vs. Whole Plant
  misc_feature: MA Experiment ID: 20000234 Result: Up-regulated in Transcription
  misc_feature: MA Experiment 20000234 PARAMETER Experiment Name: At_Siliques_P Parameter: Age (day) Value: 21
  misc_feature: MA Experiment 20000234 PARAMETER Experiment Name: At_Siliques_P Parameter: Organism Value: A. thaliana
  misc_feature: MA Experiment 20000234 PARAMETER Experiment Name: At_Siliques_P Parameter: Plant Line Value: WS
  misc_feature: MA Experiment 20000234 PARAMETER Experiment Name: At_Siliques_P Parameter: Tissue Value: Less Than 5mm Siliques vs. Whole Plant
  misc_feature: MA Experiment ID: 20000235 Result: Up-regulated in Transcription
  misc_feature: MA Experiment 20000235 PARAMETER Experiment Name: At_Siliques_P Parameter: Age (day) Value: 21
  misc_feature: MA Experiment 20000235 PARAMETER Experiment Name: At_Siliques_P Parameter: Organism Value: A. thaliana
  misc_feature: MA Experiment 20000235 PARAMETER Experiment Name: At_Siliques_P Parameter: Plant Line Value: WS
  misc_feature: MA Experiment 20000235 PARAMETER Experiment Name: At_Siliques_P Parameter: Tissue Value: 5-10mm Siliques vs. Whole Plant
  misc_feature: MA Experiment ID: 20000265 Result: Up-regulated in Transcription
  misc_feature: MA Experiment 20000265 PARAMETER Experiment Name: At_Open_Flower_P Parameter: Age (day) Value: 21
  misc_feature: MA Experiment 20000265 PARAMETER Experiment Name: At_Open_Flower_P Parameter: Plant Line Value: WS
  misc_feature: MA Experiment 20000265 PARAMETER Experiment Name: At_Open_Flower_P Parameter: Tissue Value: Closed Flower vs. Whole Plant
  misc_feature: MA Experiment ID: 20000286 Result: Up-regulated in Transcription
  misc_feature: MA Experiment 20000286 PARAMETER Experiment Name: At_Open_Flower_P Parameter: Age (day) Value: 21
  misc_feature: MA Experiment 20000286 PARAMETER Experiment Name: At_Open_Flower_P Parameter: Plant Line Value: WS
  misc_feature: MA Experiment 20000286 PARAMETER Experiment Name: At_Open_Flower_P Parameter: Tissue Value: Half Open vs. Whole Plant
  misc_feature: MA Experiment ID: 20000439 Result: Up-regulated in Transcription
  misc_feature: MA Experiment 20000439 PARAMETER Experiment Name: At_Roots__P Parameter: Age (day) Value: 14 vs. 21
  misc_feature: MA Experiment 20000439 PARAMETER Experiment Name: At_Roots__P Parameter: Organism Value: A. thaliana
  misc_feature: MA Experiment 20000439 PARAMETER Experiment Name: At_Roots__P Parameter: Tissue Value: Roots vs. Whole Plant
  misc_feature: MA Experiment ID: 20000441 Result: Down-regulated in Transcription
  misc_feature: MA Experiment 20000441 PARAMETER Experiment Name: At_1uM_BR-BRZ__P Parameter: Tissue Value: Shoot Apices
  misc_feature: MA Experiment 20000441 PARAMETER Experiment Name: At_1uM_BR-BRZ__P Parameter: Treatment Value: 1uM BR vs. No Treatment
  misc_feature: MA Experiment ID: 20000794 Result: Up-regulated in Transcription
  misc_feature: MA Experiment 20000794 PARAMETER Experiment Name: At_Petals_P Parameter: Age (day) Value: 23-25 days
  misc_feature: MA Experiment 20000794 PARAMETER Experiment Name: At_Petals_P Parameter: Plant Line Value: WS
  misc_feature: MA Experiment 20000794 PARAMETER Experiment Name: At_Petals_P Parameter: Tissue Value: Petals vs. Whole plant
  misc_feature: MA Experiment ID: 20001248 Result: Down-regulated in Transcription
  misc_feature: MA Experiment 20001248 PARAMETER Experiment Name: At_Far-red-induction_P Parameter: Age (day) Value: 7
  misc_feature: MA Experiment 20001248 PARAMETER Experiment Name: At_Far-red-induction_P Parameter: Light Value: Far-red vs. White
  misc_feature: MA Experiment 20001248 PARAMETER Experiment Name: At_Far-red-induction_P Parameter: Organism Value: A. thaliana
  misc_feature: MA Experiment 20001248 PARAMETER Experiment Name: At_Far-red-induction_P Parameter: Plant Line Value: Columbia
  misc_feature: MA Experiment 20001248 PARAMETER Experiment Name: At_Far-red-induction_P Parameter: Timepoint (hr) Value: 4
  misc_feature: MA Experiment 20001248 PARAMETER Experiment Name: At_Far-red-induction_P Parameter: Tissue Value: Whole Plant
  misc_feature: MA Experiment ID: 20001450 Result: Down-regulated in Transcription
  misc_feature: MA Experiment 20001450 PARAMETER Experiment Name: At_Far-red-induction_P Parameter: Age (day) Value: 7
  misc_feature: MA Experiment 20001450 PARAMETER Experiment Name: At_Far-red-induction_P Parameter: Light Value: Far-red vs. White
  misc_feature: MA Experiment 20001450 PARAMETER Experiment Name: At_Far-red-induction_P Parameter: Organism Value: A. thaliana
  misc_feature: MA Experiment 20001450 PARAMETER Experiment Name: At_Far-red-induction_P Parameter: Plant Line Value: Columbia
  misc_feature: MA Experiment 20001450 PARAMETER Experiment Name: At_Far-red-induction_P Parameter: Timepoint (hr) Value: 8
  misc_feature: MA Experiment 20001450 PARAMETER Experiment Name: At_Far-red-induction_P Parameter: Tissue Value: Whole Plant
  misc_feature: MA Experiment ID: 20001556 Result: Up-regulated in Transcription
  misc_feature: MA Experiment 20001556 PARAMETER Experiment Name: At_Drought_Soil_Dry_P Parameter: Age (day) Value: 26
  misc_feature: MA Experiment 20001556 PARAMETER Experiment Name: At_Drought_Soil_Dry_P Parameter: Organism Value: A. thaliana
  misc_feature: MA Experiment 20001556 PARAMETER Experiment Name: At_Drought_Soil_Dry_P Parameter: Plant Line Value: WS
  misc_feature: MA Experiment 20001556 PARAMETER Experiment Name: At_Drought_Soil_Dry_P Parameter: Post Timepoint (hr) Value: None
  misc_feature: MA Experiment 20001556 PARAMETER Experiment Name: At_Drought_Soil_Dry_P Parameter: Post-Treatment Value: None
  misc_feature: MA Experiment 20001556 PARAMETER Experiment Name: At_Drought_Soil_Dry_P Parameter: Timepoint (day) Value: 12
  misc_feature: MA Experiment 20001556 PARAMETER Experiment Name: At_Drought_Soil_Dry_P Parameter: Treatment Value: Drought vs. No Drought
  misc_feature: MA Experiment ID: 20001557 Result: Up-regulated in Transcription
  misc_feature: MA Experiment 20001557 PARAMETER Experiment Name: At_Drought_Soil_Dry_P Parameter: Age (day) Value: 27
  misc_feature: MA Experiment 20001557 PARAMETER Experiment Name: At_Drought_Soil_Dry_P Parameter: Organism Value: A. thaliana
  misc_feature: MA Experiment 20001557 PARAMETER Experiment Name: At_Drought_Soil_Dry_P Parameter: Plant Line Value: WS
  misc_feature: MA Experiment 20001557 PARAMETER Experiment Name: At_Drought_Soil_Dry_P Parameter: Post Timepoint (hr) Value: 3
  misc_feature: MA Experiment 20001557 PARAMETER Experiment Name: At_Drought_Soil_Dry_P Parameter: Post-Treatment Value: Re-Water vs. No Drought
  misc_feature: MA Experiment 20001557 PARAMETER Experiment Name: At_Drought_Soil_Dry_P Parameter: Timepoint (day) Value: 13
  misc_feature: MA Experiment 20001557 PARAMETER Experiment Name: At_Drought_Soil_Dry_P Parameter: Treatment Value: Drought vs. No Drought
  misc_feature: MA Experiment ID: 20001558 Result: Up-regulated in Transcription
  misc_feature: MA Experiment 20001558 PARAMETER Experiment Name: At_Drought_Soil_Dry_P Parameter: Age (day) Value: 27
  misc_feature: MA Experiment 20001558 PARAMETER Experiment Name: At_Drought_Soil_Dry_P Parameter: Organism Value: A. thaliana
  misc_feature: MA Experiment 20001558 PARAMETER Experiment Name: At_Drought_Soil_Dry_P Parameter: Plant Line Value: WS
  misc_feature: MA Experiment 20001558 PARAMETER Experiment Name: At_Drought_Soil_Dry_P Parameter: Post Timepoint (hr) Value: 6
  misc_feature: MA Experiment 20001558 PARAMETER Experiment Name: At_Drought_Soil_Dry_P Parameter: Post-Treatment Value: Re-Water vs. No Drought
  misc_feature: MA Experiment 20001558 PARAMETER Experiment Name: At_Drought_Soil_Dry_P Parameter: Timepoint (day) Value: 13
  misc_feature: MA Experiment 20001558 PARAMETER Experiment Name: At_Drought_Soil_Dry_P Parameter: Treatment Value: Drought vs. No Drought
  misc_feature: MA Experiment ID: 20001560 Result: Up-regulated in Transcription
  misc_feature: MA Experiment 20001560 PARAMETER Experiment Name: At_Drought_Soil_Dry_P Parameter: Age (day) Value: 28
  misc_feature: MA Experiment 20001560 PARAMETER Experiment Name: At_Drought_Soil_Dry_P Parameter: Organism Value: A. thaliana
  misc_feature: MA Experiment 20001560 PARAMETER Experiment Name: At_Drought_Soil_Dry_P Parameter: Plant Line Value: WS
  misc_feature: MA Experiment 20001560 PARAMETER Experiment Name: At_Drought_Soil_Dry_P Parameter: Post Timepoint (hr) Value: None
  misc_feature: MA Experiment 20001560 PARAMETER Experiment Name: At_Drought_Soil_Dry_P Parameter: Post-Treatment Value: None
  misc_feature: MA Experiment 20001560 PARAMETER Experiment Name: At_Drought_Soil_Dry_P Parameter: Timepoint (day) Value: 14
  misc_feature: MA Experiment 20001560 PARAMETER Experiment Name: At_Drought_Soil_Dry_P Parameter: Treatment Value: Drought vs. No Drought
  misc_feature: MA Experiment ID: 20001904 Result: Up-regulated in Transcription
  misc_feature: MA Experiment 20001904 PARAMETER Experiment Name: At_Drought_Reproduction_P Parameter: Age (day) Value: 37
  misc_feature: MA Experiment 20001904 PARAMETER Experiment Name: At_Drought_Reproduction_P Parameter: Organism Value: A. thaliana
  misc_feature: MA Experiment 20001904 PARAMETER Experiment Name: At_Drought_Reproduction_P Parameter: Plant Line Value: WS
  misc_feature: MA Experiment 20001904 PARAMETER Experiment Name: At_Drought_Reproduction_P Parameter: Timepoint (day) Value: 7
  misc_feature: MA Experiment 20001904 PARAMETER Experiment Name: At_Drought_Reproduction_P Parameter: Tissue Value: Rosettes
  misc_feature: MA Experiment 20001904 PARAMETER Experiment Name: At_Drought_Reproduction_P Parameter: Treatment Value: Drought vs. No Drought
  misc_feature: MA Experiment ID: 20001905 Result: Up-regulated in Transcription
  misc_feature: MA Experiment 20001905 PARAMETER Experiment Name: At_Drought_Reproduction_P Parameter: Age (day) Value: 40
  misc_feature: MA Experiment 20001905 PARAMETER Experiment Name: At_Drought_Reproduction_P Parameter: Organism Value: A. thaliana
  misc_feature: MA Experiment 20001905 PARAMETER Experiment Name: At_Drought_Reproduction_P Parameter: Plant Line Value: WS
  misc_feature: MA Experiment 20001905 PARAMETER Experiment Name: At_Drought_Reproduction_P Parameter: Timepoint (day) Value: 10
  misc_feature: MA Experiment 20001905 PARAMETER Experiment Name: At_Drought_Reproduction_P Parameter: Tissue Value: Rosettes
  misc_feature: MA Experiment 20001905 PARAMETER Experiment Name: At_Drought_Reproduction_P Parameter: Treatment Value: Drought vs. No Drought
attgaattctgtcttgatcactttcgattctctcaaaaaatcccataactttcccaacgaaaaatgttccgatcaatgattgttcgatctgcttccccagtgaagcagggtcttctccgcagaggattcgcctctgaatctgttcccgatcgcaaagtcgtcatcctcggtgccgccggtgggatcggccagccactttctcttctcatgaagcttaaccctctcgtctcttctctctccctctatgatatcgccaacactcccggcgttgctgctgacgtcggtcacatcaacacccgatctcaggtttctgggtacatgggtgatgatgatttggggaaagctctagaaggcgctgacctcgtcattattccagctggtgtcccaaggaagcctggcatgacccgtgatgatcttttcaacatcaatgctggcattgtcaagaacctcagcatcgccatcgccaagtattgcccacaagcacttgtcaacatgatcagcaaccctgtgaactccactgttccaattgcagctgagatttttaagaaggctggtacctatgatgagaagaaattattcggtgtcaccactcttgatgttgtcagggctaggactttctatgctggaaaatcggatgtcaatgttgcagaggttaatgttccagttgttggtggtcatgctggcatcacgattcttcctctcttttctcaggctagccctcaagccaacttgtcggatgatttaatcagggccctcacaaagcgtacccaggacggagggacagaagtcgtggaggcaaaagctggaaagggttcagctacattgtcaatggcctatgcgggagcactctttgctgatgcatgcttaaagggactcaacggtgttccaaatgtggtggaatgctcattcgtccaatctaccatcaccgagcttcctttcttcgcctcaaaggtaagactgggaaagaacggagtggaggaagtgctagatctagggccactctcagactttgaaaaggaaggcttagaagccctcaaggcagaactcaaatcctctatcgagaagggcatcaaatttgccaaccaatgagtttttgcatcttgaaactattgattttggactaaactttaggttaatgtttgtctttccaattttccggtagagttgtcttcttcctctgcggattttataatttcccttcaataaattctccatttctgctcttgaggaaccaaccattgggaactctgtaataaaaagaacaagctgttgtgctgctatgttggttatgattcgttttcctttttccttattgtttgctagaaaaaagaaagaaaataataaatcgttgtgagttgcattatttgggcaactactactactattcataagttgc

SEQ ID NO: 22755 - protein, 341 aa, Arabidopsis thaliana
  peptide (1)..(341): Ceres Seq. ID no. 12334855
  misc_feature (175)..(339): Pfam Name: lactate/malate dehydrogenase, alpha/beta Pfam Description: lactate/malate dehydrogenase, alpha/beta
  misc_feature (1)..(341): Homolog of NCBI NO: 7431177 NR Description: malate dehydrogenase (EC 1.1.1.37) precursor -
  misc_feature (3)..(340): Homolog of NCBI NO: 126896 NR Description: MALATE DEHYDROGENASE, MITOCHONDRIAL PRECURSOR
  misc_feature (1)..(341): Homolog of NCBI NO: 2497857 NR Description: MALATE DEHYDROGENASE, MITOCHONDRIAL PRECURSOR
  misc_feature (1)..(341): Homolog of NCBI NO: 7769871 NR Description: F12M16.14 [Arabidopsis thaliana]
  misc_feature (1)..(341): Homolog of NCBI NO: 21592905 NR Description: mitochondrial NAD-dependent malate dehydrogenase
  misc_feature (1)..(341): Homolog of NCBI NO: 18404382 NR Description: mitochondrial NAD-dependent malate dehydrogenase
  misc_feature (1)..(341): Homolog of NCBI NO: 15232468 NR Description: mitochondrial NAD-dependent malate dehydrogenase,
MFRSMIVRSASPVKQGLLRRGFASESVPDRKVVILGAAGGIGQPLSLLMKLNPLVSSLSLYDIANTPGVAADVGHINTRSQVSGYMGDDDLGKALEGADLVIIPAGVPRKPGMTRDDLFNINAGIVKNLSIAIAKYCPQALVNMISNPVNSTVPIAAEIFKKAGTYDEKKLFGVTTLDVVRARTFYAGKSDVNVAEVNVPVVGGHAGITILPLFSQASPQANLSDDLIRALTKRTQDGGTEVVEAKAGKGSATLSMAYAGALFADACLKGLNGVPNVVECSFVQSTITELPFFASKVRLGKNGVEEVLDLGPLSDFEKEGLEALKAELKSSIEKGIKFANQ

SEQ ID NO: 22756 - protein, 337 aa, Arabidopsis thaliana
  peptide (1)..(337): Ceres Seq. ID no. 12334856
  misc_feature (171)..(335): Pfam Name: lactate/malate dehydrogenase, alpha/beta Pfam Description: lactate/malate dehydrogenase, alpha/beta
  misc_feature (1)..(337): Homolog of NCBI NO: 7431177 NR Description: malate dehydrogenase (EC 1.1.1.37) precursor -
  misc_feature (1)..(336): Homolog of NCBI NO: 126896 NR Description: MALATE DEHYDROGENASE, MITOCHONDRIAL PRECURSOR
  misc_feature (1)..(337): Homolog of NCBI NO: 2497857 NR Description: MALATE DEHYDROGENASE, MITOCHONDRIAL PRECURSOR
  misc_feature (1)..(337): Homolog of NCBI NO: 7769871 NR Description: F12M16.14 [Arabidopsis thaliana]
  misc_feature (1)..(337): Homolog of NCBI NO: 21592905 NR Description: mitochondrial NAD-dependent malate dehydrogenase
  misc_feature (1)..(337): Homolog of NCBI NO: 18404382 NR Description: mitochondrial NAD-dependent malate dehydrogenase
  misc_feature (1)..(337): Homolog of NCBI NO: 15232468 NR Description: mitochondrial NAD-dependent malate dehydrogenase,
MIVRSASPVKQGLLRRGFASESVPDRKVVILGAAGGIGQPLSLLMKLNPLVSSLSLYDIANTPGVAADVGHINTRSQVSGYMGDDDLGKALEGADLVIIPAGVPRKPGMTRDDLFNINAGIVKNLSIAIAKYCPQALVNMISNPVNSTVPIAAEIFKKAGTYDEKKLFGVTTLDVVRARTFYAGKSDVNVAEVNVPVVGGHAGITILPLFSQASPQANLSDDLIRALTKRTQDGGTEVVEAKAGKGSATLSMAYAGALFADACLKGLNGVPNVVECSFVQSTITELPFFASKVRLGKNGVEEVLDLGPLSDFEKEGLEALKAELKSSIEKGIKFANQ

SEQ ID NO: 22757 - protein, 293 aa, Arabidopsis thaliana
  peptide (1)..(293): Ceres Seq. ID no. 12334857
  misc_feature (127)..(291): Pfam Name: lactate/malate dehydrogenase, alpha/beta Pfam Description: lactate/malate dehydrogenase, alpha/beta
  misc_feature (1)..(293): Homolog of NCBI NO: 7431177 NR Description: malate dehydrogenase (EC 1.1.1.37) precursor -
  misc_feature (1)..(292): Homolog of NCBI NO: 126896 NR Description: MALATE DEHYDROGENASE, MITOCHONDRIAL PRECURSOR
  misc_feature (1)..(293): Homolog of NCBI NO: 2497857 NR Description: MALATE DEHYDROGENASE, MITOCHONDRIAL PRECURSOR
  misc_feature (1)..(293): Homolog of NCBI NO: 7769871 NR Description: F12M16.14 [Arabidopsis thaliana]
  misc_feature (1)..(293): Homolog of NCBI NO: 21592905 NR Description: mitochondrial NAD-dependent malate dehydrogenase
  misc_feature (1)..(293): Homolog of NCBI NO: 18404382 NR Description: mitochondrial NAD-dependent malate dehydrogenase
  misc_feature (1)..(293): Homolog of NCBI NO: 15232468 NR Description: mitochondrial NAD-dependent malate dehydrogenase,
MKLNPLVSSLSLYDIANTPGVAADVGHINTRSQVSGYMGDDDLGKALEGADLVIIPAGVPRKPGMTRDDLFNINAGIVKNLSIAIAKYCPQALVNMISNPVNSTVPIAAEIFKKAGTYDEKKLFGVTTLDVVRARTFYAGKSDVNVAEVNVPVVGGHAGITILPLFSQASPQANLSDDLIRALTKRTQDGGTEVVEAKAGKGSATLSMAYAGALFADACLKGLNGVPNVVECSFVQSTITELPFFASKVRLGKNGVEEVLDLGPLSDFEKEGLEALKAELKSSIEKGIKFANQ

SEQ ID NO: 22758 - DNA, 575 bp, Arabidopsis thaliana
  misc_feature (1)..(575): Ceres Seq. ID no. 13489268
  misc_feature: MA Experiment ID: 108501 Result: Down-regulated in Transcription
  misc_feature: MA Experiment 108501 PARAMETER Experiment Name: At_ap2_floral_buds_cDNA_P Parameter: Plant Line Value: ap2 (Ler.)
  misc_feature: MA Experiment 108501 PARAMETER Experiment Name: At_ap2_floral_buds_cDNA_P Parameter: Tissue Value: Closed Flower
  misc_feature: MA Experiment ID: 20000265 Result: Up-regulated in Transcription
  misc_feature: MA Experiment 20000265 PARAMETER Experiment Name: At_Open_Flower_P Parameter: Age (day) Value: 21
  misc_feature: MA Experiment 20000265 PARAMETER Experiment Name: At_Open_Flower_P Parameter: Plant Line Value: WS
  misc_feature: MA Experiment 20000265 PARAMETER Experiment Name: At_Open_Flower_P Parameter: Tissue Value: Closed Flower vs. Whole Plant
  misc_feature: MA Experiment ID: 20001910 Result: Down-regulated in Transcription
  misc_feature: MA Experiment 20001910 PARAMETER Experiment Name: At_Drought_Reproduction_P Parameter: Age (day) Value: 37
  misc_feature: MA Experiment 20001910 PARAMETER Experiment Name: At_Drought_Reproduction_P Parameter: Organism Value: A. thaliana
  misc_feature: MA Experiment 20001910 PARAMETER Experiment Name: At_Drought_Reproduction_P Parameter: Plant Line Value: WS
  misc_feature: MA Experiment 20001910 PARAMETER Experiment Name: At_Drought_Reproduction_P Parameter: Timepoint (day) Value: 7
  misc_feature: MA Experiment 20001910 PARAMETER Experiment Name: At_Drought_Reproduction_P Parameter: Tissue Value: Flowers
  misc_feature: MA Experiment 20001910 PARAMETER Experiment Name: At_Drought_Reproduction_P Parameter: Treatment Value: Drought vs. No Drought
aaaaatcttcacattgcacgtaaaaaatatctttatacaatgaacggcatgagtggatcgtctccggcggctccggctccttcaccatcatcgttcttccaacatcgccaccgtcacggtggtatgatgcatatgactttcttttgggtaaaaaacacggaggttctattcgacggatggccagggaccagtctgaaaatgtattgggtctgtctcgccgtcatttttgttatttccgctttctccgagtgtctatcgcggtgcggtttcatgaaatccggtccggctagcttgggaggcgggctattacagactgcggtttacaccgtgagggctgctttgtcttatttggtcatgctggctgtgatgtcgttcaatggaggagtcttcgtggctgcgatggctggttttggattagggtttatgatttttggaagtagggcttttagggccactagcagtaacagtcacaccgaggttcaatcacattgttgatttttgtcttagatcgtttttattttccttgtttcccgttgaaataatgattaggaaaataaaaaaattcacgtttttgg

SEQ ID NO: 22759 - protein, 164 aa, Arabidopsis thaliana
  peptide (1)..(164): Ceres Seq. ID no. 13489269
  misc_feature (43)..(156): Pfam Name: Ctr copper transporter family Pfam Description: Ctr copper transporter family
  misc_feature (34)..(144): Homolog of NCBI NO: 25408576 NR Description: hypothetical protein At2g37920 [imported] -
  misc_feature (34)..(150): Homolog of NCBI NO: 18496856 NR Description: COPT4 [Arabidopsis thaliana]
  misc_feature (34)..(150): Homolog of NCBI NO: 30687312 NR Description: COPT4 protein [Arabidopsis thaliana]
  misc_feature (14)..(158): Homolog of NCBI NO: 15237802 NR Description: copper transport protein [Arabidopsis thaliana]
  misc_feature (14)..(158): Homolog of NCBI NO: 11288418 NR Description: copper transport protein [imported] - Arabidopsis
  misc_feature (25)..(158): Homolog of NCBI NO: 15232677 NR Description: copper transport protein - like protein
  misc_feature (25)..(155): Homolog of NCBI NO: 30683324 NR Description: copper transport protein -related protein
  misc_feature (33)..(164): Homolog of NCBI NO: 18496854 NR Description: copper transporter-like protein COPT3
  misc_feature (14)..(164): Homolog of NCBI NO: 15237804 NR Description: copper transport protein - like [Arabidopsis
  misc_feature (14)..(164): Homolog of NCBI NO: 21592951 NR Description: copper transport protein-like [Arabidopsis
KNLHIARKKYLYTMNGMSGSSPAAPAPSPSSFFQHRHRHGGMMHMTFFWVKNTEVLFDGWPGTSLKMYWVCLAVIFVISAFSECLSRCGFMKSGPASLGGGLLQTAVYTVRAALSYLVMLAVMSFNGGVFVAAMAGFGLGFMIFGSRAFRATSSNSHTEVQSHC

SEQ ID NO: 22760 - protein, 151 aa, Arabidopsis thaliana
  peptide (1)..(151): Ceres Seq. ID no. 13489270
  misc_feature (30)..(143): Pfam Name: Ctr copper transporter family Pfam Description: Ctr copper transporter family
  misc_feature (21)..(131): Homolog of NCBI NO: 25408576 NR Description: hypothetical protein At2g37920 [imported] -
  misc_feature (21)..(137): Homolog of NCBI NO: 18496856 NR Description: COPT4 [Arabidopsis thaliana]
  misc_feature (21)..(137): Homolog of NCBI NO: 30687312 NR Description: COPT4 protein [Arabidopsis thaliana]
  misc_feature (1)..(145): Homolog of NCBI NO: 15237802 NR Description: copper transport protein [Arabidopsis thaliana]
  misc_feature (1)..(145): Homolog of NCBI NO: 11288418 NR Description: copper transport protein [imported] - Arabidopsis
  misc_feature (12)..(145): Homolog of NCBI NO: 15232677 NR Description: copper transport protein - like protein
  misc_feature (12)..(142): Homolog of NCBI NO: 30683324 NR Description: copper transport protein -related protein
  misc_feature (20)..(151): Homolog of NCBI NO: 18496854 NR Description: copper transporter-like protein COPT3
  misc_feature (1)..(151): Homolog of NCBI NO: 15237804 NR Description: copper transport protein - like [Arabidopsis
  misc_feature (1)..(151): Homolog of NCBI NO: 21592951 NR Description: copper transport protein-like [Arabidopsis
MNGMSGSSPAAPAPSPSSFFQHRHRHGGMMHMTFFWVKNTEVLFDGWPGTSLKMYWVCLAVIFVISAFSECLSRCGFMKSGPASLGGGLLQTAVYTVRAALSYLVMLAVMSFNGGVFVAAMAGFGLGFMIFGSRAFRATSSNSHTEVQSHC

SEQ ID NO: 22761 - protein, 148 aa, Arabidopsis thaliana
  peptide (1)..(148): Ceres Seq. ID no. 13489271
  misc_feature (27)..(140): Pfam Name: Ctr copper transporter family Pfam Description: Ctr copper transporter family
  misc_feature (18)..(128): Homolog of NCBI NO: 25408576 NR Description: hypothetical protein At2g37920 [imported] -
  misc_feature (18)..(134): Homolog of NCBI NO: 18496856 NR Description: COPT4 [Arabidopsis thaliana]
  misc_feature (18)..(134): Homolog of NCBI NO: 30687312 NR Description: COPT4 protein [Arabidopsis thaliana]
  misc_feature (1)..(142): Homolog of NCBI NO: 15237802 NR Description: copper transport protein [Arabidopsis thaliana]
  misc_feature (1)..(142): Homolog of NCBI NO: 11288418 NR Description: copper transport protein [imported] - Arabidopsis
  misc_feature (9)..(142): Homolog of NCBI NO: 15232677 NR Description: copper transport protein - like protein
  misc_feature (9)..(139): Homolog of NCBI NO: 30683324 NR Description: copper transport protein -related protein
  misc_feature (17)..(148): Homolog of NCBI NO: 18496854 NR Description: copper transporter-like protein COPT3
  misc_feature (1)..(148): Homolog of NCBI NO: 15237804 NR Description: copper transport protein - like [Arabidopsis
  misc_feature (1)..(148): Homolog of NCBI NO: 21592951 NR Description: copper transport protein-like [Arabidopsis
MSGSSPAAPAPSPSSFFQHRHRHGGMMHMTFFWVKNTEVLFDGWPGTSLKMYWVCLAVIFVISAFSECLSRCGFMKSGPASLGGGLLQTAVYTVRAALSYLVMLAVMSFNGGVFVAAMAGFGLGFMIFGSRAFRATSSNSHTEVQSHC

SEQ ID NO: 22762 - DNA, 1163 bp, Arabidopsis thaliana
  misc_feature (1)..(1163): Ceres Seq. ID no. 12558793
  misc_feature: MA Experiment ID: 108434 Result: Up-regulated in Transcription
  misc_feature: MA Experiment 108434 PARAMETER Experiment Name: At_Root_Tips_cDNA_P Parameter: Tissue Value: Root Tips
  misc_feature: MA Experiment ID: 108461 Result: Up-regulated in Transcription
  misc_feature: MA Experiment 108461 PARAMETER Experiment Name: At_Germinating_Seeds_cDNA_P Parameter: Age (day) Value: 1 vs. 0
  misc_feature: MA Experiment 108461 PARAMETER Experiment Name: At_Germinating_Seeds_cDNA_P Parameter: Tissue Value: Germinating Seeds
  misc_feature: MA Experiment ID: 108668 Result: Down-regulated in Transcription
  misc_feature: MA Experiment 108668 PARAMETER Experiment Name: At_2mM_SA_cDNA_P Parameter: Plant Line Value: WS
  misc_feature: MA Experiment 108668 PARAMETER Experiment Name: At_2mM_SA_cDNA_P Parameter: Timepoint (hr) Value: 6
  misc_feature: MA Experiment 108668 PARAMETER Experiment Name: At_2mM_SA_cDNA_P Parameter: Treatment Value: 2mM SA vs. No Treatment
  misc_feature: MA Experiment ID: 20000069 Result: Down-regulated in Transcription
  misc_feature: MA Experiment 20000069 PARAMETER Experiment Name: At_100uM_ABA_Mutants_cDNA_P Parameter: Plant Line Value: CS23
  misc_feature: MA Experiment 20000069 PARAMETER Experiment Name: At_100uM_ABA_Mutants_cDNA_P Parameter: Timepoint (hr) Value: 6
  misc_feature: MA Experiment 20000069 PARAMETER Experiment Name: At_100uM_ABA_Mutants_cDNA_P Parameter: Tissue Value: Aerial
  misc_feature: MA Experiment 20000069 PARAMETER Experiment Name: At_100uM_ABA_Mutants_cDNA_P Parameter: Treatment Value: 100uM ABA vs. No Treatment
  misc_feature: MA Experiment ID: 20000087 Result: Down-regulated in Transcription
  misc_feature: MA Experiment 20000087 PARAMETER Experiment Name: At_100uM_ABA_Mutants_cDNA_P Parameter: Plant Line Value: WS
  misc_feature: MA Experiment 20000087 PARAMETER Experiment Name: At_100uM_ABA_Mutants_cDNA_P Parameter: Timepoint (hr) Value: 6
  misc_feature: MA Experiment 20000087 PARAMETER Experiment Name: At_100uM_ABA_Mutants_cDNA_P Parameter: Tissue Value: Aerial
  misc_feature: MA Experiment 20000087 PARAMETER Experiment Name: At_100uM_ABA_Mutants_cDNA_P Parameter: Treatment Value: 100uM ABA vs. No Treatment
  misc_feature: MA Experiment ID: 20000111 Result: Up-regulated in Transcription
  misc_feature: MA Experiment 20000111 PARAMETER Experiment Name: At_42deg_Heat_cDNA_P Parameter: Temperature (deg C) Value: 42 vs. 22
  misc_feature: MA Experiment 20000111 PARAMETER Experiment Name: At_42deg_Heat_cDNA_P Parameter: Timepoint (hr) Value: 6
  misc_feature: MA Experiment 20000111 PARAMETER Experiment Name: At_42deg_Heat_cDNA_P Parameter: Tissue Value: Aerial
  misc_feature: MA Experiment ID: 20000113 Result: Up-regulated in Transcription
  misc_feature: MA Experiment 20000113 PARAMETER Experiment Name: At_42deg_Heat_cDNA_P Parameter: Temperature (deg C) Value: 42 vs. 22
  misc_feature: MA Experiment 20000113 PARAMETER Experiment Name: At_42deg_Heat_cDNA_P Parameter: Timepoint (hr) Value: 8
  misc_feature: MA Experiment 20000113 PARAMETER Experiment Name: At_42deg_Heat_cDNA_P Parameter: Tissue Value: Aerial
  misc_feature: MA Experiment ID: 20000117 Result: Down-regulated in Transcription
  misc_feature: MA Experiment 20000117 PARAMETER Experiment Name: At_100uM_ABA_Mutants_cDNA_P Parameter: Plant Line Value: Columbia
  misc_feature: MA Experiment 20000117 PARAMETER Experiment Name: At_100uM_ABA_Mutants_cDNA_P Parameter: Timepoint (hr) Value: 6
  misc_feature: MA Experiment 20000117 PARAMETER Experiment Name: At_100uM_ABA_Mutants_cDNA_P Parameter: Tissue Value: Aerial
  misc_feature: MA Experiment 20000117 PARAMETER Experiment Name: At_100uM_ABA_Mutants_cDNA_P Parameter: Treatment Value: 100uM ABA vs. No Treatment
  misc_feature: MA Experiment ID: 20000173 Result: Up-regulated in Transcription
  misc_feature: MA Experiment 20000173 PARAMETER Experiment Name: At_42deg_Heat_P Parameter: Age (day) Value: 14
  misc_feature: MA Experiment 20000173 PARAMETER Experiment Name: At_42deg_Heat_P Parameter: Organism Value: A. thaliana
  misc_feature: MA Experiment 20000173 PARAMETER Experiment Name: At_42deg_Heat_P Parameter: Plant Line Value: WS
  misc_feature: MA Experiment 20000173 PARAMETER Experiment Name: At_42deg_Heat_P Parameter: Temperature (deg C) Value: 42 vs. 22
  misc_feature: MA Experiment 20000173 PARAMETER Experiment Name: At_42deg_Heat_P Parameter: Timepoint (hr) Value: 6
  misc_feature: MA Experiment 20000173 PARAMETER Experiment Name: At_42deg_Heat_P Parameter: Tissue Value: Aerial
  misc_feature: MA Experiment ID: 20000179 Result: Up-regulated in Transcription
  misc_feature: MA Experiment 20000179 PARAMETER Experiment Name: At_Germinating_Seeds_P Parameter: Age (hr) Value: 6 vs. 0
  misc_feature: MA Experiment 20000179 PARAMETER Experiment Name: At_Germinating_Seeds_P Parameter: Tissue Value: Germinating Seeds
  misc_feature: MA Experiment ID: 20000180 Result: Up-regulated in Transcription
  misc_feature: MA Experiment 20000180 PARAMETER Experiment Name: At_Germinating_Seeds_P Parameter: Age (hr) Value: 24 vs. 0
  misc_feature: MA Experiment 20000180 PARAMETER Experiment Name: At_Germinating_Seeds_P Parameter: Tissue Value: Germinating Seeds
  misc_feature: MA Experiment ID: 20000182 Result: Down-regulated in Transcription
  misc_feature: MA Experiment 20000182 PARAMETER Experiment Name: At_2mM_SA_P Parameter: Age (day) Value: 14
  misc_feature: MA Experiment 20000182 PARAMETER Experiment Name: At_2mM_SA_P Parameter: Organism Value: A. thaliana
  misc_feature: MA Experiment 20000182 PARAMETER Experiment Name: At_2mM_SA_P Parameter: Plant Line Value: WS
  misc_feature: MA Experiment 20000182 PARAMETER Experiment Name: At_2mM_SA_P Parameter: Timepoint (hr) Value: 6
  misc_feature: MA Experiment 20000182 PARAMETER Experiment Name: At_2mM_SA_P Parameter: Tissue Value: Aerial
  misc_feature: MA Experiment 20000182 PARAMETER Experiment Name: At_2mM_SA_P Parameter: Treatment Value: 2mM SA vs. No Treatment
  misc_feature: MA Experiment ID: 20000234 Result: Up-regulated in Transcription
  misc_feature: MA Experiment 20000234 PARAMETER Experiment Name: At_Siliques_P Parameter: Age (day) Value: 21
  misc_feature: MA Experiment 20000234 PARAMETER Experiment Name: At_Siliques_P Parameter: Organism Value: A. thaliana
  misc_feature: MA Experiment 20000234 PARAMETER Experiment Name: At_Siliques_P Parameter: Plant Line Value: WS
  misc_feature: MA Experiment 20000234 PARAMETER Experiment Name: At_Siliques_P Parameter: Tissue Value: Less Than 5mm Siliques vs. Whole Plant
  misc_feature: MA Experiment ID: 20000235 Result: Up-regulated in Transcription
  misc_feature: MA Experiment 20000235 PARAMETER Experiment Name: At_Siliques_P Parameter: Age (day) Value: 21
  misc_feature: MA Experiment 20000235 PARAMETER Experiment Name: At_Siliques_P Parameter: Organism Value: A. thaliana
  misc_feature: MA Experiment 20000235 PARAMETER Experiment Name: At_Siliques_P Parameter: Plant Line Value: WS
  misc_feature: MA Experiment 20000235 PARAMETER Experiment Name: At_Siliques_P Parameter: Tissue Value: 5-10mm Siliques vs. Whole Plant
  misc_feature: MA Experiment ID: 20000496 Result: Up-regulated in Transcription
  misc_feature: MA Experiment 20000496 PARAMETER Experiment Name: At_Guard_Cells_P Parameter: Harvest Date Value: 7/19/2002
  misc_feature: MA Experiment 20000496 PARAMETER Experiment Name: At_Guard_Cells_P Parameter: Organism Value: Canola
  misc_feature: MA Experiment 20000496 PARAMETER Experiment Name: At_Guard_Cells_P Parameter: Tissue Value: Guard Cells vs. Leaves
  misc_feature: MA Experiment ID: 20000573 Result: Down-regulated in Transcription
  misc_feature: MA Experiment 20000573 PARAMETER Experiment Name: At_100uM_ABA_Mutants__P Parameter: Organism Value: A. thaliana
  misc_feature: MA Experiment 20000573 PARAMETER Experiment Name: At_100uM_ABA_Mutants__P Parameter: Plant Line Value: CS22 vs. Ler wt
  misc_feature: MA Experiment 20000573 PARAMETER Experiment Name: At_100uM_ABA_Mutants__P Parameter: Timepoint (hr) Value: N/A
  misc_feature: MA Experiment 20000573 PARAMETER Experiment Name: At_100uM_ABA_Mutants__P Parameter: Tissue Value: Whole Plant
  misc_feature: MA Experiment 20000573 PARAMETER Experiment Name: At_100uM_ABA_Mutants__P Parameter: Treatment Value: None
  misc_feature: MA Experiment ID: 20000574 Result: Down-regulated in Transcription
  misc_feature: MA Experiment 20000574 PARAMETER Experiment Name: At_100uM_ABA_Mutants__P Parameter: Organism Value: A. thaliana
  misc_feature: MA Experiment 20000574 PARAMETER Experiment Name: At_100uM_ABA_Mutants__P Parameter: Plant Line Value: CS23 vs. Ler wt
  misc_feature: MA Experiment 20000574 PARAMETER Experiment Name: At_100uM_ABA_Mutants__P Parameter: Timepoint (hr) Value: N/A
  misc_feature: MA Experiment 20000574 PARAMETER Experiment Name: At_100uM_ABA_Mutants__P Parameter: Tissue Value: Whole Plant
  misc_feature: MA Experiment 20000574 PARAMETER Experiment Name: At_100uM_ABA_Mutants__P Parameter: Treatment Value: None
  misc_feature: MA Experiment ID: 20001555 Result: Up-regulated in Transcription
  misc_feature: MA Experiment 20001555 PARAMETER Experiment Name: At_Drought_Soil_Dry_P Parameter: Age (day) Value: 24
  misc_feature: MA Experiment 20001555 PARAMETER Experiment Name: At_Drought_Soil_Dry_P Parameter: Organism Value: A. thaliana
  misc_feature: MA Experiment 20001555 PARAMETER Experiment Name: At_Drought_Soil_Dry_P Parameter: Plant Line Value: WS
  misc_feature: MA Experiment 20001555 PARAMETER Experiment Name: At_Drought_Soil_Dry_P Parameter: Post Timepoint (hr) Value: None
  misc_feature: MA Experiment 20001555 PARAMETER Experiment Name: At_Drought_Soil_Dry_P Parameter: Post-Treatment Value: None
  misc_feature: MA Experiment 20001555 PARAMETER Experiment Name: At_Drought_Soil_Dry_P Parameter: Timepoint (day) Value: 10
  misc_feature: MA Experiment 20001555 PARAMETER Experiment Name: At_Drought_Soil_Dry_P Parameter: Treatment Value: Drought vs. No Drought
  misc_feature: MA Experiment ID: 20001556 Result: Up-regulated in Transcription
  misc_feature: MA Experiment 20001556 PARAMETER Experiment Name: At_Drought_Soil_Dry_P Parameter: Age (day) Value: 26
  misc_feature: MA Experiment 20001556 PARAMETER Experiment Name: At_Drought_Soil_Dry_P Parameter: Organism Value: A. thaliana
  misc_feature: MA Experiment 20001556 PARAMETER Experiment Name: At_Drought_Soil_Dry_P Parameter: Plant Line Value: WS
  misc_feature: MA Experiment 20001556 PARAMETER Experiment Name: At_Drought_Soil_Dry_P Parameter: Post Timepoint (hr) Value: None
  misc_feature: MA Experiment 20001556 PARAMETER Experiment Name: At_Drought_Soil_Dry_P Parameter: Post-Treatment Value: None
  misc_feature: MA Experiment 20001556 PARAMETER Experiment Name: At_Drought_Soil_Dry_P Parameter: Timepoint (day) Value: 12
  misc_feature: MA Experiment 20001556 PARAMETER Experiment Name: At_Drought_Soil_Dry_P Parameter: Treatment Value: Drought vs. No Drought
  misc_feature: MA Experiment ID: 20001558 Result: Up-regulated in Transcription
  misc_feature: MA Experiment 20001558 PARAMETER Experiment Name: At_Drought_Soil_Dry_P Parameter: Age (day) Value: 27
  misc_feature: MA Experiment 20001558 PARAMETER Experiment Name: At_Drought_Soil_Dry_P Parameter: Organism Value: A. thaliana
  misc_feature: MA Experiment 20001558 PARAMETER Experiment Name: At_Drought_Soil_Dry_P Parameter: Plant Line Value: WS
  misc_feature: MA Experiment 20001558 PARAMETER Experiment Name: At_Drought_Soil_Dry_P Parameter: Post Timepoint (hr) Value: 6
  misc_feature: MA Experiment 20001558 PARAMETER Experiment Name: At_Drought_Soil_Dry_P Parameter: Post-Treatment Value: Re-Water vs. No Drought
  misc_feature: MA Experiment 20001558 PARAMETER Experiment Name: At_Drought_Soil_Dry_P Parameter: Timepoint (day) Value: 13
  misc_feature: MA Experiment 20001558 PARAMETER Experiment Name: At_Drought_Soil_Dry_P Parameter: Treatment Value: Drought vs. No Drought
gaagtctcagtgtcggctaatcagaggatcagtctcagtgttgatttcaggtgataaatctctttgctttgacaatggcagaggaaattagattctttgaactcaacaccggagcgaagataccatccgtcggtctaggaacgtggcaggccgatcctggtctcgtcggaaacgctgtcgacgctgctgtgaagattggttatcgtcacattgattgtgctcaaatctatggcaatgaaaaagagattgggttagtcctgaagaaattgtttgatggtggagttgttaagcgtgaggaaatgttcatcacatccaaactatggtgtacttatcatgatcctcaagaagtgcctgaggcacttaatagaactctacaggatctgcagcttgactacgtcgatctgtatctcattcactggcctgttagcctcaagaaaggatctactggctttaaaccagagaacattttgccaactgatattcctagcacatggaaagcaatggaatcactctttgattcaggcaaggcccgtactattggtgtaagtaatttctcctcaaagaaactcgcagatctcttggtggtggctcgtgttcctcccgctgttaaccaggtggagtgtcacccttcatggcaacaaaacgtgctcagggatttctgcaaatctaaaggcgttcatctctcagggtactctcctttgggttctccaggaacaacgtggctaacgagcgatgttttgaagaaccctattcttggtggtgttgctgagaagctcggcaagactcctgcacaggttgcattacgctggggtctccaaatgggtcaaagtgttcttccaaaaagcacccatgaagacaggatcaaacagaatttcgatgttttcaactggtccatacccgaagacatgttatccaagttttctgagattggacagggtaggttggtgcgaggcatgtcatttgttcatgagacgagtccatataagagtcttgaagaactctgggacggtgagatatgagactcagctgatttgattgtcatagatttgtcattagtaatgcacgttgtttcattacaaaggtacaacattttacttataaactccctccagcagttccacgtgaaaagacattaatgttctaattatactgaattgatgatc

SEQ ID NO: 22763 - protein, 314 aa, Arabidopsis thaliana
  peptide (1)..(314): Ceres Seq. ID no. 12558794
  misc_feature (6)..(314): Homolog of NCBI NO: 34908280 NR Description: putative aldose reductase
  misc_feature (1)..(314): Homolog of NCBI NO: 13160399 NR Description: aldose reductase [Digitalis purpurea]
  misc_feature (1)..(314): Homolog of NCBI NO: 13160397 NR Description: aldose reductase [Digitalis purpurea]
  misc_feature (1)..(289): Homolog of NCBI NO: 7431114 NR Description: aldehyde dehydrogenase homolog At2g37770 -
  misc_feature (1)..(314): Homolog of NCBI NO: 15232354 NR Description: aldo/keto reductase family
  misc_feature (12)..(314): Homolog of NCBI NO: 28393400 NR Description: putative aldo/keto reductase [Arabidopsis
  misc_feature (1)..(314): Homolog of NCBI NO: 30687247 NR Description: aldo/keto reductase family [Arabidopsis thaliana]
  misc_feature (287)..(314): Homolog of NCBI NO: 25283479 NR Description: probable alcohol dehydrogenase [imported] -
  misc_feature (1)..(287): Homolog of NCBI NO: 25283479 NR Description: probable alcohol dehydrogenase [imported] -
  misc_feature (1)..(314): Homolog of NCBI NO: 30687261 NR Description: aldo/keto reductase family [Arabidopsis thaliana]
  misc_feature (1)..(314): Homolog of NCBI NO: 13160399 NR Description: aldose reductase [Digitalis purpurea]
  misc_feature (1)..(314): Homolog of NCBI NO: 13160397 NR Description: aldose reductase [Digitalis purpurea]
  misc_feature (1)..(289): Homolog of NCBI NO: 7431114 NR Description: aldehyde dehydrogenase homolog At2g37770 -
  misc_feature (1)..(314): Homolog of NCBI NO: 15232354 NR Description: aldo/keto reductase family
  misc_feature (12)..(314): Homolog of NCBI NO: 28393400 NR Description: putative aldo/keto reductase [Arabidopsis
  misc_feature (1)..(314): Homolog of NCBI NO: 30687247 NR Description: aldo/keto reductase family [Arabidopsis thaliana]
  misc_feature (287)..(314): Homolog of NCBI NO: 25283479 NR Description: probable alcohol dehydrogenase [imported] -
  misc_feature (1)..(287): Homolog of NCBI NO: 25283479 NR Description: probable alcohol dehydrogenase [imported] -
  misc_feature (1)..(314): Homolog of NCBI NO: 30687261 NR Description: aldo/keto reductase family [Arabidopsis thaliana]
  misc_feature (6)..(314): Homolog of NCBI NO: 34908280 NR Description: putative aldose reductase
MAEEIRFFELNTGAKIPSVGLGTWQADPGLVGNAVDAAVKIGYRHIDCAQIYGNEKEIGLVLKKLFDGGVVKREEMFITSKLWCTYHDPQEVPEALNRTLQDLQLDYVDLYLIHWPVSLKKGSTGFKPENILPTDIPSTWKAMESLFDSGKARTIGVSNFSSKKLADLLVVARVPPAVNQVECHPSWQQNVLRDFCKSKGVHLSGYSPLGSPGTTWLTSDVLKNPILGGVAEKLGKTPAQVALRWGLQMGQSVLPKSTHEDRIKQNFDVFNWSIPEDMLSKFSEIGQGRLVRGMSFVHETSPYKSLEELWDGEI

SEQ ID NO: 22764 - protein, 239 aa, Arabidopsis thaliana
  peptide (1)..(239): Ceres Seq. ID no. 12558795
  misc_feature (1)..(239): Homolog of NCBI NO: 34908280 NR Description: putative aldose reductase
  misc_feature (1)..(239): Homolog of NCBI NO: 13160399 NR Description: aldose reductase [Digitalis purpurea]
  misc_feature (1)..(239): Homolog of NCBI NO: 13160397 NR Description: aldose reductase [Digitalis purpurea]
  misc_feature (1)..(214): Homolog of NCBI NO: 7431114 NR Description: aldehyde dehydrogenase homolog At2g37770 -
  misc_feature (1)..(239): Homolog of NCBI NO: 15232354 NR Description: aldo/keto reductase family
  misc_feature (1)..(239): Homolog of NCBI NO: 28393400 NR Description: putative aldo/keto reductase [Arabidopsis
  misc_feature (1)..(239): Homolog of NCBI NO: 30687247 NR Description: aldo/keto reductase family [Arabidopsis thaliana]
  misc_feature (212)..(239): Homolog of NCBI NO: 25283479 NR Description: probable alcohol dehydrogenase [imported] -
  misc_feature (1)..(212): Homolog of NCBI NO: 25283479 NR Description: probable alcohol dehydrogenase [imported] -
  misc_feature (1)..(239): Homolog of NCBI NO: 30687261 NR Description: aldo/keto reductase family [Arabidopsis thaliana]
  misc_feature (1)..(239): Homolog of NCBI NO: 34908280 NR Description: putative aldose reductase
  misc_feature (1)..(239): Homolog of NCBI NO: 13160399 NR Description: aldose reductase [Digitalis purpurea]
  misc_feature (1)..(239): Homolog of NCBI NO: 13160397 NR Description: aldose reductase [Digitalis purpurea]
  misc_feature (1)..(214): Homolog of NCBI NO: 7431114 NR Description: aldehyde dehydrogenase homolog At2g37770 -
  misc_feature (1)..(239): Homolog of NCBI NO: 15232354 NR Description: aldo/keto reductase family
  misc_feature (1)..(239): Homolog of NCBI NO: 28393400 NR Description: putative aldo/keto reductase [Arabidopsis
  misc_feature (1)..(239): Homolog of NCBI NO: 30687247 NR Description: aldo/keto reductase family [Arabidopsis thaliana]
  misc_feature (212)..(239): Homolog of NCBI NO: 25283479 NR Description: probable alcohol dehydrogenase [imported] -
  misc_feature (1)..(212): Homolog of NCBI NO: 25283479 NR Description: probable alcohol dehydrogenase [imported] -
  misc_feature (1)..(239): Homolog of NCBI NO: 30687261 NR Description: aldo/keto reductase family [Arabidopsis thaliana]
MFITSKLWCTYHDPQEVPEALNRTLQDLQLDYVDLYLIHWPVSLKKGSTGFKPENILPTDIPSTWKAMESLFDSGKARTIGVSNFSSKKLADLLVVARVPPAVNQVECHPSWQQNVLRDFCKSKGVHLSGYSPLGSPGTTWLTSDVLKNPILGGVAEKLGKTPAQVALRWGLQMGQSVLPKSTHEDRIKQNFDVFNWSIPEDMLSKFSEIGQGRLVRGMSFVHETSPYKSLEELWDGEI

SEQ ID NO: 22765 - protein, 172 aa, Arabidopsis thaliana
  peptide (1)..(172): Ceres Seq. ID no. 12558796
  misc_feature (1)..(172): Homolog of NCBI NO: 34908280 NR Description: putative aldose reductase
  misc_feature (1)..(172): Homolog of NCBI NO: 13160399 NR Description: aldose reductase [Digitalis purpurea]
  misc_feature (1)..(172): Homolog of NCBI NO: 13160397 NR Description: aldose reductase [Digitalis purpurea]
  misc_feature (1)..(147): Homolog of NCBI NO: 7431114 NR Description: aldehyde dehydrogenase homolog At2g37770 -
  misc_feature (1)..(172): Homolog of NCBI NO: 15232354 NR Description: aldo/keto reductase family
  misc_feature (1)..(172): Homolog of NCBI NO: 28393400 NR Description: putative aldo/keto reductase [Arabidopsis
  misc_feature (1)..(172): Homolog of NCBI NO: 30687247 NR Description: aldo/keto reductase family [Arabidopsis thaliana]
  misc_feature (145)..(172): Homolog of NCBI NO: 25283479 NR Description: probable alcohol dehydrogenase [imported] -
  misc_feature (1)..(145): Homolog of NCBI NO: 25283479 NR Description: probable alcohol dehydrogenase [imported] -
  misc_feature (1)..(172): Homolog of NCBI NO: 30687261 NR Description: aldo/keto reductase family [Arabidopsis thaliana]
  misc_feature (1)..(172): Homolog of NCBI NO: 34908280 NR Description: putative aldose reductase
  misc_feature (1)..(172): Homolog of NCBI NO: 13160399 NR Description: aldose reductase [Digitalis purpurea]
  misc_feature (1)..(172): Homolog of NCBI NO: 13160397 NR Description: aldose reductase [Digitalis purpurea]
  misc_feature (1)..(147): Homolog of NCBI NO: 7431114 NR Description: aldehyde dehydrogenase homolog At2g37770 -
  misc_feature (1)..(172): Homolog of NCBI NO: 15232354 NR Description: aldo/keto reductase family
  misc_feature (1)..(172): Homolog of NCBI NO: 28393400 NR Description: putative aldo/keto reductase [Arabidopsis
  misc_feature (1)..(172): Homolog of NCBI NO: 30687247 NR Description: aldo/keto reductase family [Arabidopsis thaliana]
  misc_feature (145)..(172): Homolog of NCBI NO: 25283479 NR Description: probable alcohol dehydrogenase [imported] -
  misc_feature (1)..(145): Homolog of NCBI NO: 25283479 NR Description: probable alcohol dehydrogenase [imported] -
  misc_feature (1)..(172): Homolog of NCBI NO: 30687261 NR Description: aldo/keto reductase family [Arabidopsis thaliana]
MESLFDSGKARTIGVSNFSSKKLADLLVVARVPPAVNQVECHPSWQQNVLRDFCKSKGVHLSGYSPLGSPGTTWLTSDVLKNPILGGVAEKLGKTPAQVALRWGLQMGQSVLPKSTHEDRIKQNFDVFNWSIPEDMLSKFSEIGQGRLVRGMSFVHETSPYKSLEELWDGEI

SEQ ID NO: 22766 - DNA, 1605 bp, Arabidopsis thaliana
  misc_feature (1)..(1605): Ceres Seq. ID no. 12371283
  misc_feature: MA Experiment ID: 108434 Result: Up-regulated in Transcription
  misc_feature: MA Experiment 108434 PARAMETER Experiment Name: At_Root_Tips_cDNA_P Parameter: Tissue Value: Root Tips
  misc_feature: MA Experiment ID: 108462 Result: Down-regulated in Transcription
  misc_feature: MA Experiment 108462 PARAMETER Experiment Name: At_Germinating_Seeds_cDNA_P Parameter: Age (day) Value: 2 vs. 0
  misc_feature: MA Experiment 108462 PARAMETER Experiment Name: At_Germinating_Seeds_cDNA_P Parameter: Tissue Value: Germinating Seeds
  misc_feature: MA Experiment ID: 108463 Result: Down-regulated in Transcription
  misc_feature: MA Experiment 108463 PARAMETER Experiment Name: At_Germinating_Seeds_cDNA_P Parameter: Age (day) Value: 3 vs. 0
  misc_feature: MA Experiment 108463 PARAMETER Experiment Name: At_Germinating_Seeds_cDNA_P Parameter: Tissue Value: Germinating Seeds
  misc_feature: MA Experiment ID: 20000111 Result: Up-regulated in Transcription
  misc_feature: MA Experiment 20000111 PARAMETER Experiment Name: At_42deg_Heat_cDNA_P Parameter: Temperature (deg C) Value: 42 vs. 22
  misc_feature: MA Experiment 20000111 PARAMETER Experiment Name: At_42deg_Heat_cDNA_P Parameter: Timepoint (hr) Value: 6
  misc_feature: MA Experiment 20000111 PARAMETER Experiment Name: At_42deg_Heat_cDNA_P Parameter: Tissue Value: Aerial
  misc_feature: MA Experiment ID: 20000180 Result: Down-regulated in Transcription
  misc_feature: MA Experiment 20000180 PARAMETER Experiment Name: At_Germinating_Seeds_P Parameter: Age (hr) Value: 24 vs. 0
  misc_feature: MA Experiment 20000180 PARAMETER Experiment Name: At_Germinating_Seeds_P Parameter: Tissue Value: Germinating Seeds
  misc_feature: MA Experiment ID: 20001557 Result: Up-regulated in Transcription
  misc_feature: MA Experiment 20001557 PARAMETER Experiment Name: At_Drought_Soil_Dry_P Parameter: Age (day) Value: 27
  misc_feature: MA Experiment 20001557 PARAMETER Experiment Name: At_Drought_Soil_Dry_P Parameter: Organism Value: A. thaliana
  misc_feature: MA Experiment 20001557 PARAMETER Experiment Name: At_Drought_Soil_Dry_P Parameter: Plant Line Value: WS
  misc_feature: MA Experiment 20001557 PARAMETER Experiment Name: At_Drought_Soil_Dry_P Parameter: Post Timepoint (hr) Value: 3
  misc_feature: MA Experiment 20001557 PARAMETER Experiment Name: At_Drought_Soil_Dry_P Parameter: Post-Treatment Value: Re-Water vs. No Drought
  misc_feature: MA Experiment 20001557 PARAMETER Experiment Name: At_Drought_Soil_Dry_P Parameter: Timepoint (day) Value: 13
  misc_feature: MA Experiment 20001557 PARAMETER Experiment Name: At_Drought_Soil_Dry_P Parameter: Treatment Value: Drought vs. No Drought
cttcccttagggcgtatcaaggagaagaaacaaagccgtacaacgagggctcttcctgggcaacaaaaccaccattttcgttttatctcaatcttcgtctctttcgaaagatctaaccacaacaactccttaagatggataagtatcaacgagtggtgaagccgaaagcggatacgccgattgatgcgaatgagattcgtatcactagtcaaggcagggcacgaaactacatcacctatgcgatgactcttcttcaggataaagggtcaactgaagttgtattcaaggcaatgggaagagctatcaacaagactgtgaccattgtagagctgattaagagaaggatccctgatcttcatcagaacacatctattggatccacagacatcacagacacatgggaaccaacagaggaaggccttctacctttggagactacaaggcatgtgtcaatgataaccattaccctatccaagattgagcttaatacctcctctgttgggtaccagtgcccaattcctattgagttggtgaagccaatgggcgatattgattatgaaggacgagagggttcacctggtggcagagggaggggaagaggaagaggaaggggaagaggaagggggcgaggtggcagaggaaatgcttatgtgaacgttgagcatgaagatggaggttgggaacgtgagcagtcctatggtagaggaagaggacgtggcagaggacgcagcagtcgtggtcgtggaagaggaggatacaatggtcctccgaatgagtatgatgcaccacaagatggaggttacggttacgatgctcctcatgaacaccgtggatatgatgaccgtggtggttatgatgcccctcctcagggccgtggtggttacgatggtcctcagggtcgcggtggttacgatggtcctcagggtcgccgtggttatgatggtcctcctcagggccgtggtggttatgatggtccttctcaaggccgtggtggttatgatggtccttctcagggccgtggtggttatgatggtccttctcagggccgtggtggttatgatggtcctcagggtcgtgggcgtggacgtggacgtggaaggggaggacgtggaagaggaggaggacgtggtggtgatggtggtttcaacaacagatcagatggaccaccagtccaggcagctgcttgagagtgaggtttctcttacacaaacataaaaagaagaaaaaagcccaagtcgttggatgttttttttctatctccttgttctctcactttctttctatgtttgcttcttctgtccatcaagaagacatgtttgccataagtgtatctcattccccttcttttttttttactatccattgattgacagtgttttagcttgtggtctgttttgtttagagtcgcttaggaatatatgttcaatttattttatggttggtcgtcgtcttgggtttttgttagagaagaactactgaggcatcctcttttcttttcttttttcctctgttttgtagttttgtttaggtgagagtgagacacagtttggacaaattacctcttttctttggttatcagttttaatgtgatggaacagttgattc

SEQ ID NO: 22767 - protein, 350 aa, Arabidopsis thaliana
  peptide (1)..(350): Ceres Seq. ID no. 12371284
  misc_feature (204)..(348): Pfam Name: Herpesvirus latent membrane protein 1 (LMP1) Pfam Description: Herpesvirus latent membrane protein 1 (LMP1)
  misc_feature (171)..(350): Homolog of NCBI NO: 18394837 NR Description: expressed protein
  misc_feature (1)..(156): Homolog of NCBI NO: 15231369 NR Description: unknown protein; protein id: At3g07030.1
  misc_feature (1)..(273): Homolog of NCBI NO: 34897552 NR Description: OSJNBa0042L16.13 [Oryza sativa (japonica
  misc_feature (1)..(240): Homolog of NCBI NO: 32526671 NR Description: chloroplast nucleoid DNA-binding protein -like
  misc_feature (1)..(262): Homolog of NCBI NO: 24417384 NR Description: unknown [Arabidopsis thaliana]
  misc_feature (1)..(313): Homolog of NCBI NO: 18394837 NR Description: expressed protein
  misc_feature (1)..(313): Homolog of NCBI NO: 25518088 NR Description: T20H2.2 protein - Arabidopsis thaliana
  misc_feature (1)..(48): Homolog of NCBI NO: 25404999 NR Description: protein T4O12.22 [imported] - Arabidopsis
  misc_feature (41)..(350): Homolog of NCBI NO: 25404999 NR Description: protein T4O12.22 [imported] - Arabidopsis
  misc_feature (1)..(350): Homolog of NCBI NO: 18410994 NR Description: expressed protein
MDKYQRVVKPKADTPIDANEIRITSQGRARNYITYAMTLLQDKGSTEVVFKAMGRAINKTVTIVELIKRRIPDLHQNTSIGSTDITDTWEPTEEGLLPLETTRHVSMITITLSKIELNTSSVGYQCPIPIELVKPMGDIDYEGREGSPGGRGRGRGRGRGRGRGRGGRGNAYVNVEHEDGGWEREQSYGRGRGRGRGRSSRGRGRGGYNGPPNEYDAPQDGGYGYDAPHEHRGYDDRGGYDAPPQGRGGYDGPQGRGGYDGPQGRRGYDGPPQGRGGYDGPSQGRGGYDGPSQGRGGYDGPSQGRGGYDGPQGRGRGRGRGRGGRGRGGGRGGDGGFNNRSDGPPVQAAA

SEQ ID NO: 22768 - protein, 314 aa, Arabidopsis thaliana
  peptide (1)..(314): Ceres Seq. ID no. 12371285
  misc_feature (168)..(312): Pfam Name: Herpesvirus latent membrane protein 1 (LMP1) Pfam Description: Herpesvirus latent membrane protein 1 (LMP1)
  misc_feature (135)..(314): Homolog of NCBI NO: 18394837 NR Description: expressed protein
  misc_feature (1)..(120): Homolog of NCBI NO: 15231369 NR Description: unknown protein; protein id: At3g07030.1
  misc_feature (1)..(237): Homolog of NCBI NO: 34897552 NR Description: OSJNBa0042L16.13 [Oryza sativa (japonica
  misc_feature (1)..(204): Homolog of NCBI NO: 32526671 NR Description: chloroplast nucleoid DNA-binding protein -like
  misc_feature (1)..(226): Homolog of NCBI NO: 24417384 NR Description: unknown [Arabidopsis thaliana]
  misc_feature (1)..(277): Homolog of NCBI NO: 18394837 NR Description: expressed protein
  misc_feature (1)..(277): Homolog of NCBI NO: 25518088 NR Description: T20H2.2 protein - Arabidopsis thaliana
  misc_feature (1)..(12): Homolog of NCBI NO: 25404999 NR Description: protein T4O12.22 [imported] - Arabidopsis
  misc_feature (5)..(314): Homolog of NCBI NO: 25404999 NR Description: protein T4O12.22 [imported] - Arabidopsis
  misc_feature (1)..(314): Homolog of NCBI NO: 18410994 NR Description: expressed protein
MTLLQDKGSTEVVFKAMGRAINKTVTIVELIKRRIPDLHQNTSIGSTDITDTWEPTEEGLLPLETTRHVSMITITLSKIELNTSSVGYQCPIPIELVKPMGDIDYEGREGSPGGRGRGRGRGRGRGRGRGGRGNAYVNVEHEDGGWEREQSYGRGRGRGRGRSSRGRGRGGYNGPPNEYDAPQDGGYGYDAPHEHRGYDDRGGYDAPPQGRGGYDGPQGRGGYDGPQGRRGYDGPPQGRGGYDGPSQGRGGYDGPSQGRGGYDGPSQGRGGYDGPQGRGRGRGRGRGGRGRGGGRGGDGGFNNRSDGPPVQAAA

SEQ ID NO: 22769 - protein, 298 aa, Arabidopsis thaliana
  peptide (1)..(298): Ceres Seq. ID no. 12371286
  misc_feature (152)..(296): Pfam Name: Herpesvirus latent membrane protein 1 (LMP1) Pfam Description: Herpesvirus latent membrane protein 1 (LMP1)
  misc_feature (1)..(209): Homolog of NCBI NO: 23612874 NR Description: hypothetical protein, conserved [Plasmodium
  misc_feature (119)..(298): Homolog of NCBI NO: 18394837 NR Description: expressed protein
  misc_feature (1)..(104): Homolog of NCBI NO: 15231369 NR Description: unknown protein; protein id: At3g07030.1
  misc_feature (1)..(221): Homolog of NCBI NO: 34897552 NR Description: OSJNBa0042L16.13 [Oryza sativa (japonica
  misc_feature (1)..(188): Homolog of NCBI NO: 32526671 NR Description: chloroplast nucleoid DNA-binding protein -like
  misc_feature (1)..(210): Homolog of NCBI NO: 24417384 NR Description: unknown [Arabidopsis thaliana]
  misc_feature (1)..(261): Homolog of NCBI NO: 18394837 NR Description: expressed protein
  misc_feature (1)..(261): Homolog of NCBI NO: 25518088 NR Description: T20H2.2 protein - Arabidopsis thaliana
  misc_feature (1)..(298): Homolog of NCBI NO: 25404999 NR Description: protein T4O12.22 [imported] - Arabidopsis
  misc_feature (1)..(298): Homolog of NCBI NO: 18410994 NR Description: expressed protein
MGRAINKTVTIVELIKRRIPDLHQNTSIGSTDITDTWEPTEEGLLPLETTRHVSMITITLSKIELNTSSVGYQCPIPIELVKPMGDIDYEGREGSPGGRGRGRGRGRGRGRGRGGRGNAYVNVEHEDGGWEREQSYGRGRGRGRGRSSRGRGRGGYNGPPNEYDAPQDGGYGYDAPHEHRGYDDRGGYDAPPQGRGGYDGPQGRGGYDGPQGRRGYDGPPQGRGGYDGPSQGRGGYDGPSQGRGGYDGPSQGRGGYDGPQGRGRGRGRGRGGRGRGGGRGGDGGFNNRSDGPPVQAAA

SEQ ID NO: 22770 - DNA, 1839 bp, Arabidopsis thaliana
  misc_feature (1)..(1839): Ceres Seq. ID no. 12326370
  misc_feature: MA Experiment ID: 108434 Result: Down-regulated in Transcription
  misc_feature: MA Experiment 108434 PARAMETER Experiment Name: At_Root_Tips_cDNA_P Parameter: Tissue Value: Root Tips
  misc_feature: MA Experiment ID: 108469 Result: Up-regulated in Transcription
  misc_feature: MA Experiment ID: 108668 Result: Up-regulated in Transcription
  misc_feature: MA Experiment 108668 PARAMETER Experiment Name: At_2mM_SA_cDNA_P Parameter: Plant Line Value: WS
  misc_feature: MA Experiment 108668 PARAMETER Experiment Name: At_2mM_SA_cDNA_P Parameter: Timepoint (hr) Value: 6
  misc_feature: MA Experiment 108668 PARAMETER Experiment Name: At_2mM_SA_cDNA_P Parameter: Treatment Value: 2mM SA vs. No Treatment
  misc_feature: MA Experiment ID: 20000173 Result: Down-regulated in Transcription
  misc_feature: MA Experiment 20000173 PARAMETER Experiment Name: At_42deg_Heat_P Parameter: Age (day) Value: 14
  misc_feature: MA Experiment 20000173 PARAMETER Experiment Name: At_42deg_Heat_P Parameter: Organism Value: A. thaliana
  misc_feature: MA Experiment 20000173 PARAMETER Experiment Name: At_42deg_Heat_P Parameter: Plant Line Value: WS
  misc_feature: MA Experiment 20000173 PARAMETER Experiment Name: At_42deg_Heat_P Parameter: Temperature (deg C) Value: 42 vs. 22
  misc_feature: MA Experiment 20000173 PARAMETER Experiment Name: At_42deg_Heat_P Parameter: Timepoint (hr) Value: 6
  misc_feature: MA Experiment 20000173 PARAMETER Experiment Name: At_42deg_Heat_P Parameter: Tissue Value: Aerial
  misc_feature: MA Experiment ID: 20000224 Result: Down-regulated in Transcription
  misc_feature: MA Experiment ID: 20000227 Result: Down-regulated in Transcription
  misc_feature: MA Experiment 20000227 PARAMETER Experiment Name: At_Root-Tips-vs-Tops_P Parameter: Tissue Value: Root Tips vs. Root Tops
  misc_feature: MA Experiment ID: 20000456 Result: Up-regulated in Transcription
  misc_feature: MA Experiment 20000456 PARAMETER Experiment Name: At_100uM_BA_P Parameter: Age (day) Value: 14
  misc_feature: MA Experiment 20000456 PARAMETER Experiment Name: At_100uM_BA_P Parameter: Organism Value: A. thaliana
  misc_feature: MA Experiment 20000456 PARAMETER Experiment Name: At_100uM_BA_P Parameter: Plant Line Value: WS
  misc_feature: MA Experiment 20000456 PARAMETER Experiment Name: At_100uM_BA_P Parameter: Timepoint (hr) Value: 6
  misc_feature: MA Experiment 20000456 PARAMETER Experiment Name: At_100uM_BA_P Parameter: Tissue Value: Aerial
  misc_feature: MA Experiment 20000456 PARAMETER Experiment Name: At_100uM_BA_P Parameter: Treatment Value: 100uM BA vs. No Treatment
  misc_feature: Phenotype: ROSETTE LEAVES Disorganized Rosette-Disorganized Rosette
  misc_feature: Phenotype: ROSETTE LEAVES Shape-Serrate
  misc_feature: Phenotype: WHOLE PLANT Size-Small
  misc_feature: Phenotype: CAULINE LEAVES Curled-Curled 1
  misc_feature: Phenotype: CAULINE LEAVES Shape-Serrate
  misc_feature: Phenotype: ROSETTE LEAVES Shape-Lanceolate
  misc_feature: Phenotype: ROSETTE LEAVES Shape-Serrate
  misc_feature: Phenotype: ROSETTE LEAVES Shape-Lanceolate
  misc_feature: Phenotype: ROSETTE LEAVES Shape-Serrate
  misc_feature: Phenotype: WHOLE PLANT Size-Small
  misc_feature: Phenotype: INFLORESCENCE Flowering Time-Late Flowering
aggtaacgtctctctctctctgtgactctctcaattagtttgaaccagtcaactcgtaaagcccttgtttcctgtaattttccgaattgggtcttcccttaatttatcatttctcgccggaaaaactttgagaatttccttgtatttcacggcgatgctataatcctcctgaaagcgacttactgatatatattagtttattaggcaatgaatgtgaaatttaccgagtcaaacgtgtttaaacaatgtaaaagtgttgcaggcgattgttttgtttatcttgttttgggtttggttgtcttggatgggaggaagtagctctaaagagtcacctagaggaggtggaagtggtcgtaggtatgaacgtagtgtgtctgggagctcatcttattcgtctgcttgggaccagagcagctattatcagacaccaaaccatccatctgcgtctcctgtttcatcctataattctgggagacaaacaccgaagaatcttgagaggaagtattcacggattgctgataactaccgttccattgatgaggttaccgctgctctttcacatgccggtttggagtcctcgaatctcattgttggtatagatgtcaccaagagcaacgagtggacaggggcgagatcatttggtaggaagagtctgcatttcattggaactactccaaacccttatcaacaagctatttccatcattggaaagactttatcggtttttgatgaggataatttgatcccctgttatggatttggagatgctacaactcatgatcaggatgtcttcagtttcaatcccaatgatacatattgtaacgggtttgaagaagttctcatgtgttacagagagattgttccccagcttcgtctctcaggtccgacatcttttgcacctatcatcgaaagggccatgacaattgtggaagaaagtggtggccagtaccatgttcttctcattatcgctgatggacaggtgacaagaagtgttgatacagataacggtggattcagtccacaagagcagcagactattgatgccattgttagagcaagtgaatatcctttgtctatagttcttgttggtgttggagatggtccctgggacaccatgagacagtttgatgacaacatccccgctcgtgcctttgacaatttccagtttgtgaatttcacggatataatgtcaaagaacattgatccagcaagaaaagaggcagaattcgcgctttctgccttgatggagatcccgtctcagtataaagccaccctcgaactaggcttacttggacaaagaaccggacattgtccagacaggattgcgcttccaccaccaacttatgctactcaatctatgcgcaacagcccaagaacttcccgatcaaccagttttcaaaacaaaccatatgataatggtgtttcctctacaccaccttcaactactcataacgagagccagcaacagttttgccccgtatgtctagtgagtgcaaagaacatggctttcaattgtggtcatcagacttgcgctggatgtggggaagacctccatgtgtgtcccatttgccggagctcaatctcggttcgtatcaagctttattaagataagtctctcaagaactgaaggaacccgaggtggtctgagatctttcacagccaacaccatcccaacttagatctcatttaccagtgtcctaacatttgtttttactttgaggggaataaccggttcctctcaaaggttttgtagataatctgttgtcaattttgcattctcattgcacatgaaaaaaccacagcagactctctcgtgaataaaggatcctttctctgcgg

SEQ ID NO: 22771 - protein, 433 aa, Arabidopsis thaliana
  peptide (1)..(433): Ceres Seq. ID no. 12326371
  misc_feature (45)..(406): Homolog of NCBI NO: 18481708 NR Description: hypothetical protein [Sorghum bicolor]
  misc_feature (368)..(433): Homolog of NCBI NO: 18412353 NR Description: expressed protein
  misc_feature (14)..(363): Homolog of NCBI NO: 18412353 NR Description: expressed protein
  misc_feature (407)..(433): Homolog of NCBI NO: 25404968 NR Description: protein F12A21.7 [imported] - Arabidopsis
  misc_feature (192)..(393): Homolog of NCBI NO: 25404968 NR Description: protein F12A21.7 [imported] - Arabidopsis
  misc_feature (1)..(412): Homolog of NCBI NO: 20804894 NR Description: P0497A05.19 [Oryza sativa (japonica
  misc_feature (19)..(433): Homolog of NCBI NO: 15232157 NR Description: unknown protein; protein id: At3g01650.1
  misc_feature (39)..(433): Homolog of NCBI NO: 15241400 NR Description: putative protein
  misc_feature (1)..(433): Homolog of NCBI NO: 18408863 NR Description: F12A21.7; protein id: At1g67800.1, supported by
  misc_feature (1)..(433): Homolog of NCBI NO: 30697566 NR Description: copine-related [Arabidopsis thaliana]
MGGSSSKESPRGGGSGRRYERSVSGSSSYSSAWDQSSYYQTPNHPSASPVSSYNSGRQTPKNLERKYSRIADNYRSIDEVTAALSHAGLESSNLIVGIDVTKSNEWTGARSFGRKSLHFIGTTPNPYQQAISIIGKTLSVFDEDNLIPCYGFGDATTHDQDVFSFNPNDTYCNGFEEVLMCYREIVPQLRLSGPTSFAPIIERAMTIVEESGGQYHVLLIIADGQVTRSVDTDNGGFSPQEQQTIDAIVRASEYPLSIVLVGVGDGPWDTMRQFDDNIPARAFDNFQFVNFTDIMSKNIDPARKEAEFALSALMEIPSQYKATLELGLLGQRTGHCPDRIALPPPTYATQSMRNSPRTSRSTSFQNKPYDNGVSSTPPSTTHNESQQQFCPVCLVSAKNMAFNCGHQTCAGCGEDLHVCPICRSSISVRIKLY

SEQ ID NO: 22772 - protein, 254 aa, Arabidopsis thaliana
  peptide (1)..(254): Ceres Seq. ID no. 12326372
  misc_feature (1)..(227): Homolog of NCBI NO: 18481708 NR Description: hypothetical protein [Sorghum bicolor]
  misc_feature (189)..(254): Homolog of NCBI NO: 18412353 NR Description: expressed protein
  misc_feature (1)..(184): Homolog of NCBI NO: 18412353 NR Description: expressed protein
  misc_feature (228)..(254): Homolog of NCBI NO: 25404968 NR Description: protein F12A21.7 [imported] - Arabidopsis
  misc_feature (13)..(214): Homolog of NCBI NO: 25404968 NR Description: protein F12A21.7 [imported] - Arabidopsis
  misc_feature (1)..(233): Homolog of NCBI NO: 20804894 NR Description: P0497A05.19 [Oryza sativa (japonica
  misc_feature (1)..(254): Homolog of NCBI NO: 15232157 NR Description: unknown protein; protein id: At3g01650.1
  misc_feature (1)..(254): Homolog of NCBI NO: 15241400 NR Description: putative protein
  misc_feature (1)..(254): Homolog of NCBI NO: 18408863 NR Description: F12A21.7; protein id: At1g67800.1, supported by
  misc_feature (1)..(254): Homolog of NCBI NO: 30697566 NR Description: copine-related [Arabidopsis thaliana]
MCYREIVPQLRLSGPTSFAPIIERAMTIVEESGGQYHVLLIIADGQVTRSVDTDNGGFSPQEQQTIDAIVRASEYPLSIVLVGVGDGPWDTMRQFDDNIPARAFDNFQFVNFTDIMSKNIDPARKEAEFALSALMEIPSQYKATLELGLLGQRTGHCPDRIALPPPTYATQSMRNSPRTSRSTSFQNKPYDNGVSSTPPSTTHNESQQQFCPVCLVSAKNMAFNCGHQTCAGCGEDLHVCPICRSSISVRIKLY

SEQ ID NO: 22773 - protein, 229 aa, Arabidopsis thaliana
  peptide (1)..(229): Ceres Seq. ID no. 12326373
  misc_feature (1)..(202): Homolog of NCBI NO: 18481708 NR Description: hypothetical protein [Sorghum bicolor]
  misc_feature (164)..(229): Homolog of NCBI NO: 18412353 NR Description: expressed protein
  misc_feature (1)..(159): Homolog of NCBI NO: 18412353 NR Description: expressed protein
  misc_feature (203)..(229): Homolog of NCBI NO: 25404968 NR Description: protein F12A21.7 [imported] - Arabidopsis
  misc_feature (1)..(189): Homolog of NCBI NO: 25404968 NR Description: protein F12A21.7 [imported] - Arabidopsis
  misc_feature (1)..(208): Homolog of NCBI NO: 20804894 NR Description: P0497A05.19 [Oryza sativa (japonica
  misc_feature (1)..(229): Homolog of NCBI NO: 15232157 NR Description: unknown protein; protein id: At3g01650.1
  misc_feature (1)..(229): Homolog of NCBI NO: 15241400 NR Description: putative protein
  misc_feature (1)..(229): Homolog of NCBI NO: 18408863 NR Description: F12A21.7; protein id: At1g67800.1, supported by
  misc_feature (1)..(229): Homolog of NCBI NO: 30697566 NR Description: copine-related [Arabidopsis thaliana]
MTIVEESGGQYHVLLIIADGQVTRSVDTDNGGFSPQEQQTIDAIVRASEYPLSIVLVGVGDGPWDTMRQFDDNIPARAFDNFQFVNFTDIMSKNIDPARKEAEFALSALMEIPSQYKATLELGLLGQRTGHCPDRIALPPPTYATQSMRNSPRTSRSTSFQNKPYDNGVSSTPPSTTHNESQQQFCPVCLVSAKNMAFNCGHQTCAGCGEDLHVCPICRSSISVRIKLY

SEQ ID NO: 22774 - DNA, 1363 bp, Arabidopsis thaliana
  misc_feature (1)..(1363): Ceres Seq. ID no. 13622081
  misc_feature: MA Experiment ID: 108462 Result: Up-regulated in Transcription
  misc_feature: MA Experiment 108462 PARAMETER Experiment Name: At_Germinating_Seeds_cDNA_P Parameter: Age (day) Value: 2 vs. 0
  misc_feature: MA Experiment 108462 PARAMETER Experiment Name: At_Germinating_Seeds_cDNA_P Parameter: Tissue Value: Germinating Seeds
  misc_feature: MA Experiment ID: 108464 Result: Up-regulated in Transcription
  misc_feature: MA Experiment 108464 PARAMETER Experiment Name: At_Germinating_Seeds_cDNA_P Parameter: Age (day) Value: 4 vs. 0
  misc_feature: MA Experiment 108464 PARAMETER Experiment Name: At_Germinating_Seeds_cDNA_P Parameter: Tissue Value: Germinating Seeds
  misc_feature: MA Experiment ID: 108488 Result: Down-regulated in Transcription
  misc_feature: MA Experiment ID: 108569 Result: Up-regulated in Transcription
  misc_feature: MA Experiment 108569 PARAMETER Experiment Name: At_0.001%_MeJA__cDNA_P Parameter: Timepoint (hr) Value: 6
  misc_feature: MA Experiment 108569 PARAMETER Experiment Name: At_0.001%_MeJA__cDNA_P Parameter: Tissue Value: Aerial
  misc_feature: MA Experiment 108569 PARAMETER Experiment Name: At_0.001%_MeJA__cDNA_P Parameter: Treatment Value: 0.001% MeJA vs. No Treatment
  misc_feature: MA Experiment ID: 108577 Result: Down-regulated in Transcription
  misc_feature: MA Experiment 108577 PARAMETER Experiment Name: At_42deg_Heat_cDNA_P Parameter: Temperature (deg C) Value: 42 vs. 22
  misc_feature: MA Experiment 108577 PARAMETER Experiment Name: At_42deg_Heat_cDNA_P Parameter: Timepoint (hr) Value: 6
  misc_feature: MA Experiment 108577 PARAMETER Experiment Name: At_42deg_Heat_cDNA_P Parameter: Tissue Value: Aerial
  misc_feature: MA Experiment ID: 108668 Result: Up-regulated in Transcription
  misc_feature: MA Experiment 108668 PARAMETER Experiment Name: At_2mM_SA_cDNA_P Parameter: Plant Line Value: WS
  misc_feature: MA Experiment 108668 PARAMETER Experiment Name: At_2mM_SA_cDNA_P Parameter: Timepoint (hr) Value: 6
  misc_feature: MA Experiment 108668 PARAMETER Experiment Name: At_2mM_SA_cDNA_P Parameter: Treatment Value: 2mM SA vs. No Treatment
  misc_feature: MA Experiment ID: 20000069 Result: Up-regulated in Transcription
  misc_feature: MA Experiment 20000069 PARAMETER Experiment Name: At_100uM_ABA_Mutants_cDNA_P Parameter: Plant Line Value: CS23
  misc_feature: MA Experiment 20000069 PARAMETER Experiment Name: At_100uM_ABA_Mutants_cDNA_P Parameter: Timepoint (hr) Value: 6
  misc_feature: MA Experiment 20000069 PARAMETER Experiment Name: At_100uM_ABA_Mutants_cDNA_P Parameter: Tissue Value: Aerial
  misc_feature: MA Experiment 20000069 PARAMETER Experiment Name: At_100uM_ABA_Mutants_cDNA_P Parameter: Treatment Value: 100uM ABA vs. No Treatment
  misc_feature: MA Experiment ID: 20000070 Result: Up-regulated in Transcription
  misc_feature: MA Experiment 20000070 PARAMETER Experiment Name: At_100uM_ABA_Mutants_cDNA_P Parameter: Plant Line Value: CS24
  misc_feature: MA Experiment 20000070 PARAMETER Experiment Name: At_100uM_ABA_Mutants_cDNA_P Parameter: Timepoint (hr) Value: 6
  misc_feature: MA Experiment 20000070 PARAMETER Experiment Name: At_100uM_ABA_Mutants_cDNA_P Parameter: Tissue Value: Aerial
  misc_feature: MA Experiment 20000070 PARAMETER Experiment Name: At_100uM_ABA_Mutants_cDNA_P Parameter: Treatment Value: 100uM ABA vs. No Treatment
  misc_feature: MA Experiment ID: 20000071 Result: Up-regulated in Transcription
  misc_feature: MA Experiment 20000071 PARAMETER Experiment Name: At_100uM_ABA_Mutants_cDNA_P Parameter: Plant Line Value: CS8104
  misc_feature: MA Experiment 20000071 PARAMETER Experiment Name: At_100uM_ABA_Mutants_cDNA_P Parameter: Timepoint (hr) Value: 6
  misc_feature: MA Experiment 20000071 PARAMETER Experiment Name: At_100uM_ABA_Mutants_cDNA_P Parameter: Tissue Value: Aerial
  misc_feature: MA Experiment 20000071 PARAMETER Experiment Name: At_100uM_ABA_Mutants_cDNA_P Parameter: Treatment Value: 100uM ABA vs. No Treatment
  misc_feature: MA Experiment ID: 20000089 Result: Up-regulated in Transcription
  misc_feature: MA Experiment ID: 20000090 Result: Up-regulated in Transcription
  misc_feature: MA Experiment ID: 20000111 Result: Down-regulated in Transcription
  misc_feature: MA Experiment 20000111 PARAMETER Experiment Name: At_42deg_Heat_cDNA_P Parameter: Temperature (deg C) Value: 42 vs. 22
  misc_feature: MA Experiment 20000111 PARAMETER Experiment Name: At_42deg_Heat_cDNA_P Parameter: Timepoint (hr) Value: 6
  misc_feature: MA Experiment 20000111 PARAMETER Experiment Name: At_42deg_Heat_cDNA_P Parameter: Tissue Value: Aerial
  misc_feature: MA Experiment ID: 20000112 Result: Down-regulated in Transcription
  misc_feature: MA Experiment 20000112 PARAMETER Experiment Name: At_42deg_Heat_cDNA_P Parameter: Temperature (deg C) Value: 42 vs. 22
  misc_feature: MA Experiment 20000112 PARAMETER Experiment Name: At_42deg_Heat_cDNA_P Parameter: Timepoint (hr) Value: 2
  misc_feature: MA Experiment 20000112 PARAMETER Experiment Name: At_42deg_Heat_cDNA_P Parameter: Tissue Value: Aerial
  misc_feature: MA Experiment ID: 20000113 Result: Down-regulated in Transcription
  misc_feature: MA Experiment 20000113 PARAMETER Experiment Name: At_42deg_Heat_cDNA_P Parameter: Temperature (deg C) Value: 42 vs. 22
  misc_feature: MA Experiment 20000113 PARAMETER Experiment Name: At_42deg_Heat_cDNA_P Parameter: Timepoint (hr) Value: 8
  misc_feature: MA Experiment 20000113 PARAMETER Experiment Name: At_42deg_Heat_cDNA_P Parameter: Tissue Value: Aerial
  misc_feature: MA Experiment ID: 20000117 Result: Up-regulated in Transcription
  misc_feature: MA Experiment 20000117 PARAMETER Experiment Name: At_100uM_ABA_Mutants_cDNA_P Parameter: Plant Line Value: Columbia
  misc_feature: MA Experiment 20000117 PARAMETER Experiment Name: At_100uM_ABA_Mutants_cDNA_P Parameter: Timepoint (hr) Value: 6
  misc_feature: MA Experiment 20000117 PARAMETER Experiment Name: At_100uM_ABA_Mutants_cDNA_P Parameter: Tissue Value: Aerial
  misc_feature: MA Experiment 20000117 PARAMETER Experiment Name: At_100uM_ABA_Mutants_cDNA_P Parameter: Treatment Value: 100uM ABA vs. No Treatment
  misc_feature: MA Experiment ID: 20000173 Result: Down-regulated in Transcription
  misc_feature: MA Experiment 20000173 PARAMETER Experiment Name: At_42deg_Heat_P Parameter: Age (day) Value: 14
  misc_feature: MA Experiment 20000173 PARAMETER Experiment Name: At_42deg_Heat_P Parameter: Organism Value: A. thaliana
  misc_feature: MA Experiment 20000173 PARAMETER Experiment Name: At_42deg_Heat_P Parameter: Plant Line Value: WS
  misc_feature: MA Experiment 20000173 PARAMETER Experiment Name: At_42deg_Heat_P Parameter: Temperature (deg C) Value: 42 vs. 22
  misc_feature: MA Experiment 20000173 PARAMETER Experiment Name: At_42deg_Heat_P Parameter: Timepoint (hr) Value: 6
  misc_feature: MA Experiment 20000173 PARAMETER Experiment Name: At_42deg_Heat_P Parameter: Tissue Value: Aerial
  misc_feature: MA Experiment ID: 20000182 Result: Up-regulated in Transcription
  misc_feature: MA Experiment 20000182 PARAMETER Experiment Name: At_2mM_SA_P Parameter: Age (day) Value: 14
  misc_feature: MA Experiment 20000182 PARAMETER Experiment Name: At_2mM_SA_P Parameter: Organism Value: A. thaliana
  misc_feature: MA Experiment 20000182 PARAMETER Experiment Name: At_2mM_SA_P Parameter: Plant Line Value: WS
  misc_feature: MA Experiment 20000182 PARAMETER Experiment Name: At_2mM_SA_P Parameter: Timepoint (hr) Value: 6
  misc_feature: MA Experiment 20000182 PARAMETER Experiment Name: At_2mM_SA_P Parameter: Tissue Value: Aerial
  misc_feature: MA Experiment 20000182 PARAMETER Experiment Name: At_2mM_SA_P Parameter: Treatment Value: 2mM SA vs. No Treatment
  misc_feature: MA Experiment ID: 20000184 Result: Down-regulated in Transcription
  misc_feature: MA Experiment 20000184 PARAMETER Experiment Name: At_Shoots__P Parameter: Age (day) Value: 7
  misc_feature: MA Experiment 20000184 PARAMETER Experiment Name: At_Shoots__P Parameter: Tissue Value: Shoots vs. Whole Plant
  misc_feature: MA Experiment ID: 20000227 Result: Up-regulated in Transcription
  misc_feature: MA Experiment 20000227 PARAMETER Experiment Name: At_Root-Tips-vs-Tops_P Parameter: Tissue Value: Root Tips vs. Root Tops
  misc_feature: MA Experiment ID: 20000264 Result: Up-regulated in Transcription
  misc_feature: MA Experiment 20000264 PARAMETER Experiment Name: At_Open_Flower_P Parameter: Age (day) Value: 21
  misc_feature: MA Experiment 20000264 PARAMETER Experiment Name: At_Open_Flower_P Parameter: Plant Line Value: WS
  misc_feature: MA Experiment 20000264 PARAMETER Experiment Name: At_Open_Flower_P Parameter: Tissue Value: Open Flower vs. Whole Plant
  misc_feature: MA Experiment ID: 20000438 Result: Down-regulated in Transcription
  misc_feature: MA Experiment 20000438 PARAMETER Experiment Name: At_Shoots__P Parameter: Age (day) Value: 14
  misc_feature: MA Experiment 20000438 PARAMETER Experiment Name: At_Shoots__P Parameter: Tissue Value: Shoots vs. Whole Plant
  misc_feature: MA Experiment ID: 20000456 Result: Up-regulated in Transcription
  misc_feature: MA Experiment 20000456 PARAMETER Experiment Name: At_100uM_BA_P Parameter: Age (day) Value: 14
  misc_feature: MA Experiment 20000456 PARAMETER Experiment Name: At_100uM_BA_P Parameter: Organism Value: A. thaliana
  misc_feature: MA Experiment 20000456 PARAMETER Experiment Name: At_100uM_BA_P Parameter: Plant Line Value: WS
  misc_feature: MA Experiment 20000456 PARAMETER Experiment Name: At_100uM_BA_P Parameter: Timepoint (hr) Value: 6
  misc_feature: MA Experiment 20000456 PARAMETER Experiment Name: At_100uM_BA_P Parameter: Tissue Value: Aerial
  misc_feature: MA Experiment 20000456 PARAMETER Experiment Name: At_100uM_BA_P Parameter: Treatment Value: 100uM BA vs. No Treatment
  misc_feature: MA Experiment ID: 20000527 Result: Down-regulated in Transcription
  misc_feature: MA Experiment 20000527 PARAMETER Experiment Name: At_10percent_PEG_P Parameter: Age (day) Value: 20
  misc_feature: MA Experiment 20000527 PARAMETER Experiment Name: At_10percent_PEG_P Parameter: Organism Value: A. thaliana
  misc_feature: MA Experiment 20000527 PARAMETER Experiment Name: At_10percent_PEG_P Parameter: Plant Line Value: WS
  misc_feature: MA Experiment 20000527 PARAMETER Experiment Name: At_10percent_PEG_P Parameter: Timepoint (day) Value: 20
  misc_feature: MA Experiment 20000527 PARAMETER Experiment Name: At_10percent_PEG_P Parameter: Tissue Value: Whole Plant
  misc_feature: MA Experiment 20000527 PARAMETER Experiment Name: At_10percent_PEG_P Parameter: Treatment Value: 10percent PEG vs. No Treatment
  misc_feature: MA Experiment ID: 20000709 Result: Down-regulated in Transcription
  misc_feature: MA Experiment 20000709 PARAMETER Experiment Name: At_15mM_NH4NO3_L-to-H_P Parameter: Age (hr) Value: 14
  misc_feature: MA Experiment 20000709 PARAMETER Experiment Name: At_15mM_NH4NO3_L-to-H_P Parameter: Organism Value: A. thaliana
  misc_feature: MA Experiment 20000709 PARAMETER Experiment Name: At_15mM_NH4NO3_L-to-H_P Parameter: Plant Line Value: WS
  misc_feature: MA Experiment 20000709 PARAMETER Experiment Name: At_15mM_NH4NO3_L-to-H_P Parameter: Timepoint (hr) Value: 4
  misc_feature: MA Experiment 20000709 PARAMETER Experiment Name: At_15mM_NH4NO3_L-to-H_P Parameter: Tissue Value: Aerial
  misc_feature: MA Experiment 20000709 PARAMETER Experiment Name: At_15mM_NH4NO3_L-to-H_P Parameter: Treatment Value: 15mM NH4NO3 vs. 30mM Mannitol
  misc_feature: MA Experiment ID: 20000794 Result: Up-regulated in Transcription
  misc_feature: MA Experiment 20000794 PARAMETER Experiment Name: At_Petals_P Parameter: Age (day) Value: 23-25 days
  misc_feature: MA Experiment 20000794 PARAMETER Experiment Name: At_Petals_P Parameter: Plant Line Value: WS
  misc_feature: MA Experiment 20000794 PARAMETER Experiment Name: At_Petals_P Parameter: Tissue Value: Petals vs. Whole plant
  misc_feature: MA Experiment ID: 20001555 Result: Down-regulated in Transcription
  misc_feature: MA Experiment 20001555 PARAMETER Experiment Name: At_Drought_Soil_Dry_P Parameter: Age (day) Value: 24
  misc_feature: MA Experiment 20001555 PARAMETER Experiment Name: At_Drought_Soil_Dry_P Parameter: Organism Value: A. thaliana
  misc_feature: MA Experiment 20001555 PARAMETER Experiment Name: At_Drought_Soil_Dry_P Parameter: Plant Line Value: WS
  misc_feature: MA Experiment 20001555 PARAMETER Experiment Name: At_Drought_Soil_Dry_P Parameter: Post Timepoint (hr) Value: None
  misc_feature: MA Experiment 20001555 PARAMETER Experiment Name: At_Drought_Soil_Dry_P Parameter: Post-Treatment Value: None
  misc_feature: MA Experiment 20001555 PARAMETER Experiment Name: At_Drought_Soil_Dry_P Parameter: Timepoint (day) Value: 10
  misc_feature: MA Experiment 20001555 PARAMETER Experiment Name: At_Drought_Soil_Dry_P Parameter: Treatment Value: Drought vs. No Drought
  misc_feature: MA Experiment ID: 20001556 Result: Down-regulated in Transcription
  misc_feature: MA Experiment 20001556 PARAMETER Experiment Name: At_Drought_Soil_Dry_P Parameter: Age (day) Value: 26
  misc_feature: MA Experiment 20001556 PARAMETER Experiment Name: At_Drought_Soil_Dry_P Parameter: Organism Value: A. thaliana
  misc_feature: MA Experiment 20001556 PARAMETER Experiment Name: At_Drought_Soil_Dry_P Parameter: Plant Line Value: WS
  misc_feature: MA Experiment 20001556 PARAMETER Experiment Name: At_Drought_Soil_Dry_P Parameter: Post Timepoint (hr) Value: None
  misc_feature: MA Experiment 20001556 PARAMETER Experiment Name: At_Drought_Soil_Dry_P Parameter: Post-Treatment Value: None
  misc_feature: MA Experiment 20001556 PARAMETER Experiment Name: At_Drought_Soil_Dry_P Parameter: Timepoint (day) Value: 12
  misc_feature: MA Experiment 20001556 PARAMETER Experiment Name: At_Drought_Soil_Dry_P Parameter: Treatment Value: Drought vs. No Drought
  misc_feature: MA Experiment ID: 20001560 Result: Down-regulated in Transcription
  misc_feature: MA Experiment 20001560 PARAMETER Experiment Name: At_Drought_Soil_Dry_P Parameter: Age (day) Value: 28
  misc_feature: MA Experiment 20001560 PARAMETER Experiment Name: At_Drought_Soil_Dry_P Parameter: Organism Value: A. thaliana
  misc_feature: MA Experiment 20001560 PARAMETER Experiment Name: At_Drought_Soil_Dry_P Parameter: Plant Line Value: WS
  misc_feature: MA Experiment 20001560 PARAMETER Experiment Name: At_Drought_Soil_Dry_P Parameter: Post Timepoint (hr) Value: None
  misc_feature: MA Experiment 20001560 PARAMETER Experiment Name: At_Drought_Soil_Dry_P Parameter: Post-Treatment Value: None
  misc_feature: MA Experiment 20001560 PARAMETER Experiment Name: At_Drought_Soil_Dry_P Parameter: Timepoint (day) Value: 14
  misc_feature: MA Experiment 20001560 PARAMETER Experiment Name: At_Drought_Soil_Dry_P Parameter: Treatment Value: Drought vs. No Drought
gaaaaatatcaaaacacgagacagatttgattccatttttattactgttactatcatccaaacccttggtatttgtagccatgagtcttgtttcagatctcatcaaccttaacctctcagactccactgacaaaatcattgctgaatacatatgggttggtggttctggaatggacatgagaagcaaagccaggactctacctggaccagtgactgacccttcgcagctaccaaagtggaactatgatggttcaagcacaggccaagctcctggtgaagacagtgaagtcatcttataccctcaagccatattcaaggatcctttccgtagaggaaacaacattcttgtcatgtgcgatgcgtacactcccgcgggtgaaccaatcccgactaacaaaagacacgctgcggctaaggtctttagcaaccctgatgttgcagctgaagtgccatggtatggtattgagcaagaatacactttactccagaaagatgtgaagtggcctgttggttggcctattggtggttatcccggccctcagggaccgtactattgcggtattggagcagacaaatcttttggcagagatgttgttgattctcactacaaggcctgcttatacgctgggatcaacattagtggcatcaatggagaagtcatgccgggtcagtgggagttccaggtcggtccagctgttggtatctcggctgctgatgaaatttgggtcgctcgttacattttggagaggatcacagagattgctggtgtagtggtatcttttgacccgaaaccgattcccggtgactggaacggtgctggtgctcactgcaactacagtaccaagtcaatgagggaagaaggcggttacgagatcatcaagaaagcaatcgataaattgggactgagacacaaagaacacattgctgcttacggtgaaggcaatgagcgtcgtctcacaggacaccacgagactgctgacatcaacactttcctttggggtgttgcgaaccgtggagcatcgatccgagtaggacgtgatacggagaaagaagggaaaggatactttgaggacaggaggccagcttcgaacatggatccttacattgtcacttccatgattgcagagactacaatcctctggaatccttgatgatcatcagatcaagaaaaaatcttgaatgtcactcaaatttgtgtttcttgcaagattcaaagtttgtgttctctatcaagcaatgtcttaggataagtcaaagatttgctctgcttattctgctttttatttacttcacatcctattgaaaacatttctgtgtattatttatgaataaacattatcttaaaagggctgatttatttacc

SEQ ID NO: 22775 - protein, 382 aa, Arabidopsis thaliana
  peptide (1)..(382): Ceres Seq. ID no. 13622082
  misc_feature (129)..(381): Pfam Name: Glutamine synthetase, catalytic domain Pfam Description: Glutamine synthetase, catalytic domain
  misc_feature (27)..(382): Homolog of NCBI NO: 99699 NR Description: glutamate-ammonia ligase (EC 6.3.1.2), cytosolic
  misc_feature (27)..(382): Homolog of NCBI NO: 1076475 NR Description: Gln 1.3 protein - radish
  misc_feature (27)..(382): Homolog of NCBI NO: 21554857 NR Description: glutamine synthetase, putative [Arabidopsis
  misc_feature (27)..(382): Homolog of NCBI NO: 481914 NR Description: glutamate-ammonia ligase (EC 6.3.1.2) - rape
  misc_feature (27)..(382): Homolog of NCBI NO: 1934756 NR Description: cytosolic glutamine synthetase [Brassica napus]
  misc_feature (27)..(382): Homolog of NCBI NO: 1084350 NR Description: glutamate-ammonia ligase (EC 6.3.1.2) - rape
  misc_feature (27)..(382): Homolog of NCBI NO: 1076474 NR Description: Gln 1.2 protein - radish
  misc_feature (27)..(382): Homolog of NCBI NO: 15219598 NR Description: glutamine synthetase -related [Arabidopsis
  misc_feature (27)..(382): Homolog of NCBI NO: 228454 NR Description: Gln synthetase
  misc_feature (27)..(382): Homolog of NCBI NO: 15240288 NR Description: glutamate--ammonia ligase [Arabidopsis thaliana]
KISKHETDLIPFLLLLLSSKPLVFVAMSLVSDLINLNLSDSTDKIIAEYIWVGGSGMDMRSKARTLPGPVTDPSQLPKWNYDGSSTGQAPGEDSEVILYPQAIFKDPFRRGNNILVMCDAYTPAGEPIPTNKRHAAAKVFSNPDVAAEVPWYGIEQEYTLLQKDVKWPVGWPIGGYPGPQGPYYCGIGADKSFGRDVVDSHYKACLYAGINISGINGEVMPGQWEFQVGPAVGISAADEIWVARYILERITEIAGVVVSFDPKPIPGDWNGAGAHCNYSTKSMREEGGYEIIKKAIDKLGLRHKEHIAAYGEGNERRLTGHHETADINTFLWGVANRGASIRVGRDTEKEGKGYFEDRRPASNMDPYIVTSMIAETTILWNP

SEQ ID NO: 22776 - protein, 356 aa, Arabidopsis thaliana
  peptide (1)..(356): Ceres Seq. ID no. 13622083
  misc_feature (103)..(355): Pfam Name: Glutamine synthetase, catalytic domain Pfam Description: Glutamine synthetase, catalytic domain
  misc_feature (1)..(356): Homolog of NCBI NO: 21554857 NR Description: glutamine synthetase, putative [Arabidopsis
  misc_feature (1)..(356): Homolog of NCBI NO: 15219598 NR Description: glutamine synthetase -related [Arabidopsis
  misc_feature (1)..(356): Homolog of NCBI NO: 481914 NR Description: glutamate-ammonia ligase (EC 6.3.1.2) - rape
  misc_feature (1)..(356): Homolog of NCBI NO: 1076474 NR Description: Gln 1.2 protein - radish
  misc_feature (1)..(356): Homolog of NCBI NO: 1934756 NR Description: cytosolic glutamine synthetase [Brassica napus]
  misc_feature (1)..(356): Homolog of NCBI NO: 1084350 NR Description: glutamate-ammonia ligase (EC 6.3.1.2) - rape
  misc_feature (1)..(356): Homolog of NCBI NO: 1076475 NR Description: Gln 1.3 protein - radish
  misc_feature (1)..(356): Homolog of NCBI NO: 228454 NR Description: Gln synthetase
  misc_feature (1)..(356): Homolog of NCBI NO: 99699 NR Description: glutamate-ammonia ligase (EC 6.3.1.2), cytosolic
  misc_feature (1)..(356): Homolog of NCBI NO: 15240288 NR Description: glutamate--ammonia ligase [Arabidopsis thaliana]
MSLVSDLINLNLSDSTDKIIAEYIWVGGSGMDMRSKARTLPGPVTDPSQLPKWNYDGSSTGQAPGEDSEVILYPQAIFKDPFRRGNNILVMCDAYTPAGEPIPTNKRHAAAKVFSNPDVAAEVPWYGIEQEYTLLQKDVKWPVGWPIGGYPGPQGPYYCGIGADKSFGRDVVDSHYKACLYAGINISGINGEVMPGQWEFQVGPAVGISAADEIWVARYILERITEIAGVVVSFDPKPIPGDWNGAGAHCNYSTKSMREEGGYEIIKKAIDKLGLRHKEHIAAYGEGNERRLTGHHETADINTFLWGVANRGASIRVGRDTEKEGKGYFEDRRPASNMDPYIVTSMIAETTILWNP

SEQ ID NO: 22777 - protein, 326 aa, Arabidopsis thaliana
  peptide (1)..(326): Ceres Seq. ID no. 13622084
  misc_feature (73)..(325): Pfam Name: Glutamine synthetase, catalytic domain Pfam Description: Glutamine synthetase, catalytic domain
  misc_feature (1)..(326): Homolog of NCBI NO: 21554857 NR Description: glutamine synthetase, putative [Arabidopsis
  misc_feature (1)..(326): Homolog of NCBI NO: 15219598 NR Description: glutamine synthetase -related [Arabidopsis
  misc_feature (1)..(326): Homolog of NCBI NO: 481914 NR Description: glutamate-ammonia ligase (EC 6.3.1.2) - rape
  misc_feature (1)..(326): Homolog of NCBI NO: 1076474 NR Description: Gln 1.2 protein - radish
  misc_feature (1)..(326): Homolog of NCBI NO: 1934756 NR Description: cytosolic glutamine synthetase [Brassica napus]
  misc_feature (1)..(326): Homolog of NCBI NO: 1084350 NR Description: glutamate-ammonia ligase (EC 6.3.1.2) - rape
  misc_feature (1)..(326): Homolog of NCBI NO: 1076475 NR Description: Gln 1.3 protein - radish
  misc_feature (1)..(326): Homolog of NCBI NO: 228454 NR Description: Gln synthetase
  misc_feature (1)..(326): Homolog of NCBI NO: 99699 NR Description: glutamate-ammonia ligase (EC 6.3.1.2), cytosolic
  misc_feature (1)..(326): Homolog of NCBI NO: 15240288 NR Description: glutamate--ammonia ligase [Arabidopsis thaliana]
MDMRSKARTLPGPVTDPSQLPKWNYDGSSTGQAPGEDSEVILYPQAIFKDPFRRGNNILVMCDAYTPAGEPIPTNKRHAAAKVFSNPDVAAEVPWYGIEQEYTLLQKDVKWPVGWPIGGYPGPQGPYYCGIGADKSFGRDVVDSHYKACLYAGINISGINGEVMPGQWEFQVGPAVGISAADEIWVARYILERITEIAGVVVSFDPKPIPGDWNGAGAHCNYSTKSMREEGGYEIIKKAIDKLGLRHKEHIAAYGEGNERRLTGHHETADINTFLWGVANRGASIRVGRDTEKEGKGYFEDRRPASNMDPYIVTSMIAETTILWNP

SEQ ID NO: 22778 - DNA, 801 bp, Arabidopsis thaliana
  misc_feature (1)..(801): Ceres Seq. ID no. 12394858
  misc_feature: MA Experiment ID: 108434 Result: Up-regulated in Transcription
  misc_feature: MA Experiment 108434 PARAMETER Experiment Name: At_Root_Tips_cDNA_P Parameter: Tissue Value: Root Tips
  misc_feature: MA Experiment ID: 108462 Result: Down-regulated in Transcription
  misc_feature: MA Experiment 108462 PARAMETER Experiment Name: At_Germinating_Seeds_cDNA_P Parameter: Age (day) Value: 2 vs. 0
  misc_feature: MA Experiment 108462 PARAMETER Experiment Name: At_Germinating_Seeds_cDNA_P Parameter: Tissue Value: Germinating Seeds
  misc_feature: MA Experiment ID: 108463 Result: Down-regulated in Transcription
  misc_feature: MA Experiment 108463 PARAMETER Experiment Name: At_Germinating_Seeds_cDNA_P Parameter: Age (day) Value: 3 vs. 0
  misc_feature: MA Experiment 108463 PARAMETER Experiment Name: At_Germinating_Seeds_cDNA_P Parameter: Tissue Value: Germinating Seeds
  misc_feature: MA Experiment ID: 108569 Result: Down-regulated in Transcription
  misc_feature: MA Experiment 108569 PARAMETER Experiment Name: At_0.001%_MeJA__cDNA_P Parameter: Timepoint (hr) Value: 6
  misc_feature: MA Experiment 108569 PARAMETER Experiment Name: At_0.001%_MeJA__cDNA_P Parameter: Tissue Value: Aerial
  misc_feature: MA Experiment 108569 PARAMETER Experiment Name: At_0.001%_MeJA__cDNA_P Parameter: Treatment Value: 0.001% MeJA vs. No Treatment
  misc_feature: MA Experiment ID: 108573 Result: Down-regulated in Transcription
  misc_feature: MA Experiment 108573 PARAMETER Experiment Name: At_Drought_cDNA_P Parameter: Timepoint (hr) Value: 6
  misc_feature: MA Experiment 108573 PARAMETER Experiment Name: At_Drought_cDNA_P Parameter: Tissue Value: Aerial
  misc_feature: MA Experiment 108573 PARAMETER Experiment Name: At_Drought_cDNA_P Parameter: Treatment Value: Drought vs. No Drought
  misc_feature: MA Experiment ID: 20000111 Result: Up-regulated in Transcription
  misc_feature: MA Experiment 20000111 PARAMETER Experiment Name: At_42deg_Heat_cDNA_P Parameter: Temperature (deg C) Value: 42 vs. 22
  misc_feature: MA Experiment 20000111 PARAMETER Experiment Name: At_42deg_Heat_cDNA_P Parameter: Timepoint (hr) Value: 6
  misc_feature: MA Experiment 20000111 PARAMETER Experiment Name: At_42deg_Heat_cDNA_P Parameter: Tissue Value: Aerial
  misc_feature: MA Experiment ID: 20000113 Result: Up-regulated in Transcription
  misc_feature: MA Experiment 20000113 PARAMETER Experiment Name: At_42deg_Heat_cDNA_P Parameter: Temperature (deg C) Value: 42 vs. 22
  misc_feature: MA Experiment 20000113 PARAMETER Experiment Name: At_42deg_Heat_cDNA_P Parameter: Timepoint (hr) Value: 8
  misc_feature: MA Experiment 20000113 PARAMETER Experiment Name: At_42deg_Heat_cDNA_P Parameter: Tissue Value: Aerial
  misc_feature: MA Experiment ID: 20000173 Result: Up-regulated in Transcription
  misc_feature: MA Experiment 20000173 PARAMETER Experiment Name: At_42deg_Heat_P Parameter: Age (day) Value: 14
  misc_feature: MA Experiment 20000173 PARAMETER Experiment Name: At_42deg_Heat_P Parameter: Organism Value: A. thaliana
  misc_feature: MA Experiment 20000173 PARAMETER Experiment Name: At_42deg_Heat_P Parameter: Plant Line Value: WS
  misc_feature: MA Experiment 20000173 PARAMETER Experiment Name: At_42deg_Heat_P Parameter: Temperature (deg C) Value: 42 vs. 22
  misc_feature: MA Experiment 20000173 PARAMETER Experiment Name: At_42deg_Heat_P Parameter: Timepoint (hr) Value: 6
  misc_feature: MA Experiment 20000173 PARAMETER Experiment Name: At_42deg_Heat_P Parameter: Tissue Value: Aerial
  misc_feature: MA Experiment ID: 20000180 Result: Down-regulated in Transcription
  misc_feature: MA Experiment 20000180 PARAMETER Experiment Name: At_Germinating_Seeds_P Parameter: Age (hr) Value: 24 vs. 0
  misc_feature: MA Experiment 20000180 PARAMETER Experiment Name: At_Germinating_Seeds_P Parameter: Tissue Value: Germinating Seeds
  misc_feature: MA Experiment ID: 20000224 Result: Up-regulated in Transcription
  misc_feature: MA Experiment ID: 20001557 Result: Up-regulated in Transcription
  misc_feature: MA Experiment 20001557 PARAMETER Experiment Name: At_Drought_Soil_Dry_P Parameter: Age (day) Value: 27
  misc_feature: MA Experiment 20001557 PARAMETER Experiment Name: At_Drought_Soil_Dry_P Parameter: Organism Value: A. thaliana
  misc_feature: MA Experiment 20001557 PARAMETER Experiment Name: At_Drought_Soil_Dry_P Parameter: Plant Line Value: WS
  misc_feature: MA Experiment 20001557 PARAMETER Experiment Name: At_Drought_Soil_Dry_P Parameter: Post Timepoint (hr) Value: 3
  misc_feature: MA Experiment 20001557 PARAMETER Experiment Name: At_Drought_Soil_Dry_P Parameter: Post-Treatment Value: Re-Water vs. No Drought
  misc_feature: MA Experiment 20001557 PARAMETER Experiment Name: At_Drought_Soil_Dry_P Parameter: Timepoint (day) Value: 13
  misc_feature: MA Experiment 20001557 PARAMETER Experiment Name: At_Drought_Soil_Dry_P Parameter: Treatment Value: Drought vs. No Drought
  misc_feature: MA Experiment ID: 20001558 Result: Up-regulated in Transcription
  misc_feature: MA Experiment 20001558 PARAMETER Experiment Name: At_Drought_Soil_Dry_P Parameter: Age (day) Value: 27
  misc_feature: MA Experiment 20001558 PARAMETER Experiment Name: At_Drought_Soil_Dry_P Parameter: Organism Value: A. thaliana
  misc_feature: MA Experiment 20001558 PARAMETER Experiment Name: At_Drought_Soil_Dry_P Parameter: Plant Line Value: WS
  misc_feature: MA Experiment 20001558 PARAMETER Experiment Name: At_Drought_Soil_Dry_P Parameter: Post Timepoint (hr) Value: 6
  misc_feature: MA Experiment 20001558 PARAMETER Experiment Name: At_Drought_Soil_Dry_P Parameter: Post-Treatment Value: Re-Water vs. No Drought
  misc_feature: MA Experiment 20001558 PARAMETER Experiment Name: At_Drought_Soil_Dry_P Parameter: Timepoint (day) Value: 13
  misc_feature: MA Experiment 20001558 PARAMETER Experiment Name: At_Drought_Soil_Dry_P Parameter: Treatment Value: Drought vs. No Drought
  misc_feature: MA Experiment ID: 20001757 Result: Up-regulated in Transcription
  misc_feature: MA Experiment 20001757 PARAMETER Experiment Name: At_50mM_NH4NO3_L-to-H_P Parameter: Timepoint (hr) Value: 6
  misc_feature: MA Experiment 20001757 PARAMETER Experiment Name: At_50mM_NH4NO3_L-to-H_P Parameter: Tissue Value: Leaf
  misc_feature: MA Experiment 20001757 PARAMETER Experiment Name: At_50mM_NH4NO3_L-to-H_P Parameter: Treatment Value: 50mM NH4NO3 vs 100mM Mannitol
atcttcttctctttagacctttttttctgcaggggggctctaaagcaaaacccttttcctgaaatcgccgtcgcaaattagaagaatcacctacagtcttttgtagggttttcaagacgaggcaatatgagattggagaagtgttggttttgctcttccacaatatatcctggtcatggtattcaatttgtccgtaacgatgccaagatattccggttctgtaggtcgaagtgtcacaagaacttcaagatgaagagaaacccacgtaaagtgaaatggactaaagcattcagagctgcacacgggaaggacatgactaaggatacaacatttgagtttgagaagaagagaaacagacctgagagatacgacaggaacgttacagagaatacactcatggccattaagaagattgctaagatcagaaccgcaagggaagccaaacatatcgaaaataggttgaagccaaacaagcagaagaaactcaatgacgatatgaaagaacttgatcagaacattcatatggtccaggctcccggggcacagaagatcaaagttgatgtttccgaaaagaagtctgttcaaaacgaagccatggaagagtgattctgtggtaacaatatgatccgtctaaaagcctctcacttactctgatgctggtgtcatcttaaagaacaagtcttctttagtttctcttaccatttgtttttggaagtctttaaaaaaaaaaaagttttggtttttgtactgataaaacggctttaagttgctatcattttgcaatgtattattatgtgtctt

SEQ ID NO: 22779 - protein, 159 aa, Arabidopsis thaliana
  peptide (1)..(159): Ceres Seq. ID no. 12394859
  misc_feature (1)..(75): Pfam Name: Ribosomal protein L24e Pfam Description: Ribosomal protein L24e
  misc_feature (1)..(153): Homolog of NCBI NO: 15779001 NR Description: 60S ribosomal protein L30 isolog [Homo sapiens]
  misc_feature (1)..(153): Homolog of NCBI NO: 14250160 NR Description: 60S ribosomal protein L30 isolog [Homo sapiens]
  misc_feature (1)..(159): Homolog of NCBI NO: 20381079 NR Description: Similar to 60S ribosomal protein L30 isolog [Homo
  misc_feature (1)..(153): Homolog of NCBI NO: 34864348 NR Description: similar to ribosomal protein L24-like
  misc_feature (1)..(149): Homolog of NCBI NO: 13529146 NR Description: 60S ribosomal protein L30 isolog [Homo sapiens]
  misc_feature (1)..(153): Homolog of NCBI NO: 10047102 NR Description: ribosomal protein L24-like; my024 protein [Homo
  misc_feature (1)..(153): Homolog of NCBI NO: 16740902 NR Description: 60S ribosomal protein L30 isolog [Homo sapiens]
  misc_feature (1)..(159): Homolog of NCBI NO: 38083793 NR Description: similar to ribosomal protein L24-like
  misc_feature (1)..(159): Homolog of NCBI NO: 27817966 NR Description: putative 60S ribosomal protein L30
  misc_feature (1)..(159): Homolog of NCBI NO: 15225363 NR Description: 60S ribosomal protein L30
MRLEKCWFCSSTIYPGHGIQFVRNDAKIFRFCRSKCHKNFKMKRNPRKVKWTKAFRAAHGKDMTKDTTFEFEKKRNRPERYDRNVTENTLMAIKKIAKIRTAREAKHIENRLKPNKQKKLNDDMKELDQNIHMVQAPGAQKIKVDVSEKKSVQNEAMEE

SEQ ID NO: 22780 - protein, 118 aa, Arabidopsis thaliana
  peptide (1)..(118): Ceres Seq. ID no. 12394860
  misc_feature (1)..(112): Homolog of NCBI NO: 15779001 NR Description: 60S ribosomal protein L30 isolog [Homo sapiens]
  misc_feature (1)..(112): Homolog of NCBI NO: 14250160 NR Description: 60S ribosomal protein L30 isolog [Homo sapiens]
  misc_feature (1)..(118): Homolog of NCBI NO: 20381079 NR Description: Similar to 60S ribosomal protein L30 isolog [Homo
  misc_feature (1)..(112): Homolog of NCBI NO: 34864348 NR Description: similar to ribosomal protein L24-like
  misc_feature (1)..(108): Homolog of NCBI NO: 13529146 NR Description: 60S ribosomal protein L30 isolog [Homo sapiens]
  misc_feature (1)..(112): Homolog of NCBI NO: 10047102 NR Description: ribosomal protein L24-like; my024 protein [Homo
  misc_feature (1)..(112): Homolog of NCBI NO: 16740902 NR Description: 60S ribosomal protein L30 isolog [Homo sapiens]
  misc_feature (1)..(118): Homolog of NCBI NO: 38083793 NR Description: similar to ribosomal protein L24-like
  misc_feature (1)..(118): Homolog of NCBI NO: 27817966 NR Description: putative 60S ribosomal protein L30
  misc_feature (1)..(118): Homolog of NCBI NO: 15225363 NR Description: 60S ribosomal protein L30
MKRNPRKVKWTKAFRAAHGKDMTKDTTFEFEKKRNRPERYDRNVTENTLMAIKKIAKIRTAREAKHIENRLKPNKQKKLNDDMKELDQNIHMVQAPGAQKIKVDVSEKKSVQNEAMEE

SEQ ID NO: 22781 - protein, 97 aa, Arabidopsis thaliana
  peptide (1)..(97): Ceres Seq. ID no. 12394861
  misc_feature (1)..(91): Homolog of NCBI NO: 15779001 NR Description: 60S ribosomal protein L30 isolog [Homo sapiens]
  misc_feature (1)..(91): Homolog of NCBI NO: 14250160 NR Description: 60S ribosomal protein L30 isolog [Homo sapiens]
  misc_feature (1)..(97): Homolog of NCBI NO: 20381079 NR Description: Similar to 60S ribosomal protein L30 isolog [Homo
  misc_feature (1)..(91): Homolog of NCBI NO: 34864348 NR Description: similar to ribosomal protein L24-like
  misc_feature (1)..(87): Homolog of NCBI NO: 13529146 NR Description: 60S ribosomal protein L30 isolog [Homo sapiens]
  misc_feature (1)..(91): Homolog of NCBI NO: 10047102 NR Description: ribosomal protein L24-like; my024 protein [Homo
  misc_feature (1)..(91): Homolog of NCBI NO: 16740902 NR Description: 60S ribosomal protein L30 isolog [Homo sapiens]
  misc_feature (1)..(97): Homolog of NCBI NO: 38083793 NR Description: similar to ribosomal protein L24-like
  misc_feature (1)..(97): Homolog of NCBI NO: 27817966 NR Description: putative 60S ribosomal protein L30
  misc_feature (1)..(97): Homolog of NCBI NO: 15225363 NR Description: 60S ribosomal protein L30
MTKDTTFEFEKKRNRPERYDRNVTENTLMAIKKIAKIRTAREAKHIENRLKPNKQKKLNDDMKELDQNIHMVQAPGAQKIKVDVSEKKSVQNEAMEE

SEQ ID NO: 22782 - DNA, 964 bp, Arabidopsis thaliana
  misc_feature (1)..(964): Ceres Seq. ID no. 13509136
  misc_feature: MA Experiment ID: 108434 Result: Up-regulated in Transcription
  misc_feature: MA Experiment 108434 PARAMETER Experiment Name: At_Root_Tips_cDNA_P Parameter: Tissue Value: Root Tips
  misc_feature: MA Experiment ID: 108462 Result: Down-regulated in Transcription
  misc_feature: MA Experiment 108462 PARAMETER Experiment Name: At_Germinating_Seeds_cDNA_P Parameter: Age (day) Value: 2 vs. 0
  misc_feature: MA Experiment 108462 PARAMETER Experiment Name: At_Germinating_Seeds_cDNA_P Parameter: Tissue Value: Germinating Seeds
  misc_feature: MA Experiment ID: 108463 Result: Down-regulated in Transcription
  misc_feature: MA Experiment 108463 PARAMETER Experiment Name: At_Germinating_Seeds_cDNA_P Parameter: Age (day) Value: 3 vs. 0
  misc_feature: MA Experiment 108463 PARAMETER Experiment Name: At_Germinating_Seeds_cDNA_P Parameter: Tissue Value: Germinating Seeds
  misc_feature: MA Experiment ID: 108464 Result: Down-regulated in Transcription
  misc_feature: MA Experiment 108464 PARAMETER Experiment Name: At_Germinating_Seeds_cDNA_P Parameter: Age (day) Value: 4 vs. 0
  misc_feature: MA Experiment 108464 PARAMETER Experiment Name: At_Germinating_Seeds_cDNA_P Parameter: Tissue Value: Germinating Seeds
  misc_feature: MA Experiment ID: 108488 Result: Up-regulated in Transcription
  misc_feature: MA Experiment ID: 20000113 Result: Up-regulated in Transcription
  misc_feature: MA Experiment 20000113 PARAMETER Experiment Name: At_42deg_Heat_cDNA_P Parameter: Temperature (deg C) Value: 42 vs. 22
  misc_feature: MA Experiment 20000113 PARAMETER Experiment Name: At_42deg_Heat_cDNA_P Parameter: Timepoint (hr) Value: 8
  misc_feature: MA Experiment 20000113 PARAMETER Experiment Name: At_42deg_Heat_cDNA_P Parameter: Tissue Value: Aerial
ctctatccactctcagccggaaaatttttccttgattcattacgacagagagaaccatgccggcgaaacagaggaccccgaaggtcaacagaaaccctgatctgatcaggggtgttggtaaatactcgagatcccagatgtaccataagagaggtttgtgggctatcaaggccaaaaatggaggcgttttcccacgtcacgacgctaaatctaaggttgatgctccggtggagaagccaccgaagttctatccagctgaagatgttaagaaacctctccccaacaggcgcacggcaaaaccaaccaagctcagagctagcattactccaggtacagtgttgattatccttgctggtaggttcaagggaaagagagttgtcttccttaagcagcttgcctctggtttgcttcttgtgactggaccattcaagatcaatggtgttcctttgagacgtgttaaccaggcctatgtgattggcacttccacaaaggttgacatttctggagtcaccctcgataaattcgatgataagtactttggcaaggttgctgagaagaaaaagaagaagacagaaggagagttctttgaggctgagaaagaggagaagaaggagatcccacaggtgaagaaagatgaccagaaagctgtggatgcagctttgatcaaagccattgaagcagttccagagttgaagacttaccttggcgcaaggttttcattgaaacaaggaatgaagccccatgagcttgttttctagatttcattactttttttctgaggtctctagagtatctgtctcctgaagtgttttaccttctaaatggttgttttgttcttgttcactgaacacatacaatttttggcttatacattctctgttcttacgtatggacaaactatcgatcctgtttttgattgtgagctttgtagcgtggttcgtgatagaaatgggataattattgt

SEQ ID NO: 22783 - protein, 233 aa, Arabidopsis thaliana
  peptide (1)..(233): Ceres Seq. ID no. 13509137
  misc_feature (126)..(233): Pfam Name: Ribosomal protein L6e Pfam Description: Ribosomal protein L6e
  misc_feature (126)..(233): Pfam Name: Ribosomal protein L6e Pfam Description: Ribosomal protein L6e
  misc_feature (4)..(61): Homolog of NCBI NO: 18088374 NR Description: Similar to ribosomal protein L6 [Homo sapiens]
  misc_feature (58)..(233): Homolog of NCBI NO: 18088374 NR Description: Similar to ribosomal protein L6 [Homo sapiens]
  misc_feature (49)..(233): Homolog of NCBI NO: 6012952 NR Description: 60S ribosomal protein L6 (YL 16 like) [Cyanophora
  misc_feature (16)..(233): Homolog of NCBI NO: 38344818 NR Description: OSJNBb0022F23.11 [Oryza sativa (japonica
  misc_feature (1)..(233): Homolog of NCBI NO: 7208784 NR Description: 60S ribosomal protein L6 [Cicer arietinum]
  misc_feature (4)..(61): Homolog of NCBI NO: 18088374 NR Description: Similar to ribosomal protein L6 [Homo sapiens]
  misc_feature (49)..(233): Homolog of NCBI NO: 6012952 NR Description: 60S ribosomal protein L6 (YL 16 like) [Cyanophora
  misc_feature (1)..(233): Homolog of NCBI NO: 7208784 NR Description: 60S ribosomal protein L6 [Cicer arietinum]
  misc_feature (1)..(233): Homolog of NCBI NO: 15221126 NR Description: 60S ribosomal protein L6 (RPL6C) [Arabidopsis
  misc_feature (1)..(233): Homolog of NCBI NO: 15221127 NR Description: 60S ribosomal protein L6 (RPL6B) [Arabidopsis
  misc_feature (1)..(233): Homolog of NCBI NO: 15221798 NR Description: 60S ribosomal protein L6 (RPL6A) [Arabidopsis
  misc_feature (1)..(233): Homolog of NCBI NO: 21593910 NR Description: 60S ribosomal protein L6, putative [Arabidopsis
  misc_feature (3)..(233): Homolog of NCBI NO: 464621 NR Description: 60S RIBOSOMAL PROTEIN L6 (YL16-LIKE)
  misc_feature (16)..(233): Homolog of NCBI NO: 38344818 NR Description: OSJNBb0022F23.11 [Oryza sativa (japonica
  misc_feature (58)..(233): Homolog of NCBI NO: 18088374 NR Description: Similar to ribosomal protein L6 [Homo sapiens]
  misc_feature (3)..(233): Homolog of NCBI NO: 464621 NR Description: 60S RIBOSOMAL PROTEIN L6 (YL16-LIKE)
  misc_feature (1)..(233): Homolog of NCBI NO: 21593910 NR Description: 60S ribosomal protein L6, putative [Arabidopsis
  misc_feature (1)..(233): Homolog of NCBI NO: 15221798 NR Description: 60S ribosomal protein L6 (RPL6A) [Arabidopsis
  misc_feature (1)..(233): Homolog of NCBI NO: 15221127 NR Description: 60S ribosomal protein L6 (RPL6B) [Arabidopsis
  misc_feature (1)..(233): Homolog of NCBI NO: 15221126 NR Description: 60S ribosomal protein L6 (RPL6C) [Arabidopsis
MPAKQRTPKVNRNPDLIRGVGKYSRSQMYHKRGLWAIKAKNGGVFPRHDAKSKVDAPVEKPPKFYPAEDVKKPLPNRRTAKPTKLRASITPGTVLIILAGRFKGKRVVFLKQLASGLLLVTGPFKINGVPLRRVNQAYVIGTSTKVDISGVTLDKFDDKYFGKVAEKKKKKTEGEFFEAEKEEKKEIPQVKKDDQKAVDAALIKAIEAVPELKTYLGARFSLKQGMKPHELVF

SEQ ID NO: 22784 - protein, 206 aa, Arabidopsis thaliana
  peptide (1)..(206): Ceres Seq. ID no. 13509138
  misc_feature (99)..(206): Pfam Name: Ribosomal protein L6e Pfam Description: Ribosomal protein L6e
  misc_feature (99)..(206): Pfam Name: Ribosomal protein L6e Pfam Description: Ribosomal protein L6e
  misc_feature (1)..(34): Homolog of NCBI NO: 18088374 NR Description: Similar to ribosomal protein L6 [Homo sapiens]
  misc_feature (31)..(206): Homolog of NCBI NO: 18088374 NR Description: Similar to ribosomal protein L6 [Homo sapiens]
  misc_feature (22)..(206): Homolog of NCBI NO: 6012952 NR Description: 60S ribosomal protein L6 (YL 16 like) [Cyanophora
  misc_feature (1)..(206): Homolog of NCBI NO: 38344818 NR Description: OSJNBb0022F23.11 [Oryza sativa (japonica
  misc_feature (1)..(206): Homolog of NCBI NO: 7208784 NR Description: 60S ribosomal protein L6 [Cicer arietinum]
  misc_feature (1)..(34): Homolog of NCBI NO: 18088374 NR Description: Similar to ribosomal protein L6 [Homo sapiens]
  misc_feature (22)..(206): Homolog of NCBI NO: 6012952 NR Description: 60S ribosomal protein L6 (YL 16 like) [Cyanophora
  misc_feature (1)..(206): Homolog of NCBI NO: 7208784 NR Description: 60S ribosomal protein L6 [Cicer arietinum]
  misc_feature (1)..(206): Homolog of NCBI NO: 15221126 NR Description: 60S ribosomal protein L6 (RPL6C) [Arabidopsis
  misc_feature (1)..(206): Homolog of NCBI NO: 15221127 NR Description: 60S ribosomal protein L6 (RPL6B) [Arabidopsis
  misc_feature (1)..(206): Homolog of NCBI NO: 15221798 NR Description: 60S ribosomal protein L6 (RPL6A) [Arabidopsis
  misc_feature (1)..(206): Homolog of NCBI NO: 21593910 NR Description: 60S ribosomal protein L6, putative [Arabidopsis
  misc_feature (1)..(206): Homolog of NCBI NO: 464621 NR Description: 60S RIBOSOMAL PROTEIN L6 (YL16-LIKE)
  misc_feature (1)..(206): Homolog of NCBI NO: 38344818 NR Description: OSJNBb0022F23.11 [Oryza sativa (japonica
  misc_feature (31)..(206): Homolog of NCBI NO: 18088374 NR Description: Similar to ribosomal protein L6 [Homo sapiens]
  misc_feature (1)..(206): Homolog of NCBI NO: 464621 NR Description: 60S RIBOSOMAL PROTEIN L6 (YL16-LIKE)
  misc_feature (1)..(206): Homolog of NCBI NO: 21593910 NR Description: 60S ribosomal protein L6, putative [Arabidopsis
  misc_feature (1)..(206): Homolog of NCBI NO: 15221798 NR Description: 60S ribosomal protein L6 (RPL6A) [Arabidopsis
  misc_feature (1)..(206): Homolog of NCBI NO: 15221127 NR Description: 60S ribosomal protein L6 (RPL6B) [Arabidopsis
  misc_feature (1)..(206): Homolog of NCBI NO: 15221126 NR Description: 60S ribosomal protein L6 (RPL6C) [Arabidopsis
MYHKRGLWAIKAKNGGVFPRHDAKSKVDAPVEKPPKFYPAEDVKKPLPNRRTAKPTKLRASITPGTVLIILAGRFKGKRVVFLKQLASGLLLVTGPFKINGVPLRRVNQAYVIGTSTKVDISGVTLDKFDDKYFGKVAEKKKKKTEGEFFEAEKEEKKEIPQVKKDDQKAVDAALIKAIEAVPELKTYLGARFSLKQGMKPHELVF

SEQ ID NO: 22785 - DNA, 1630 bp, Arabidopsis thaliana
  misc_feature (1)..(1630): Ceres Seq. ID no. 13491379
  misc_feature: MA Experiment ID: 108434 Result: Down-regulated in Transcription
  misc_feature: MA Experiment 108434 PARAMETER Experiment Name: At_Root_Tips_cDNA_P Parameter: Tissue Value: Root Tips
  misc_feature: MA Experiment ID: 108435 Result: Down-regulated in Transcription
  misc_feature: MA Experiment 108435 PARAMETER Experiment Name: At_stm_Mutants_cDNA_P Parameter: Plant Line Value: wt Landsburg vs stm
  misc_feature: MA Experiment 108435 PARAMETER Experiment Name: At_stm_Mutants_cDNA_P Parameter: Tissue Value: Shoot Apical Meristem Region
  misc_feature: MA Experiment ID: 108462 Result: Up-regulated in Transcription
  misc_feature: MA Experiment 108462 PARAMETER Experiment Name: At_Germinating_Seeds_cDNA_P Parameter: Age (day) Value: 2 vs. 0
  misc_feature: MA Experiment 108462 PARAMETER Experiment Name: At_Germinating_Seeds_cDNA_P Parameter: Tissue Value: Germinating Seeds
  misc_feature: MA Experiment ID: 108463 Result: Up-regulated in Transcription
  misc_feature: MA Experiment 108463 PARAMETER Experiment Name: At_Germinating_Seeds_cDNA_P Parameter: Age (day) Value: 3 vs. 0
  misc_feature: MA Experiment 108463 PARAMETER Experiment Name: At_Germinating_Seeds_cDNA_P Parameter: Tissue Value: Germinating Seeds
  misc_feature: MA Experiment ID: 108464 Result: Up-regulated in Transcription
  misc_feature: MA Experiment 108464 PARAMETER Experiment Name: At_Germinating_Seeds_cDNA_P Parameter: Age (day) Value: 4 vs. 0
  misc_feature: MA Experiment 108464 PARAMETER Experiment Name: At_Germinating_Seeds_cDNA_P Parameter: Tissue Value: Germinating Seeds
  misc_feature: MA Experiment ID: 108572 Result: Up-regulated in Transcription
  misc_feature: MA Experiment 108572 PARAMETER Experiment Name: At_Drought_cDNA_P Parameter: Timepoint (hr) Value: 1
  misc_feature: MA Experiment 108572 PARAMETER Experiment Name: At_Drought_cDNA_P Parameter: Tissue Value: Aerial
  misc_feature: MA Experiment 108572 PARAMETER Experiment Name: At_Drought_cDNA_P Parameter: Treatment Value: Drought vs. No Drought
  misc_feature: MA Experiment ID: 108573 Result: Up-regulated in Transcription
  misc_feature: MA Experiment 108573 PARAMETER Experiment Name: At_Drought_cDNA_P Parameter: Timepoint (hr) Value: 6
  misc_feature: MA Experiment 108573 PARAMETER Experiment Name: At_Drought_cDNA_P Parameter: Tissue Value: Aerial
  misc_feature: MA Experiment 108573 PARAMETER Experiment Name: At_Drought_cDNA_P Parameter: Treatment Value: Drought vs. No Drought
  misc_feature: MA Experiment ID: 108577 Result: Down-regulated in Transcription
  misc_feature: MA Experiment 108577 PARAMETER Experiment Name: At_42deg_Heat_cDNA_P Parameter: Temperature (deg C) Value: 42 vs. 22
  misc_feature: MA Experiment 108577 PARAMETER Experiment Name: At_42deg_Heat_cDNA_P Parameter: Timepoint (hr) Value: 6
  misc_feature: MA Experiment 108577 PARAMETER Experiment Name: At_42deg_Heat_cDNA_P Parameter: Tissue Value: Aerial
  misc_feature: MA Experiment ID: 108579 Result: Down-regulated in Transcription
  misc_feature: MA Experiment 108579 PARAMETER Experiment Name: At_4deg_Cold_cDNA_P Parameter: Temperature (deg C) Value: 4 vs. 22
  misc_feature: MA Experiment 108579 PARAMETER Experiment Name: At_4deg_Cold_cDNA_P Parameter: Timepoint (hr) Value: 6
  misc_feature: MA Experiment 108579 PARAMETER Experiment Name: At_4deg_Cold_cDNA_P Parameter: Tissue Value: Aerial
  misc_feature: MA Experiment ID: 108595 Result: Down-regulated in Transcription
  misc_feature: MA Experiment 108595 PARAMETER Experiment Name: At_Ler-pi_Ovule_cDNA_P Parameter: Plant Line Value: null
  misc_feature: MA Experiment ID: 20000069 Result: Up-regulated in Transcription
  misc_feature: MA Experiment 20000069 PARAMETER Experiment Name: At_100uM_ABA_Mutants_cDNA_P Parameter: Plant Line Value: CS23
  misc_feature: MA Experiment 20000069 PARAMETER Experiment Name: At_100uM_ABA_Mutants_cDNA_P Parameter: Timepoint (hr) Value: 6
  misc_feature: MA Experiment 20000069 PARAMETER Experiment Name: At_100uM_ABA_Mutants_cDNA_P Parameter: Tissue Value: Aerial
  misc_feature: MA Experiment 20000069 PARAMETER Experiment Name: At_100uM_ABA_Mutants_cDNA_P Parameter: Treatment Value: 100uM ABA vs. No Treatment
  misc_feature: MA Experiment ID: 20000070 Result: Up-regulated in Transcription
  misc_feature: MA Experiment 20000070 PARAMETER Experiment Name: At_100uM_ABA_Mutants_cDNA_P Parameter: Plant Line Value: CS24
  misc_feature: MA Experiment 20000070 PARAMETER Experiment Name: At_100uM_ABA_Mutants_cDNA_P Parameter: Timepoint (hr) Value: 6
  misc_feature: MA Experiment 20000070 PARAMETER Experiment Name: At_100uM_ABA_Mutants_cDNA_P Parameter: Tissue Value: Aerial
  misc_feature: MA Experiment 20000070 PARAMETER Experiment Name: At_100uM_ABA_Mutants_cDNA_P Parameter: Treatment Value: 100uM ABA vs. No Treatment
  misc_feature: MA Experiment ID: 20000071 Result: Up-regulated in Transcription
  misc_feature: MA Experiment 20000071 PARAMETER Experiment Name: At_100uM_ABA_Mutants_cDNA_P Parameter: Plant Line Value: CS8104
  misc_feature: MA Experiment 20000071 PARAMETER Experiment Name: At_100uM_ABA_Mutants_cDNA_P Parameter: Timepoint (hr) Value: 6
  misc_feature: MA Experiment 20000071 PARAMETER Experiment Name: At_100uM_ABA_Mutants_cDNA_P Parameter: Tissue Value: Aerial
  misc_feature: MA Experiment 20000071 PARAMETER Experiment Name: At_100uM_ABA_Mutants_cDNA_P Parameter: Treatment Value: 100uM ABA vs. No Treatment
  misc_feature: MA Experiment ID: 20000072 Result: Up-regulated in Transcription
  misc_feature: MA Experiment 20000072 PARAMETER Experiment Name: At_100uM_ABA_Mutants_cDNA_P Parameter: Plant Line Value: CS8105
  misc_feature: MA Experiment 20000072 PARAMETER Experiment Name: At_100uM_ABA_Mutants_cDNA_P Parameter: Timepoint (hr) Value: 6
  misc_feature: MA Experiment 20000072 PARAMETER Experiment Name: At_100uM_ABA_Mutants_cDNA_P Parameter: Tissue Value: Aerial
  misc_feature: MA Experiment 20000072 PARAMETER Experiment Name: At_100uM_ABA_Mutants_cDNA_P Parameter: Treatment Value: 100uM ABA vs. No Treatment
  misc_feature: MA Experiment ID: 20000087 Result: Up-regulated in Transcription
  misc_feature: MA Experiment 20000087 PARAMETER Experiment Name: At_100uM_ABA_Mutants_cDNA_P Parameter: Plant Line Value: WS
  misc_feature: MA Experiment 20000087 PARAMETER Experiment Name: At_100uM_ABA_Mutants_cDNA_P Parameter: Timepoint (hr) Value: 6
  misc_feature: MA Experiment 20000087 PARAMETER Experiment Name: At_100uM_ABA_Mutants_cDNA_P Parameter: Tissue Value: Aerial
  misc_feature: MA Experiment 20000087 PARAMETER Experiment Name: At_100uM_ABA_Mutants_cDNA_P Parameter: Treatment Value: 100uM ABA vs. No Treatment
  misc_feature: MA Experiment ID: 20000088 Result: Up-regulated in Transcription
  misc_feature: MA Experiment 20000088 PARAMETER Experiment Name: At_100uM_ABA_Mutants_cDNA_P Parameter: Plant Line Value: Landsberg
  misc_feature: MA Experiment 20000088 PARAMETER Experiment Name: At_100uM_ABA_Mutants_cDNA_P Parameter: Timepoint (hr) Value: 6
  misc_feature: MA Experiment 20000088 PARAMETER Experiment Name: At_100uM_ABA_Mutants_cDNA_P Parameter: Tissue Value: Aerial
  misc_feature: MA Experiment 20000088 PARAMETER Experiment Name: At_100uM_ABA_Mutants_cDNA_P Parameter: Treatment Value: 100uM ABA vs. No Treatment
  misc_feature: MA Experiment ID: 20000089 Result: Up-regulated in Transcription
  misc_feature: MA Experiment ID: 20000090 Result: Up-regulated in Transcription
  misc_feature: MA Experiment ID: 20000117 Result: Up-regulated in Transcription
  misc_feature: MA Experiment 20000117 PARAMETER Experiment Name: At_100uM_ABA_Mutants_cDNA_P Parameter: Plant Line Value: Columbia
  misc_feature: MA Experiment 20000117 PARAMETER Experiment Name: At_100uM_ABA_Mutants_cDNA_P Parameter: Timepoint (hr) Value: 6
  misc_feature: MA Experiment 20000117 PARAMETER Experiment Name: At_100uM_ABA_Mutants_cDNA_P Parameter: Tissue Value: Aerial
  misc_feature: MA Experiment 20000117 PARAMETER Experiment Name: At_100uM_ABA_Mutants_cDNA_P Parameter: Treatment Value: 100uM ABA vs. No Treatment
  misc_feature: MA Experiment ID: 20000227 Result: Down-regulated in Transcription
  misc_feature: MA Experiment 20000227 PARAMETER Experiment Name: At_Root-Tips-vs-Tops_P Parameter: Tissue Value: Root Tips vs. Root Tops
  misc_feature: MA Experiment ID: 20000234 Result: Down-regulated in Transcription
  misc_feature: MA Experiment 20000234 PARAMETER Experiment Name: At_Siliques_P Parameter: Age (day) Value: 21
  misc_feature: MA Experiment 20000234 PARAMETER Experiment Name: At_Siliques_P Parameter: Organism Value: A. thaliana
  misc_feature: MA Experiment 20000234 PARAMETER Experiment Name: At_Siliques_P Parameter: Plant Line Value: WS
  misc_feature: MA Experiment 20000234 PARAMETER Experiment Name: At_Siliques_P Parameter: Tissue Value: Less Than 5mm Siliques vs. Whole Plant
  misc_feature: MA Experiment ID: 20000235 Result: Down-regulated in Transcription
  misc_feature: MA Experiment 20000235 PARAMETER Experiment Name: At_Siliques_P Parameter: Age (day) Value: 21
  misc_feature: MA Experiment 20000235 PARAMETER Experiment Name: At_Siliques_P Parameter: Organism Value: A. thaliana
  misc_feature: MA Experiment 20000235 PARAMETER Experiment Name: At_Siliques_P Parameter: Plant Line Value: WS
  misc_feature: MA Experiment 20000235 PARAMETER Experiment Name: At_Siliques_P Parameter: Tissue Value: 5-10mm Siliques vs. Whole Plant
  misc_feature: MA Experiment ID: 20000264 Result: Down-regulated in Transcription
  misc_feature: MA Experiment 20000264 PARAMETER Experiment Name: At_Open_Flower_P Parameter: Age (day) Value: 21
  misc_feature: MA Experiment 20000264 PARAMETER Experiment Name: At_Open_Flower_P Parameter: Plant Line Value: WS
  misc_feature: MA Experiment 20000264 PARAMETER Experiment Name: At_Open_Flower_P Parameter: Tissue Value: Open Flower vs. Whole Plant
  misc_feature: MA Experiment ID: 20000265 Result: Down-regulated in Transcription
  misc_feature: MA Experiment 20000265 PARAMETER Experiment Name: At_Open_Flower_P Parameter: Age (day) Value: 21
  misc_feature: MA Experiment 20000265 PARAMETER Experiment Name: At_Open_Flower_P Parameter: Plant Line Value: WS
  misc_feature: MA Experiment 20000265 PARAMETER Experiment Name: At_Open_Flower_P Parameter: Tissue Value: Closed Flower vs. Whole Plant
  misc_feature: MA Experiment ID: 20000286 Result: Down-regulated in Transcription
  misc_feature: MA Experiment 20000286 PARAMETER Experiment Name: At_Open_Flower_P Parameter: Age (day) Value: 21
  misc_feature: MA Experiment 20000286 PARAMETER Experiment Name: At_Open_Flower_P Parameter: Plant Line Value: WS
  misc_feature: MA Experiment 20000286 PARAMETER Experiment Name: At_Open_Flower_P Parameter: Tissue Value: Half Open vs. Whole Plant
  misc_feature: MA Experiment ID: 20000437 Result: Up-regulated in Transcription
  misc_feature: MA Experiment 20000437 PARAMETER Experiment Name: At_Drought_P Parameter: Age (day) Value: 8
  misc_feature: MA Experiment 20000437 PARAMETER Experiment Name: At_Drought_P Parameter: Organism Value: A. thaliana
  misc_feature: MA Experiment 20000437 PARAMETER Experiment Name: At_Drought_P Parameter: Plant Line Value: WS
  misc_feature: MA Experiment 20000437 PARAMETER Experiment Name: At_Drought_P Parameter: Timepoint (hr) Value: 24
  misc_feature: MA Experiment 20000437 PARAMETER Experiment Name: At_Drought_P Parameter: Tissue Value: Whole Plant
  misc_feature: MA Experiment 20000437 PARAMETER Experiment Name: At_Drought_P Parameter: Treatment Value: Drought vs. No Drought
  misc_feature: MA Experiment ID: 20001248 Result: Up-regulated in Transcription
  misc_feature: MA Experiment 20001248 PARAMETER Experiment Name: At_Far-red-induction_P Parameter: Age (day) Value: 7
  misc_feature: MA Experiment 20001248 PARAMETER Experiment Name: At_Far-red-induction_P Parameter: Light Value: Far-red vs. White
  misc_feature: MA Experiment 20001248 PARAMETER Experiment Name: At_Far-red-induction_P Parameter: Organism Value: A. thaliana
  misc_feature: MA Experiment 20001248 PARAMETER Experiment Name: At_Far-red-induction_P Parameter: Plant Line Value: Columbia
  misc_feature: MA Experiment 20001248 PARAMETER Experiment Name: At_Far-red-induction_P Parameter: Timepoint (hr) Value: 4
  misc_feature: MA Experiment 20001248 PARAMETER Experiment Name: At_Far-red-induction_P Parameter: Tissue Value: Whole Plant
  misc_feature: MA Experiment ID: 20001450 Result: Up-regulated in Transcription
  misc_feature: MA Experiment 20001450 PARAMETER Experiment Name: At_Far-red-induction_P Parameter: Age (day) Value: 7
  misc_feature: MA Experiment 20001450 PARAMETER Experiment Name: At_Far-red-induction_P Parameter: Light Value: Far-red vs. White
  misc_feature: MA Experiment 20001450 PARAMETER Experiment Name: At_Far-red-induction_P Parameter: Organism Value: A. thaliana
  misc_feature: MA Experiment 20001450 PARAMETER Experiment Name: At_Far-red-induction_P Parameter: Plant Line Value: Columbia
  misc_feature: MA Experiment 20001450 PARAMETER Experiment Name: At_Far-red-induction_P Parameter: Timepoint (hr) Value: 8
  misc_feature: MA Experiment 20001450 PARAMETER Experiment Name: At_Far-red-induction_P Parameter: Tissue Value: Whole Plant
  misc_feature: MA Experiment ID: 20001451 Result: Up-regulated in Transcription
  misc_feature: MA Experiment 20001451 PARAMETER Experiment Name: At_Far-red-induction_P Parameter: Age (day) Value: 7
  misc_feature: MA Experiment 20001451 PARAMETER Experiment Name: At_Far-red-induction_P Parameter: Light Value: Far-red vs. White
  misc_feature: MA Experiment 20001451 PARAMETER Experiment Name: At_Far-red-induction_P Parameter: Organism Value: A. thaliana
  misc_feature: MA Experiment 20001451 PARAMETER Experiment Name: At_Far-red-induction_P Parameter: Plant Line Value: Columbia
  misc_feature: MA Experiment 20001451 PARAMETER Experiment Name: At_Far-red-induction_P Parameter: Timepoint (hr) Value: 24
  misc_feature: MA Experiment 20001451 PARAMETER Experiment Name: At_Far-red-induction_P Parameter: Tissue Value: Whole Plant
  misc_feature: MA Experiment ID: 20001557 Result: Down-regulated in Transcription
  misc_feature: MA Experiment 20001557 PARAMETER Experiment Name: At_Drought_Soil_Dry_P Parameter: Age (day) Value: 27
  misc_feature: MA Experiment 20001557 PARAMETER Experiment Name: At_Drought_Soil_Dry_P Parameter: Organism Value: A. thaliana
  misc_feature: MA Experiment 20001557 PARAMETER Experiment Name: At_Drought_Soil_Dry_P Parameter: Plant Line Value: WS
  misc_feature: MA Experiment 20001557 PARAMETER Experiment Name: At_Drought_Soil_Dry_P Parameter: Post Timepoint (hr) Value: 3
  misc_feature: MA Experiment 20001557 PARAMETER Experiment Name: At_Drought_Soil_Dry_P Parameter: Post-Treatment Value: Re-Water vs. No Drought
  misc_feature: MA Experiment 20001557 PARAMETER Experiment Name: At_Drought_Soil_Dry_P Parameter: Timepoint (day) Value: 13
  misc_feature: MA Experiment 20001557 PARAMETER Experiment Name: At_Drought_Soil_Dry_P Parameter: Treatment Value: Drought vs. No Drought
  misc_feature: MA Experiment ID: 20001558 Result: Down-regulated in Transcription
  misc_feature: MA Experiment 20001558 PARAMETER Experiment Name: At_Drought_Soil_Dry_P Parameter: Age (day) Value: 27
  misc_feature: MA Experiment 20001558 PARAMETER Experiment Name: At_Drought_Soil_Dry_P Parameter: Organism Value: A. thaliana
  misc_feature: MA Experiment 20001558 PARAMETER Experiment Name: At_Drought_Soil_Dry_P Parameter: Plant Line Value: WS
  misc_feature: MA Experiment 20001558 PARAMETER Experiment Name: At_Drought_Soil_Dry_P Parameter: Post Timepoint (hr) Value: 6
  misc_feature: MA Experiment 20001558 PARAMETER Experiment Name: At_Drought_Soil_Dry_P Parameter: Post-Treatment Value: Re-Water vs. No Drought
  misc_feature: MA Experiment 20001558 PARAMETER Experiment Name: At_Drought_Soil_Dry_P Parameter: Timepoint (day) Value: 13
  misc_feature: MA Experiment 20001558 PARAMETER Experiment Name: At_Drought_Soil_Dry_P Parameter: Treatment Value: Drought vs. No Drought
  misc_feature: MA Experiment ID: 20001560 Result: Down-regulated in Transcription
  misc_feature: MA Experiment 20001560 PARAMETER Experiment Name: At_Drought_Soil_Dry_P Parameter: Age (day) Value: 28
  misc_feature: MA Experiment 20001560 PARAMETER Experiment Name: At_Drought_Soil_Dry_P Parameter: Organism Value: A. thaliana
  misc_feature: MA Experiment 20001560 PARAMETER Experiment Name: At_Drought_Soil_Dry_P Parameter: Plant Line Value: WS
  misc_feature: MA Experiment 20001560 PARAMETER Experiment Name: At_Drought_Soil_Dry_P Parameter: Post Timepoint (hr) Value: None
  misc_feature: MA Experiment 20001560 PARAMETER Experiment Name: At_Drought_Soil_Dry_P Parameter: Post-Treatment Value: None
  misc_feature: MA Experiment 20001560 PARAMETER Experiment Name: At_Drought_Soil_Dry_P Parameter: Timepoint (day) Value: 14
  misc_feature: MA Experiment 20001560 PARAMETER Experiment Name: At_Drought_Soil_Dry_P Parameter: Treatment Value: Drought vs. No Drought
aatgaaatcgaatcaaaaaaaacaaaaatccccaaattaccaaaatcctcggcgacaaagaggagagatagagagagagaaagaggcgaaaataatggcgtcgatccctccgccggagcttgacaacgactcactggcgtcatcgccgagatcggagtacgatagtcagccacgcgtacggttcatgtgtacttttggaggaaggatcttgccacgtccgccggataatcagctctgttacgtcggcggcgataatcgcatggtcgctgttcatcgtcacactactttcgcctctctccttagtaaacttgctaaactctccggtaaaagcaacataagcgtgaagtaccagctaccaaacgaagatcttgacgcgttgatttccgtatcaacggacgaagatgtagagaacatgatggacgaatacgaccgcgtcgcacagaatcaaaacccacgcgcctctcgtcttcgtctttttctcttcaccaaaaacgtcgccggagaagaagataacgatagtcgagctagcagtatcagctctctcctcgatagctctgttaatcgggagcaatggttcctcgacgctcttaacctcggttcttccgccgccgcaaccgcggtatctaacggtgggtccggtagagtctttgagcgagttagatctgaagtctcgtcgattgtttctgaagttcctgattatctctttggattggataatttcgatgaaactgctccgccgcatgagcttcgtgatcgtgatccgagagctaagatccaacgagaagtctcgacgctttcggatcctggttcgcctcgtcgcgatgttccttcgccgtatggttcgacgtcttcggctcctgtgatgcgaatatctacaccggaacttccaccaccagtttttattaaaccggaaagtccagaaccggtttcgactccgaaatccaatcctcaaccggaacaagtaatgcaacagagtaatctcccggttaactcgcaatggcaatatgcccctggcccaggccaacaggttcattaccagggtcataccattcaccaatcaccggtttattacgttcctggttcggttccgggtaatcatatggtccagcaaggaaatcatatggttcaaccgggtaatcatatggtacaaccggttcaaatgccgggtcagtatcttcaacaataccatcatgtaccaatgggataccaccaacctcagactcatcagatggctggtccgggtcaagtatatggtggaacggttaggccggttatgatggcagttgatggaatgaaccggacgggttattatggaatgaaaacacccggtccggttcaaatgtatcagcatcacactggtatggttgttcctggtgtagaagaacaacaacaatacagaaccgaaacggattcggatacgggtcgggcttcttagctgtttgaagaagaaatatgaaaaattatcacatccggggttttcgtcttttcattggagtcgttcttattcgttactgtgtgaactgtgtattattttttgttttacttttgtaaaatttatttttgtgtgtaataattttgtattacaaaatataatgaacagtaaaacccaataataataacattataatct

SEQ ID NO: 22786 - protein, 477 aa, Arabidopsis thaliana
  peptide (1)..(477): Ceres Seq. ID no. 13491380
  misc_feature (73)..(163): Pfam Name: PB1 domain Pfam Description: PB1 domain
  misc_feature (51)..(232): Homolog of NCBI NO: 28393406 NR Description: unknown protein [Arabidopsis thaliana]
  misc_feature (51)..(232): Homolog of NCBI NO: 15240580 NR Description: octicosapeptide/Phox/Bem1p (PB1)
  misc_feature (34)..(423): Homolog of NCBI NO: 15232679 NR Description: protein kinase family [Arabidopsis thaliana]
  misc_feature (58)..(297): Homolog of NCBI NO: 15229599 NR Description: octicosapeptide/Phox/Bem1p (PB1)
  misc_feature (58)..(311): Homolog of NCBI NO: 21553908 NR Description: unknown [Arabidopsis thaliana]
  misc_feature (58)..(311): Homolog of NCBI NO: 18379168 NR Description: octicosapeptide/Phox/Bem1p (PB1)
  misc_feature (62)..(381): Homolog of NCBI NO: 25410886 NR Description: hypothetical protein At2g01190 [imported] -
  misc_feature (58)..(310): Homolog of NCBI NO: 34895646 NR Description: P0480E02.2 [Oryza sativa (japonica
  misc_feature (32)..(477): Homolog of NCBI NO: 25407315 NR Description: hypothetical protein AT4g05150 [imported] -
  misc_feature (1)..(477): Homolog of NCBI NO: 18412822 NR Description: octicosapeptide/Phox/Bem1p (PB1)
MKSNQKKQKSPNYQNPRRQRGEIEREKEAKIMASIPPPELDNDSLASSPRSEYDSQPRVRFMCTFGGRILPRPPDNQLCYVGGDNRMVAVHRHTTFASLLSKLAKLSGKSNISVKYQLPNEDLDALISVSTDEDVENMMDEYDRVAQNQNPRASRLRLFLFTKNVAGEEDNDSRASSISSLLDSSVNREQWFLDALNLGSSAAATAVSNGGSGRVFERVRSEVSSIVSEVPDYLFGLDNFDETAPPHELRDRDPRAKIQREVSTLSDPGSPRRDVPSPYGSTSSAPVMRISTPELPPPVFIKPESPEPVSTPKSNPQPEQVMQQSNLPVNSQWQYAPGPGQQVHYQGHTIHQSPVYYVPGSVPGNHMVQQGNHMVQPGNHMVQPVQMPGQYLQQYHHVPMGYHQPQTHQMAGPGQVYGGTVRPVMMAVDGMNRTGYYGMKTPGPVQMYQHHTGMVVPGVEEQQQYRTETDSDTGRAS

SEQ ID NO: 22787 - protein, 446 aa, Arabidopsis thaliana
  peptide (1)..(446): Ceres Seq. ID no. 13491381
  misc_feature (42)..(132): Pfam Name: PB1 domain Pfam Description: PB1 domain
  misc_feature (27)..(279): Homolog of NCBI NO: 34895646 NR Description: P0480E02.2 [Oryza sativa (japonica
  misc_feature (1)..(446): Homolog of NCBI NO: 25407315 NR Description: hypothetical protein AT4g05150 [imported] -
  misc_feature (20)..(201): Homolog of NCBI NO: 15240580 NR Description: octicosapeptide/Phox/Bem1p (PB1)
  misc_feature (27)..(266): Homolog of NCBI NO: 15229599 NR Description: octicosapeptide/Phox/Bem1p (PB1)
  misc_feature (27)..(280): Homolog of NCBI NO: 18379168 NR Description: octicosapeptide/Phox/Bem1p (PB1)
  misc_feature (31)..(350): Homolog of NCBI NO: 25410886 NR Description: hypothetical protein At2g01190 [imported] -
  misc_feature (27)..(280): Homolog of NCBI NO: 21553908 NR Description: unknown [Arabidopsis thaliana]
  misc_feature (3)..(392): Homolog of NCBI NO: 15232679 NR Description: protein kinase family [Arabidopsis thaliana]
  misc_feature (20)..(201): Homolog of NCBI NO: 28393406 NR Description: unknown protein [Arabidopsis thaliana]
  misc_feature (1)..(446): Homolog of NCBI NO: 18412822 NR Description: octicosapeptide/Phox/Bem1p (PB1)
MASIPPPELDNDSLASSPRSEYDSQPRVRFMCTFGGRILPRPPDNQLCYVGGDNRMVAVHRHTTFASLLSKLAKLSGKSNISVKYQLPNEDLDALISVSTDEDVENMMDEYDRVAQNQNPRASRLRLFLFTKNVAGEEDNDSRASSISSLLDSSVNREQWFLDALNLGSSAAATAVSNGGSGRVFERVRSEVSSIVSEVPDYLFGLDNFDETAPPHELRDRDPRAKIQREVSTLSDPGSPRRDVPSPYGSTSSAPVMRISTPELPPPVFIKPESPEPVSTPKSNPQPEQVMQQSNLPVNSQWQYAPGPGQQVHYQGHTIHQSPVYYVPGSVPGNHMVQQGNHMVQPGNHMVQPVQMPGQYLQQYHHVPMGYHQPQTHQMAGPGQVYGGTVRPVMMAVDGMNRTGYYGMKTPGPVQMYQHHTGMVVPGVEEQQQYRTETDSDTGRAS

SEQ ID NO: 22788 - protein, 416 aa, Arabidopsis thaliana
  peptide (1)..(416): Ceres Seq. ID no. 13491382
  misc_feature (12)..(102): Pfam Name: PB1 domain Pfam Description: PB1 domain
  misc_feature (1)..(171): Homolog of NCBI NO: 28393406 NR Description: unknown protein [Arabidopsis thaliana]
  misc_feature (1)..(171): Homolog of NCBI NO: 15240580 NR Description: octicosapeptide/Phox/Bem1p (PB1)
  misc_feature (1)..(362): Homolog of NCBI NO: 15232679 NR Description: protein kinase family [Arabidopsis thaliana]
  misc_feature (1)..(236): Homolog of NCBI NO: 15229599 NR Description: octicosapeptide/Phox/Bem1p (PB1)
  misc_feature (1)..(250): Homolog of NCBI NO: 21553908 NR Description: unknown [Arabidopsis thaliana]
  misc_feature (1)..(250): Homolog of NCBI NO: 18379168 NR Description: octicosapeptide/Phox/Bem1p (PB1)
  misc_feature (1)..(320): Homolog of NCBI NO: 25410886 NR Description: hypothetical protein At2g01190 [imported] -
  misc_feature (1)..(249): Homolog of NCBI NO: 34895646 NR Description: P0480E02.2 [Oryza sativa (japonica
  misc_feature (1)..(416): Homolog of NCBI NO: 25407315 NR Description: hypothetical protein AT4g05150 [imported] -
  misc_feature (1)..(416): Homolog of NCBI NO: 18412822 NR Description: octicosapeptide/Phox/Bem1p (PB1)
MCTFGGRILPRPPDNQLCYVGGDNRMVAVHRHTTFASLLSKLAKLSGKSNISVKYQLPNEDLDALISVSTDEDVENMMDEYDRVAQNQNPRASRLRLFLFTKNVAGEEDNDSRASSISSLLDSSVNREQWFLDALNLGSSAAATAVSNGGSGRVFERVRSEVSSIVSEVPDYLFGLDNFDETAPPHELRDRDPRAKIQREVSTLSDPGSPRRDVPSPYGSTSSAPVMRISTPELPPPVFIKPESPEPVSTPKSNPQPEQVMQQSNLPVNSQWQYAPGPGQQVHYQGHTIHQSPVYYVPGSVPGNHMVQQGNHMVQPGNHMVQPVQMPGQYLQQYHHVPMGYHQPQTHQMAGPGQVYGGTVRPVMMAVDGMNRTGYYGMKTPGPVQMYQHHTGMVVPGVEEQQQYRTETDSDTGRAS

SEQ ID NO: 22789 - DNA, 976 bp, Arabidopsis thaliana
  misc_feature (1)..(976): Ceres Seq. ID no. 13490663
  misc_feature: MA Experiment ID: 108461 Result: Up-regulated in Transcription
  misc_feature: MA Experiment 108461 PARAMETER Experiment Name: At_Germinating_Seeds_cDNA_P Parameter: Age (day) Value: 1 vs. 0
  misc_feature: MA Experiment 108461 PARAMETER Experiment Name: At_Germinating_Seeds_cDNA_P Parameter: Tissue Value: Germinating Seeds
  misc_feature: MA Experiment ID: 108462 Result: Up-regulated in Transcription
  misc_feature: MA Experiment 108462 PARAMETER Experiment Name: At_Germinating_Seeds_cDNA_P Parameter: Age (day) Value: 2 vs. 0
  misc_feature: MA Experiment 108462 PARAMETER Experiment Name: At_Germinating_Seeds_cDNA_P Parameter: Tissue Value: Germinating Seeds
  misc_feature: MA Experiment ID: 108463 Result: Up-regulated in Transcription
  misc_feature: MA Experiment 108463 PARAMETER Experiment Name: At_Germinating_Seeds_cDNA_P Parameter: Age (day) Value: 3 vs. 0
  misc_feature: MA Experiment 108463 PARAMETER Experiment Name: At_Germinating_Seeds_cDNA_P Parameter: Tissue Value: Germinating Seeds
  misc_feature: MA Experiment ID: 108561 Result: Down-regulated in Transcription
  misc_feature: MA Experiment 108561 PARAMETER Experiment Name: At_100uM_ABA_cDNA_P Parameter: Timepoint (hr) Value: 6
  misc_feature: MA Experiment 108561 PARAMETER Experiment Name: At_100uM_ABA_cDNA_P Parameter: Tissue Value: Aerial
  misc_feature: MA Experiment 108561 PARAMETER Experiment Name: At_100uM_ABA_cDNA_P Parameter: Treatment Value: 100uM ABA vs. No Treatment
  misc_feature: MA Experiment ID: 20000307 Result: Up-regulated in Transcription
  misc_feature: MA Experiment 20000307 PARAMETER Experiment Name: At_Germinating_Seeds_Sub_P Parameter: Age (hr) Value: 24 vs. 0
  misc_feature: MA Experiment 20000307 PARAMETER Experiment Name: At_Germinating_Seeds_Sub_P Parameter: Organism Value: A. thaliana
  misc_feature: MA Experiment 20000307 PARAMETER Experiment Name: At_Germinating_Seeds_Sub_P Parameter: Plant Line Value: WS
  misc_feature: MA Experiment 20000307 PARAMETER Experiment Name: At_Germinating_Seeds_Sub_P Parameter: Tissue Value: Germinating Seeds
  misc_feature: MA Experiment ID: 20000315 Result: Down-regulated in Transcription
  misc_feature: MA Experiment 20000315 PARAMETER Experiment Name: At_14day_Shoots-Roots_Sub_P Parameter: Age (day) Value: 14
  misc_feature: MA Experiment 20000315 PARAMETER Experiment Name: At_14day_Shoots-Roots_Sub_P Parameter: Organism Value: A. thaliana
  misc_feature: MA Experiment 20000315 PARAMETER Experiment Name: At_14day_Shoots-Roots_Sub_P Parameter: Plant Line Value: WS
  misc_feature: MA Experiment 20000315 PARAMETER Experiment Name: At_14day_Shoots-Roots_Sub_P Parameter: Tissue Value: Shoots vs. Whole Plant
  misc_feature: MA Experiment ID: 20000327 Result: Down-regulated in Transcription
  misc_feature: MA Experiment 20000327 PARAMETER Experiment Name: At_42deg_Heat_Sub_P Parameter: Age (day) Value: 14
  misc_feature: MA Experiment 20000327 PARAMETER Experiment Name: At_42deg_Heat_Sub_P Parameter: Organism Value: A. thaliana
  misc_feature: MA Experiment 20000327 PARAMETER Experiment Name: At_42deg_Heat_Sub_P Parameter: Plant Line Value: WS
  misc_feature: MA Experiment 20000327 PARAMETER Experiment Name: At_42deg_Heat_Sub_P Parameter: Temperature (deg C) Value: 42 vs. 22
  misc_feature: MA Experiment 20000327 PARAMETER Experiment Name: At_42deg_Heat_Sub_P Parameter: Timepoint (hr) Value: 1
  misc_feature: MA Experiment 20000327 PARAMETER Experiment Name: At_42deg_Heat_Sub_P Parameter: Tissue Value: Aerial
  misc_feature: MA Experiment ID: 20000328 Result: Down-regulated in Transcription
  misc_feature: MA Experiment 20000328 PARAMETER Experiment Name: At_42deg_Heat_Sub_P Parameter: Age (day) Value: 14
  misc_feature: MA Experiment 20000328 PARAMETER Experiment Name: At_42deg_Heat_Sub_P Parameter: Organism Value: A. thaliana
  misc_feature: MA Experiment 20000328 PARAMETER Experiment Name: At_42deg_Heat_Sub_P Parameter: Plant Line Value: WS
  misc_feature: MA Experiment 20000328 PARAMETER Experiment Name: At_42deg_Heat_Sub_P Parameter: Temperature (deg C) Value: 42 vs. 22
  misc_feature: MA Experiment 20000328 PARAMETER Experiment Name: At_42deg_Heat_Sub_P Parameter: Timepoint (hr) Value: 6
  misc_feature: MA Experiment 20000328 PARAMETER Experiment Name: At_42deg_Heat_Sub_P Parameter: Tissue Value: Aerial
  misc_feature: MA Experiment ID: 20000355 Result: Down-regulated in Transcription
  misc_feature: MA Experiment 20000355 PARAMETER Experiment Name: At_Siliques_Sub_P Parameter: Age (day) Value: 21
  misc_feature: MA Experiment 20000355 PARAMETER Experiment Name: At_Siliques_Sub_P Parameter: Organism Value: A. thaliana
  misc_feature: MA Experiment 20000355 PARAMETER Experiment Name: At_Siliques_Sub_P Parameter: Plant Line Value: WS
  misc_feature: MA Experiment 20000355 PARAMETER Experiment Name: At_Siliques_Sub_P Parameter: Tissue Value: Less Than 5mm Siliques vs. Whole Plant
  misc_feature: MA Experiment ID: 20000440 Result: Down-regulated in Transcription
  misc_feature: MA Experiment 20000440 PARAMETER Experiment Name: At_Closed-Flower__Sub_P Parameter: Tissue Value: Closed Flower vs. Whole Plant
atttttctcttttccctctccttctttcttcctttataaatccatttattctcctctcatctctcagcaaaatcaaatcctcatagttgattctctctatctctctcacgagtcacgatcctactcttcttgatatggctgaggttttgcgtcccgagatgttagatatctctaacgacacttcttcattagcatcaccgaaacttcttcatgttcttgctgttgatgatagtatggttgatcggaagttcatcgagcggttactcagagtctcatcttgtaaagttactgttgtcgatagtgcgacaagagctttacaatatcttggattagatggagagaataatagttcggttggatttgaggatctgaagattaatttgataatgacggattactctatgcctgggatgactggatatgaactactgaagaagatcaaagaatcatcagctttcagagaaataccagttgtgattatgtcttcagagaacatcttgcctcgtatcgatagatgtcttgaagaaggagctgaagatttcttattgaagcctgtgaaattagctgatgtgaagagattaagagattctttaatgaaagctgaggaaagagcttttaagaatattatgcacaagagagagcttgaagctaatgatatctactcgcagctaaaacgcgcaaagatctgagtttatcagattccacgtacgatatgttctttaaaagctcaaagattcacacacatgcatgtcctgattctttcggcttacaatttttgagacattacggcttcttttgctgatagaaccaagactgatcaagagtgacaaagatgggtttttataagatagaaatgtaaattgtagacttggattcattagagaggagaagagatacattttttttttctttacatgagagatatgtaaaatggtggtgtgttattttggaagttaacatatgaatttcttttgtt

SEQ ID NO: 22790 - protein, 184 aa, Arabidopsis thaliana
  peptide (1)..(184): Ceres Seq. ID no. 13490664
  misc_feature (25)..(145): Pfam Name: Response regulator receiver domain Pfam Description: Response regulator receiver domain
  misc_feature (6)..(170): Homolog of NCBI NO: 15218957 NR Description: response regulator 3 [Arabidopsis thaliana]
  misc_feature (12)..(155): Homolog of NCBI NO: 33330864 NR Description: type-A response regulator [Catharanthus roseus]
  misc_feature (1)..(171): Homolog of NCBI NO: 15221927 NR Description: response regulator 7 [Arabidopsis thaliana]
  misc_feature (11)..(177): Homolog of NCBI NO: 15222035 NR Description: response regulator 7 -related [Arabidopsis
  misc_feature (116)..(184): Homolog of NCBI NO: 11358765 NR Description: response regulator 6 [imported] - Arabidopsis
  misc_feature (1)..(103): Homolog of NCBI NO: 11358765 NR Description: response regulator 6 [imported] - Arabidopsis
  misc_feature (1)..(184): Homolog of NCBI NO: 15242000 NR Description: response regulator 6 (ARR6) [Arabidopsis
  misc_feature (1)..(184): Homolog of NCBI NO: 11358906 NR Description: two-component response regulator homolog
  misc_feature (1)..(184): Homolog of NCBI NO: 11358763 NR Description: response regulator 5 [imported] - Arabidopsis
  misc_feature (1)..(184): Homolog of NCBI NO: 15228338 NR Description: response regulator 2 (ATRR2) [Arabidopsis
MAEVLRPEMLDISNDTSSLASPKLLHVLAVDDSMVDRKFIERLLRVSSCKVTVVDSATRALQYLGLDGENNSSVGFEDLKINLIMTDYSMPGMTGYELLKKIKESSAFREIPVVIMSSENILPRIDRCLEEGAEDFLLKPVKLADVKRLRDSLMKAEERAFKNIMHKRELEANDIYSQLKRAKI

SEQ ID NO: 22791 - protein, 176 aa, Arabidopsis thaliana
  peptide (1)..(176): Ceres Seq. ID no. 13490665
  misc_feature (17)..(137): Pfam Name: Response regulator receiver domain Pfam Description: Response regulator receiver domain
  misc_feature (1)..(162): Homolog of NCBI NO: 15218957 NR Description: response regulator 3 [Arabidopsis thaliana]
  misc_feature (4)..(147): Homolog of NCBI NO: 33330864 NR Description: type-A response regulator [Catharanthus roseus]
  misc_feature (1)..(163): Homolog of NCBI NO: 15221927 NR Description: response regulator 7 [Arabidopsis thaliana]
  misc_feature (3)..(169): Homolog of NCBI NO: 15222035 NR Description: response regulator 7 -related [Arabidopsis
  misc_feature (108)..(176): Homolog of NCBI NO: 11358765 NR Description: response regulator 6 [imported] - Arabidopsis
  misc_feature (1)..(95): Homolog of NCBI NO: 11358765 NR Description: response regulator 6 [imported] - Arabidopsis
  misc_feature (1)..(176): Homolog of NCBI NO: 15242000 NR Description: response regulator 6 (ARR6) [Arabidopsis
  misc_feature (1)..(176): Homolog of NCBI NO: 11358906 NR Description: two-component response regulator homolog
  misc_feature (1)..(176): Homolog of NCBI NO: 11358763 NR Description: response regulator 5 [imported] - Arabidopsis
  misc_feature (1)..(176): Homolog of NCBI NO: 15228338 NR Description: response regulator 2 (ATRR2) [Arabidopsis
MLDISNDTSSLASPKLLHVLAVDDSMVDRKFIERLLRVSSCKVTVVDSATRALQYLGLDGENNSSVGFEDLKINLIMTDYSMPGMTGYELLKKIKESSAFREIPVVIMSSENILPRIDRCLEEGAEDFLLKPVKLADVKRLRDSLMKAEERAFKNIMHKRELEANDIYSQLKRAKI

SEQ ID NO: 22792 - protein, 151 aa, Arabidopsis thaliana
  peptide (1)..(151): Ceres Seq. ID no. 13490666
  misc_feature (1)..(112): Pfam Name: Response regulator receiver domain Pfam Description: Response regulator receiver domain
  misc_feature (1)..(137): Homolog of NCBI NO: 15218957 NR Description: response regulator 3 [Arabidopsis thaliana]
  misc_feature (1)..(122): Homolog of NCBI NO: 33330864 NR Description: type-A response regulator [Catharanthus roseus]
  misc_feature (1)..(138): Homolog of NCBI NO: 15221927 NR Description: response regulator 7 [Arabidopsis thaliana]
  misc_feature (1)..(144): Homolog of NCBI NO: 15222035 NR Description: response regulator 7 -related [Arabidopsis
  misc_feature (83)..(151): Homolog of NCBI NO: 11358765 NR Description: response regulator 6 [imported] - Arabidopsis
  misc_feature (1)..(70): Homolog of NCBI NO: 11358765 NR Description: response regulator 6 [imported] - Arabidopsis
  misc_feature (1)..(151): Homolog of NCBI NO: 15242000 NR Description: response regulator 6 (ARR6) [Arabidopsis
  misc_feature (1)..(151): Homolog of NCBI NO: 11358906 NR Description: two-component response regulator homolog
  misc_feature (1)..(151): Homolog of NCBI NO: 11358763 NR Description: response regulator 5 [imported] - Arabidopsis
  misc_feature (1)..(151): Homolog of NCBI NO: 15228338 NR Description: response regulator 2 (ATRR2) [Arabidopsis
MVDRKFIERLLRVSSCKVTVVDSATRALQYLGLDGENNSSVGFEDLKINLIMTDYSMPGMTGYELLKKIKESSAFREIPVVIMSSENILPRIDRCLEEGAEDFLLKPVKLADVKRLRDSLMKAEERAFKNIMHKRELEANDIYSQLKRAKI

SEQ ID NO: 22793 - DNA, 1455 bp, Arabidopsis thaliana
  misc_feature (1)..(1455): Ceres Seq. ID no. 12324438
  misc_feature: MA Experiment ID: 108573 Result: Up-regulated in Transcription
  misc_feature: MA Experiment 108573 PARAMETER Experiment Name: At_Drought_cDNA_P Parameter: Timepoint (hr) Value: 6
  misc_feature: MA Experiment 108573 PARAMETER Experiment Name: At_Drought_cDNA_P Parameter: Tissue Value: Aerial
  misc_feature: MA Experiment 108573 PARAMETER Experiment Name: At_Drought_cDNA_P Parameter: Treatment Value: Drought vs. No Drought
  misc_feature: MA Experiment ID: 20001247 Result: Up-regulated in Transcription
  misc_feature: MA Experiment 20001247 PARAMETER Experiment Name: At_Far-red-induction_P Parameter: Age (day) Value: 7
  misc_feature: MA Experiment 20001247 PARAMETER Experiment Name: At_Far-red-induction_P Parameter: Light Value: Far-red vs. White
  misc_feature: MA Experiment 20001247 PARAMETER Experiment Name: At_Far-red-induction_P Parameter: Organism Value: A. thaliana
  misc_feature: MA Experiment 20001247 PARAMETER Experiment Name: At_Far-red-induction_P Parameter: Plant Line Value: Columbia
  misc_feature: MA Experiment 20001247 PARAMETER Experiment Name: At_Far-red-induction_P Parameter: Timepoint (hr) Value: 1
  misc_feature: MA Experiment 20001247 PARAMETER Experiment Name: At_Far-red-induction_P Parameter: Tissue Value: Whole Plant
  misc_feature: MA Experiment ID: 20001560 Result: Down-regulated in Transcription
  misc_feature: MA Experiment 20001560 PARAMETER Experiment Name: At_Drought_Soil_Dry_P Parameter: Age (day) Value: 28
  misc_feature: MA Experiment 20001560 PARAMETER Experiment Name: At_Drought_Soil_Dry_P Parameter: Organism Value: A. thaliana
  misc_feature: MA Experiment 20001560 PARAMETER Experiment Name: At_Drought_Soil_Dry_P Parameter: Plant Line Value: WS
  misc_feature: MA Experiment 20001560 PARAMETER Experiment Name: At_Drought_Soil_Dry_P Parameter: Post Timepoint (hr) Value: None
  misc_feature: MA Experiment 20001560 PARAMETER Experiment Name: At_Drought_Soil_Dry_P Parameter: Post-Treatment Value: None
  misc_feature: MA Experiment 20001560 PARAMETER Experiment Name: At_Drought_Soil_Dry_P Parameter: Timepoint (day) Value: 14
  misc_feature: MA Experiment 20001560 PARAMETER Experiment Name: At_Drought_Soil_Dry_P Parameter: Treatment Value: Drought vs. No Drought
attattattccactctctctctctagactctgaattagctcattcttgcctccaaacaaatattcctgacagaccagaccactcgtaagacagaccaaaccctaaactaaaagcatccacgttctttgtttttgtattgatggtctgatctcatatccatggagatggagaatcaccgccccggcagtttcacctacatgggccgcaaattcagcgatttaagtctcaacgatgactcctctgctttcagcgattgtaacagcgacagatccggcgaattccccactgcttcctccgagagccgtcgtctcctcctctcttgcgcctctgagaattccgatgatctcatcaatcatctcgtgtcgcatcttgattcctcctattcgatcgatgagcagaagcaagctgctatggagatcaggctcttatccaagaacaaacctgagaatcggatcaaaatcgccaaggccggtgcgattaagccgttgatttctctgatctcttcttcggatcttcagcttcaggagtatggtgtcactgcaatcttgaatctatctctctgcgacgagaacaaagagtcgattgcttcttccggtgcgattaagccgcttgtcagggctttgaaaatgggaacaccgactgctaaagagaacgctgcttgtgctctgctccgtctatcgcagatcgaggagaacaaagtcgccatcgggagatccggagcgattcctctgttggtgaaccttctagaaacaggcggattcagagcgaagaaggacgcgtcgacggctctgtactcgttgtgctcagctaaagagaacaaaatcagagccgtgcaatcgggaattatgaagccgcttgttgaattgatggcggatttcggatcaaacatggtggataaatcggcgtttgtgatgagtctgttaatgtcggtgccggaatcgaaaccggcgattgtggaggaaggaggagttccggtgctggtggagatagtagaggtgggaacacagagacagaaagagatggctgtgtcgatattgctacagctttgtgaggagagtgttgtgtatagaacaatggtggctagagaaggagcgatacctccgctagtggctctgtcgcaggcaggaacaagtcgagctaagcaaaaggctgaggcgttgattgagcttctaaggcaactaagatccattagtaatggtggtgctagatcatcgtcccaactctgatgtgagcttttcttatttatctttttttaccacactctttcttcgtcttttactgttaatgcgagggtgtatacaaacaaccagaaaaaaaaggggggaaaaggaaactgtaaatagtttgtgtagaaaattagtgggcttgttgtaatttatcttgagtttggcttttcttttctttttgtgatccatttcataaatttcggtttggttttaacagatttctcattcc

SEQ ID NO: 22794 - protein, 355 aa, Arabidopsis thaliana
  peptide (1)..(355): Ceres Seq. ID no. 12324439
  misc_feature (135)..(175): Pfam Name: Armadillo/beta-catenin-like repeat Pfam Description: Armadillo/beta-catenin-like repeat
  misc_feature (47)..(350): Homolog of NCBI NO: 34393717 NR Description: arm repeat containing protein homolog-like
  misc_feature (35)..(348): Homolog of NCBI NO: 28974687 NR Description: arm repeat-containing protein [Nicotiana tabacum]
  misc_feature (52)..(342): Homolog of NCBI NO: 26452478 NR Description: unknown protein [Arabidopsis thaliana]
  misc_feature (18)..(345): Homolog of NCBI NO: 34393600 NR Description: arm repeat-containing protein-like protein
  misc_feature (32)..(342): Homolog of NCBI NO: 8843789 NR Description: phosphoinositide-specific phospholipase C-line
  misc_feature (3)..(342): Homolog of NCBI NO: 26452835 NR Description: unknown protein [Arabidopsis thaliana]
  misc_feature (3)..(342): Homolog of NCBI NO: 15237730 NR Description: putative protein
  misc_feature (1)..(355): Homolog of NCBI NO: 21592960 NR Description: unknown [Arabidopsis thaliana]
  misc_feature (1)..(355): Homolog of NCBI NO: 18395805 NR Description: expressed protein
  misc_feature (1)..(355): Homolog of NCBI NO: 16226454 NR Description: AT3g01400/T13O15_4 [Arabidopsis thaliana]
MEMENHRPGSFTYMGRKFSDLSLNDDSSAFSDCNSDRSGEFPTASSESRRLLLSCASENSDDLINHLVSHLDSSYSIDEQKQAAMEIRLLSKNKPENRIKIAKAGAIKPLISLISSSDLQLQEYGVTAILNLSLCDENKESIASSGAIKPLVRALKMGTPTAKENAACALLRLSQIEENKVAIGRSGAIPLLVNLLETGGFRAKKDASTALYSLCSAKENKIRAVQSGIMKPLVELMADFGSNMVDKSAFVMSLLMSVPESKPAIVEEGGVPVLVEIVEVGTQRQKEMAVSILLQLCEESVVYRTMVAREGAIPPLVALSQAGTSRAKQKAEALIELLRQLRSISNGGARSSSQL

SEQ ID NO: 22795 - protein, 353 aa, Arabidopsis thaliana
  peptide (1)..(353): Ceres Seq. ID no. 12324440
  misc_feature (133)..(173): Pfam Name: Armadillo/beta-catenin-like repeat Pfam Description: Armadillo/beta-catenin-like repeat
  misc_feature (45)..(348): Homolog of NCBI NO: 34393717 NR Description: arm repeat containing protein homolog-like
  misc_feature (33)..(346): Homolog of NCBI NO: 28974687 NR Description: arm repeat-containing protein [Nicotiana tabacum]
  misc_feature (50)..(340): Homolog of NCBI NO: 26452478 NR Description: unknown protein [Arabidopsis thaliana]
  misc_feature (16)..(343): Homolog of NCBI NO: 34393600 NR Description: arm repeat-containing protein-like protein
  misc_feature (30)..(340): Homolog of NCBI NO: 8843789 NR Description: phosphoinositide-specific phospholipase C-line
  misc_feature (1)..(340): Homolog of NCBI NO: 26452835 NR Description: unknown protein [Arabidopsis thaliana]
  misc_feature (1)..(340): Homolog of NCBI NO: 15237730 NR Description: putative protein
  misc_feature (1)..(353): Homolog of NCBI NO: 21592960 NR Description: unknown [Arabidopsis thaliana]
  misc_feature (1)..(353): Homolog of NCBI NO: 18395805 NR Description: expressed protein
  misc_feature (1)..(353): Homolog of NCBI NO: 16226454 NR Description: AT3g01400/T13O15_4 [Arabidopsis thaliana]
MENHRPGSFTYMGRKFSDLSLNDDSSAFSDCNSDRSGEFPTASSESRRLLLSCASENSDDLINHLVSHLDSSYSIDEQKQAAMEIRLLSKNKPENRIKIAKAGAIKPLISLISSSDLQLQEYGVTAILNLSLCDENKESIASSGAIKPLVRALKMGTPTAKENAACALLRLSQIEENKVAIGRSGAIPLLVNLLETGGFRAKKDASTALYSLCSAKENKIRAVQSGIMKPLVELMADFGSNMVDKSAFVMSLLMSVPESKPAIVEEGGVPVLVEIVEVGTQRQKEMAVSILLQLCEESVVYRTMVAREGAIPPLVALSQAGTSRAKQKAEALIELLRQLRSISNGGARSSSQL

SEQ ID NO: 22796 - protein, 342 aa, Arabidopsis thaliana
  peptide (1)..(342): Ceres Seq. ID no. 12324441
  misc_feature (122)..(162): Pfam Name: Armadillo/beta-catenin-like repeat Pfam Description: Armadillo/beta-catenin-like repeat
  misc_feature (34)..(337): Homolog of NCBI NO: 34393717 NR Description: arm repeat containing protein homolog-like
  misc_feature (22)..(335): Homolog of NCBI NO: 28974687 NR Description: arm repeat-containing protein [Nicotiana tabacum]
  misc_feature (39)..(329): Homolog of NCBI NO: 26452478 NR Description: unknown protein [Arabidopsis thaliana]
  misc_feature (5)..(332): Homolog of NCBI NO: 34393600 NR Description: arm repeat-containing protein-like protein
  misc_feature (19)..(329): Homolog of NCBI NO: 8843789 NR Description: phosphoinositide-specific phospholipase C-line
  misc_feature (1)..(329): Homolog of NCBI NO: 26452835 NR Description: unknown protein [Arabidopsis thaliana]
  misc_feature (1)..(329): Homolog of NCBI NO: 15237730 NR Description: putative protein
  misc_feature (1)..(342): Homolog of NCBI NO: 21592960 NR Description: unknown [Arabidopsis thaliana]
  misc_feature (1)..(342): Homolog of NCBI NO: 18395805 NR Description: expressed protein
  misc_feature (1)..(342): Homolog of NCBI NO: 16226454 NR Description: AT3g01400/T13O15_4 [Arabidopsis thaliana]
MGRKFSDLSLNDDSSAFSDCNSDRSGEFPTASSESRRLLLSCASENSDDLINHLVSHLDSSYSIDEQKQAAMEIRLLSKNKPENRIKIAKAGAIKPLISLISSSDLQLQEYGVTAILNLSLCDENKESIASSGAIKPLVRALKMGTPTAKENAACALLRLSQIEENKVAIGRSGAIPLLVNLLETGGFRAKKDASTALYSLCSAKENKIRAVQSGIMKPLVELMADFGSNMVDKSAFVMSLLMSVPESKPAIVEEGGVPVLVEIVEVGTQRQKEMAVSILLQLCEESVVYRTMVAREGAIPPLVALSQAGTSRAKQKAEALIELLRQLRSISNGGARSSSQL

SEQ ID NO: 22797 - DNA, 1155 bp, Arabidopsis thaliana
  misc_feature (1)..(1155): Ceres Seq. ID no. 13497495
  misc_feature: MA Experiment ID: 108595 Result: Up-regulated in Transcription
  misc_feature: MA Experiment 108595 PARAMETER Experiment Name: At_Ler-pi_Ovule_cDNA_P Parameter: Plant Line Value: null
  misc_feature: MA Experiment ID: 20000179 Result: Up-regulated in Transcription
  misc_feature: MA Experiment 20000179 PARAMETER Experiment Name: At_Germinating_Seeds_P Parameter: Age (hr) Value: 6 vs. 0
  misc_feature: MA Experiment 20000179 PARAMETER Experiment Name: At_Germinating_Seeds_P Parameter: Tissue Value: Germinating Seeds
  misc_feature: MA Experiment ID: 20000180 Result: Up-regulated in Transcription
  misc_feature: MA Experiment 20000180 PARAMETER Experiment Name: At_Germinating_Seeds_P Parameter: Age (hr) Value: 24 vs. 0
  misc_feature: MA Experiment 20000180 PARAMETER Experiment Name: At_Germinating_Seeds_P Parameter: Tissue Value: Germinating Seeds
  misc_feature: MA Experiment ID: 20000185 Result: Up-regulated in Transcription
  misc_feature: MA Experiment 20000185 PARAMETER Experiment Name: At_Roots__P Parameter: Age (day) Value: 7 vs. 21
  misc_feature: MA Experiment 20000185 PARAMETER Experiment Name: At_Roots__P Parameter: Organism Value: A. thaliana
  misc_feature: MA Experiment 20000185 PARAMETER Experiment Name: At_Roots__P Parameter: Tissue Value: Roots vs. Whole Plant
  misc_feature: MA Experiment ID: 20000439 Result: Up-regulated in Transcription
  misc_feature: MA Experiment 20000439 PARAMETER Experiment Name: At_Roots__P Parameter: Age (day) Value: 14 vs. 21
  misc_feature: MA Experiment 20000439 PARAMETER Experiment Name: At_Roots__P Parameter: Organism Value: A. thaliana
  misc_feature: MA Experiment 20000439 PARAMETER Experiment Name: At_Roots__P Parameter: Tissue Value: Roots vs. Whole Plant
  misc_feature: MA Experiment ID: 20000794 Result: Up-regulated in Transcription
  misc_feature: MA Experiment 20000794 PARAMETER Experiment Name: At_Petals_P Parameter: Age (day) Value: 23-25 days
  misc_feature: MA Experiment 20000794 PARAMETER Experiment Name: At_Petals_P Parameter: Plant Line Value: WS
  misc_feature: MA Experiment 20000794 PARAMETER Experiment Name: At_Petals_P Parameter: Tissue Value: Petals vs. Whole plant
  misc_feature: MA Experiment ID: 20001757 Result: Down-regulated in Transcription
  misc_feature: MA Experiment 20001757 PARAMETER Experiment Name: At_50mM_NH4NO3_L-to-H_P Parameter: Timepoint (hr) Value: 6
  misc_feature: MA Experiment 20001757 PARAMETER Experiment Name: At_50mM_NH4NO3_L-to-H_P Parameter: Tissue Value: Leaf
  misc_feature: MA Experiment 20001757 PARAMETER Experiment Name: At_50mM_NH4NO3_L-to-H_P Parameter: Treatment Value: 50mM NH4NO3 vs 100mM Mannitol
aaatttctctcgccattttatagattaaggtgttctctctgacttcggaggagaaagaaagaaaaaaaatattcttgtttcaaacttcaatggcgttctcgagttccatcttctctgttactcagttttcttcttcgttagcttcgcgtccttcttctgcaatcagtaggcagactcgttttcccgctcaaattgcttctccagatctatcgcctgctttgttcgatgatcgccggaagttcgtcggaggtgtaatgtctctcttgacgaagagtattaaaaaccgtgtatatgcttcgattaacagcattgattcggccgctactccatcgtatccgaaatcggaagacgatgacgacgttgttccaatgccaatggttatgatagaccaggatgctgaccctgaagctactattgtacaactcagttttggaaatcgtcttggggctcttattgacacaatgcgggcgctgaaagatttgggattggatgtaataaaaggaactgtctcaactgaaggatccattaagcagaccaaattttctataacgaaacgagacactggccggaaagtggaagatcctgacttgttggaacaaatccgattaacaatcatcaacaatctcttgaaataccatccggaatgcagtgagcaacttgcaatgggtgagacttttggaataaaggctcccgaaaagaagattgatgtcgatatcgcaactcatatacatgtgaaagaagatggaccaaagaggagcctgcttgtcatagagacagcggacaggccaggtcttgtcgtagagatgatcaaagtgatggctgatgtcaacatagacgtggaatccgcagagatagatacagagggactggttgcgaaagacaagtttcacgtaagctaccaagggcaagctctaaacagatctttgtcacaggttttggtgaactgtctgcgttacttcctgagaaggcctgaaactgacattgacagctactaaatgagcttttgtttgctctaaaacaaaactgctctttatcctttaaagcaatcatatctgtgcttgcgaaactttcagacttctgtatggaagattatgtggaaattcgtgatactataattgaaccactgtggctaaaaaataaatgggttcttgacac

SEQ ID NO: 22798 - protein, 301 aa, Arabidopsis thaliana
  peptide (1)..(301): Ceres Seq. ID no. 13497496
  misc_feature (223)..(292): Pfam Name: ACT domain Pfam Description: ACT domain
  misc_feature (87)..(269): Homolog of NCBI NO: 6091737 NR Description: unknown protein [Arabidopsis thaliana]
  misc_feature (85)..(301): Homolog of NCBI NO: 18394414 NR Description: expressed protein [Arabidopsis thaliana]
  misc_feature (1)..(301): Homolog of NCBI NO: 21592963 NR Description: unknown [Arabidopsis thaliana]
  misc_feature (1)..(301): Homolog of NCBI NO: 15238305 NR Description: ACT domain-containing protein [Arabidopsis
MAFSSSIFSVTQFSSSLASRPSSAISRQTRFPAQIASPDLSPALFDDRRKFVGGVMSLLTKSIKNRVYASINSIDSAATPSYPKSEDDDDVVPMPMVMIDQDADPEATIVQLSFGNRLGALIDTMRALKDLGLDVIKGTVSTEGSIKQTKFSITKRDTGRKVEDPDLLEQIRLTIINNLLKYHPECSEQLAMGETFGIKAPEKKIDVDIATHIHVKEDGPKRSLLVIETADRPGLVVEMIKVMADVNIDVESAEIDTEGLVAKDKFHVSYQGQALNRSLSQVLVNCLRYFLRRPETDIDSY

SEQ ID NO: 22799 - protein, 246 aa, Arabidopsis thaliana
  peptide (1)..(246): Ceres Seq. ID no. 13497497
  misc_feature (168)..(237): Pfam Name: ACT domain Pfam Description: ACT domain
  misc_feature (32)..(214): Homolog of NCBI NO: 6091737 NR Description: unknown protein [Arabidopsis thaliana]
  misc_feature (30)..(246): Homolog of NCBI NO: 18394414 NR Description: expressed protein [Arabidopsis thaliana]
  misc_feature (1)..(246): Homolog of NCBI NO: 21592963 NR Description: unknown [Arabidopsis thaliana]
  misc_feature (1)..(246): Homolog of NCBI NO: 15238305 NR Description: ACT domain-containing protein [Arabidopsis
MSLLTKSIKNRVYASINSIDSAATPSYPKSEDDDDVVPMPMVMIDQDADPEATIVQLSFGNRLGALIDTMRALKDLGLDVIKGTVSTEGSIKQTKFSITKRDTGRKVEDPDLLEQIRLTIINNLLKYHPECSEQLAMGETFGIKAPEKKIDVDIATHIHVKEDGPKRSLLVIETADRPGLVVEMIKVMADVNIDVESAEIDTEGLVAKDKFHVSYQGQALNRSLSQVLVNCLRYFLRRPETDIDSY

SEQ ID NO: 22800 - protein, 208 aa, Arabidopsis thaliana
  peptide (1)..(208): Ceres Seq. ID no. 13497498
  misc_feature (130)..(199): Pfam Name: ACT domain Pfam Description: ACT domain
  misc_feature (1)..(176): Homolog of NCBI NO: 6091737 NR Description: unknown protein [Arabidopsis thaliana]
  misc_feature (1)..(208): Homolog of NCBI NO: 18394414 NR Description: expressed protein [Arabidopsis thaliana]
  misc_feature (1)..(208): Homolog of NCBI NO: 21592963 NR Description: unknown [Arabidopsis thaliana]
  misc_feature (1)..(208): Homolog of NCBI NO: 15238305 NR Description: ACT domain-containing protein [Arabidopsis
MPMVMIDQDADPEATIVQLSFGNRLGALIDTMRALKDLGLDVIKGTVSTEGSIKQTKFSITKRDTGRKVEDPDLLEQIRLTIINNLLKYHPECSEQLAMGETFGIKAPEKKIDVDIATHIHVKEDGPKRSLLVIETADRPGLVVEMIKVMADVNIDVESAEIDTEGLVAKDKFHVSYQGQALNRSLSQVLVNCLRYFLRRPETDIDSY

SEQ ID NO: 22801 - DNA, 1397 bp, Arabidopsis thaliana
  misc_feature (1)..(1397): Ceres Seq. ID no. 12562342
  misc_feature: MA Experiment ID: 20000087 Result: Down-regulated in Transcription
  misc_feature: MA Experiment 20000087 PARAMETER Experiment Name: At_100uM_ABA_Mutants_cDNA_P Parameter: Plant Line Value: WS
  misc_feature: MA Experiment 20000087 PARAMETER Experiment Name: At_100uM_ABA_Mutants_cDNA_P Parameter: Timepoint (hr) Value: 6
  misc_feature: MA Experiment 20000087 PARAMETER Experiment Name: At_100uM_ABA_Mutants_cDNA_P Parameter: Tissue Value: Aerial
  misc_feature: MA Experiment 20000087 PARAMETER Experiment Name: At_100uM_ABA_Mutants_cDNA_P Parameter: Treatment Value: 100uM ABA vs. No Treatment
  misc_feature: MA Experiment ID: 20000166 Result: Up-regulated in Transcription
  misc_feature: MA Experiment 20000166 PARAMETER Experiment Name: At_100uM_ABA_P Parameter: Age (day) Value: 14
  misc_feature: MA Experiment 20000166 PARAMETER Experiment Name: At_100uM_ABA_P Parameter: Organism Value: A. thaliana
  misc_feature: MA Experiment 20000166 PARAMETER Experiment Name: At_100uM_ABA_P Parameter: Plant Line Value: WS
  misc_feature: MA Experiment 20000166 PARAMETER Experiment Name: At_100uM_ABA_P Parameter: Timepoint (hr) Value: 1
  misc_feature: MA Experiment 20000166 PARAMETER Experiment Name: At_100uM_ABA_P Parameter: Tissue Value: Aerial
  misc_feature: MA Experiment 20000166 PARAMETER Experiment Name: At_100uM_ABA_P Parameter: Treatment Value: 100uM ABA vs. No Treatment
  misc_feature: MA Experiment ID: 20000171 Result: Down-regulated in Transcription
  misc_feature: MA Experiment 20000171 PARAMETER Experiment Name: At_42deg_Heat_P Parameter: Age (day) Value: 14
  misc_feature: MA Experiment 20000171 PARAMETER Experiment Name: At_42deg_Heat_P Parameter: Organism Value: A. thaliana
  misc_feature: MA Experiment 20000171 PARAMETER Experiment Name: At_42deg_Heat_P Parameter: Plant Line Value: WS
  misc_feature: MA Experiment 20000171 PARAMETER Experiment Name: At_42deg_Heat_P Parameter: Temperature (deg C) Value: 42 vs. 22
  misc_feature: MA Experiment 20000171 PARAMETER Experiment Name: At_42deg_Heat_P Parameter: Timepoint (hr) Value: 1
  misc_feature: MA Experiment 20000171 PARAMETER Experiment Name: At_42deg_Heat_P Parameter: Tissue Value: Aerial
  misc_feature: MA Experiment ID: 20000173 Result: Down-regulated in Transcription
  misc_feature: MA Experiment 20000173 PARAMETER Experiment Name: At_42deg_Heat_P Parameter: Age (day) Value: 14
  misc_feature: MA Experiment 20000173 PARAMETER Experiment Name: At_42deg_Heat_P Parameter: Organism Value: A. thaliana
  misc_feature: MA Experiment 20000173 PARAMETER Experiment Name: At_42deg_Heat_P Parameter: Plant Line Value: WS
  misc_feature: MA Experiment 20000173 PARAMETER Experiment Name: At_42deg_Heat_P Parameter: Temperature (deg C) Value: 42 vs. 22
  misc_feature: MA Experiment 20000173 PARAMETER Experiment Name: At_42deg_Heat_P Parameter: Timepoint (hr) Value: 6
  misc_feature: MA Experiment 20000173 PARAMETER Experiment Name: At_42deg_Heat_P Parameter: Tissue Value: Aerial
  misc_feature: MA Experiment ID: 20000179 Result: Up-regulated in Transcription
  misc_feature: MA Experiment 20000179 PARAMETER Experiment Name: At_Germinating_Seeds_P Parameter: Age (hr) Value: 6 vs. 0
  misc_feature: MA Experiment 20000179 PARAMETER Experiment Name: At_Germinating_Seeds_P Parameter: Tissue Value: Germinating Seeds
  misc_feature: MA Experiment ID: 20000180 Result: Up-regulated in Transcription
  misc_feature: MA Experiment 20000180 PARAMETER Experiment Name: At_Germinating_Seeds_P Parameter: Age (hr) Value: 24 vs. 0
  misc_feature: MA Experiment 20000180 PARAMETER Experiment Name: At_Germinating_Seeds_P Parameter: Tissue Value: Germinating Seeds
  misc_feature: MA Experiment ID: 20000184 Result: Up-regulated in Transcription
  misc_feature: MA Experiment 20000184 PARAMETER Experiment Name: At_Shoots__P Parameter: Age (day) Value: 7
  misc_feature: MA Experiment 20000184 PARAMETER Experiment Name: At_Shoots__P Parameter: Tissue Value: Shoots vs. Whole Plant
  misc_feature: MA Experiment ID: 20000185 Result: Down-regulated in Transcription
  misc_feature: MA Experiment 20000185 PARAMETER Experiment Name: At_Roots__P Parameter: Age (day) Value: 7 vs. 21
  misc_feature: MA Experiment 20000185 PARAMETER Experiment Name: At_Roots__P Parameter: Organism Value: A. thaliana
  misc_feature: MA Experiment 20000185 PARAMETER Experiment Name: At_Roots__P Parameter: Tissue Value: Roots vs. Whole Plant
  misc_feature: MA Experiment ID: 20000234 Result: Up-regulated in Transcription
  misc_feature: MA Experiment 20000234 PARAMETER Experiment Name: At_Siliques_P Parameter: Age (day) Value: 21
  misc_feature: MA Experiment 20000234 PARAMETER Experiment Name: At_Siliques_P Parameter: Organism Value: A. thaliana
  misc_feature: MA Experiment 20000234 PARAMETER Experiment Name: At_Siliques_P Parameter: Plant Line Value: WS
  misc_feature: MA Experiment 20000234 PARAMETER Experiment Name: At_Siliques_P Parameter: Tissue Value: Less Than 5mm Siliques vs. Whole Plant
  misc_feature: MA Experiment ID: 20000235 Result: Up-regulated in Transcription
  misc_feature: MA Experiment 20000235 PARAMETER Experiment Name: At_Siliques_P Parameter: Age (day) Value: 21
  misc_feature: MA Experiment 20000235 PARAMETER Experiment Name: At_Siliques_P Parameter: Organism Value: A. thaliana
  misc_feature: MA Experiment 20000235 PARAMETER Experiment Name: At_Siliques_P Parameter: Plant Line Value: WS
  misc_feature: MA Experiment 20000235 PARAMETER Experiment Name: At_Siliques_P Parameter: Tissue Value: 5-10mm Siliques vs. Whole Plant
  misc_feature: MA Experiment ID: 20000264 Result: Up-regulated in Transcription
  misc_feature: MA Experiment 20000264 PARAMETER Experiment Name: At_Open_Flower_P Parameter: Age (day) Value: 21
  misc_feature: MA Experiment 20000264 PARAMETER Experiment Name: At_Open_Flower_P Parameter: Plant Line Value: WS
  misc_feature: MA Experiment 20000264 PARAMETER Experiment Name: At_Open_Flower_P Parameter: Tissue Value: Open Flower vs. Whole Plant
  misc_feature: MA Experiment ID: 20000265 Result: Up-regulated in Transcription
  misc_feature: MA Experiment 20000265 PARAMETER Experiment Name: At_Open_Flower_P Parameter: Age (day) Value: 21
  misc_feature: MA Experiment 20000265 PARAMETER Experiment Name: At_Open_Flower_P Parameter: Plant Line Value: WS
  misc_feature: MA Experiment 20000265 PARAMETER Experiment Name: At_Open_Flower_P Parameter: Tissue Value: Closed Flower vs. Whole Plant
  misc_feature: MA Experiment ID: 20000286 Result: Up-regulated in Transcription
  misc_feature: MA Experiment 20000286 PARAMETER Experiment Name: At_Open_Flower_P Parameter: Age (day) Value: 21
  misc_feature: MA Experiment 20000286 PARAMETER Experiment Name: At_Open_Flower_P Parameter: Plant Line Value: WS
  misc_feature: MA Experiment 20000286 PARAMETER Experiment Name: At_Open_Flower_P Parameter: Tissue Value: Half Open vs. Whole Plant
  misc_feature: MA Experiment ID: 20000439 Result: Down-regulated in Transcription
  misc_feature: MA Experiment 20000439 PARAMETER Experiment Name: At_Roots__P Parameter: Age (day) Value: 14 vs. 21
  misc_feature: MA Experiment 20000439 PARAMETER Experiment Name: At_Roots__P Parameter: Organism Value: A. thaliana
  misc_feature: MA Experiment 20000439 PARAMETER Experiment Name: At_Roots__P Parameter: Tissue Value: Roots vs. Whole Plant
  misc_feature: MA Experiment ID: 20000443 Result: Down-regulated in Transcription
  misc_feature: MA Experiment 20000443 PARAMETER Experiment Name: At_1uM_BR-BRZ__P Parameter: Tissue Value: Shoot Apices
  misc_feature: MA Experiment 20000443 PARAMETER Experiment Name: At_1uM_BR-BRZ__P Parameter: Treatment Value: 1uM BRZ vs. No Treatment
  misc_feature: MA Experiment ID: 20000451 Result: Up-regulated in Transcription
  misc_feature: MA Experiment 20000451 PARAMETER Experiment Name: At_CS6879_Shoots-Roots_P Parameter: Age (day) Value: 14
  misc_feature: MA Experiment 20000451 PARAMETER Experiment Name: At_CS6879_Shoots-Roots_P Parameter: Organism Value: A. thaliana
  misc_feature: MA Experiment 20000451 PARAMETER Experiment Name: At_CS6879_Shoots-Roots_P Parameter: Plant Line Value: CS6879 vs. WS
  misc_feature: MA Experiment 20000451 PARAMETER Experiment Name: At_CS6879_Shoots-Roots_P Parameter: Tissue Value: Roots
  misc_feature: MA Experiment ID: 20000573 Result: Down-regulated in Transcription
  misc_feature: MA Experiment 20000573 PARAMETER Experiment Name: At_100uM_ABA_Mutants__P Parameter: Organism Value: A. thaliana
  misc_feature: MA Experiment 20000573 PARAMETER Experiment Name: At_100uM_ABA_Mutants__P Parameter: Plant Line Value: CS22 vs. Ler wt
  misc_feature: MA Experiment 20000573 PARAMETER Experiment Name: At_100uM_ABA_Mutants__P Parameter: Timepoint (hr) Value: N/A
  misc_feature: MA Experiment 20000573 PARAMETER Experiment Name: At_100uM_ABA_Mutants__P Parameter: Tissue Value: Whole Plant
  misc_feature: MA Experiment 20000573 PARAMETER Experiment Name: At_100uM_ABA_Mutants__P Parameter: Treatment Value: None
  misc_feature: MA Experiment ID: 20000794 Result: Down-regulated in Transcription
  misc_feature: MA Experiment 20000794 PARAMETER Experiment Name: At_Petals_P Parameter: Age (day) Value: 23-25 days
  misc_feature: MA Experiment 20000794 PARAMETER Experiment Name: At_Petals_P Parameter: Plant Line Value: WS
  misc_feature: MA Experiment 20000794 PARAMETER Experiment Name: At_Petals_P Parameter: Tissue Value: Petals vs. Whole plant
  misc_feature: MA Experiment ID: 20001248 Result: Down-regulated in Transcription
  misc_feature: MA Experiment 20001248 PARAMETER Experiment Name: At_Far-red-induction_P Parameter: Age (day) Value: 7
  misc_feature: MA Experiment 20001248 PARAMETER Experiment Name: At_Far-red-induction_P Parameter: Light Value: Far-red vs. White
  misc_feature: MA Experiment 20001248 PARAMETER Experiment Name: At_Far-red-induction_P Parameter: Organism Value: A. thaliana
  misc_feature: MA Experiment 20001248 PARAMETER Experiment Name: At_Far-red-induction_P Parameter: Plant Line Value: Columbia
  misc_feature: MA Experiment 20001248 PARAMETER Experiment Name: At_Far-red-induction_P Parameter: Timepoint (hr) Value: 4
  misc_feature: MA Experiment 20001248 PARAMETER Experiment Name: At_Far-red-induction_P Parameter: Tissue Value: Whole Plant
  misc_feature: MA Experiment ID: 20001450 Result: Down-regulated in Transcription
  misc_feature: MA Experiment 20001450 PARAMETER Experiment Name: At_Far-red-induction_P Parameter: Age (day) Value: 7
  misc_feature: MA Experiment 20001450 PARAMETER Experiment Name: At_Far-red-induction_P Parameter: Light Value: Far-red vs. White
  misc_feature: MA Experiment 20001450 PARAMETER Experiment Name: At_Far-red-induction_P Parameter: Organism Value: A. thaliana
  misc_feature: MA Experiment 20001450 PARAMETER Experiment Name: At_Far-red-induction_P Parameter: Plant Line Value: Columbia
  misc_feature: MA Experiment 20001450 PARAMETER Experiment Name: At_Far-red-induction_P Parameter: Timepoint (hr) Value: 8
  misc_feature: MA Experiment 20001450 PARAMETER Experiment Name: At_Far-red-induction_P Parameter: Tissue Value: Whole Plant
  misc_feature: MA Experiment ID: 20001557 Result: Up-regulated in Transcription
  misc_feature: MA Experiment 20001557 PARAMETER Experiment Name: At_Drought_Soil_Dry_P Parameter: Age (day) Value: 27
  misc_feature: MA Experiment 20001557 PARAMETER Experiment Name: At_Drought_Soil_Dry_P Parameter: Organism Value: A. thaliana
  misc_feature: MA Experiment 20001557 PARAMETER Experiment Name: At_Drought_Soil_Dry_P Parameter: Plant Line Value: WS
  misc_feature: MA Experiment 20001557 PARAMETER Experiment Name: At_Drought_Soil_Dry_P Parameter: Post Timepoint (hr) Value: 3
  misc_feature: MA Experiment 20001557 PARAMETER Experiment Name: At_Drought_Soil_Dry_P Parameter: Post-Treatment Value: Re-Water vs. No Drought
  misc_feature: MA Experiment 20001557 PARAMETER Experiment Name: At_Drought_Soil_Dry_P Parameter: Timepoint (day) Value: 13
  misc_feature: MA Experiment 20001557 PARAMETER Experiment Name: At_Drought_Soil_Dry_P Parameter: Treatment Value: Drought vs. No Drought
  misc_feature: MA Experiment ID: 20001558 Result: Up-regulated in Transcription
  misc_feature: MA Experiment 20001558 PARAMETER Experiment Name: At_Drought_Soil_Dry_P Parameter: Age (day) Value: 27
  misc_feature: MA Experiment 20001558 PARAMETER Experiment Name: At_Drought_Soil_Dry_P Parameter: Organism Value: A. thaliana
  misc_feature: MA Experiment 20001558 PARAMETER Experiment Name: At_Drought_Soil_Dry_P Parameter: Plant Line Value: WS
  misc_feature: MA Experiment 20001558 PARAMETER Experiment Name: At_Drought_Soil_Dry_P Parameter: Post Timepoint (hr) Value: 6
  misc_feature: MA Experiment 20001558 PARAMETER Experiment Name: At_Drought_Soil_Dry_P Parameter: Post-Treatment Value: Re-Water vs. No Drought
  misc_feature: MA Experiment 20001558 PARAMETER Experiment Name: At_Drought_Soil_Dry_P Parameter: Timepoint (day) Value: 13
  misc_feature: MA Experiment 20001558 PARAMETER Experiment Name: At_Drought_Soil_Dry_P Parameter: Treatment Value: Drought vs. No Drought
  misc_feature: MA Experiment ID: 20001560 Result: Up-regulated in Transcription
  misc_feature: MA Experiment 20001560 PARAMETER Experiment Name: At_Drought_Soil_Dry_P Parameter: Age (day) Value: 28
  misc_feature: MA Experiment 20001560 PARAMETER Experiment Name: At_Drought_Soil_Dry_P Parameter: Organism Value: A. thaliana
  misc_feature: MA Experiment 20001560 PARAMETER Experiment Name: At_Drought_Soil_Dry_P Parameter: Plant Line Value: WS
  misc_feature: MA Experiment 20001560 PARAMETER Experiment Name: At_Drought_Soil_Dry_P Parameter: Post Timepoint (hr) Value: None
  misc_feature: MA Experiment 20001560 PARAMETER Experiment Name: At_Drought_Soil_Dry_P Parameter: Post-Treatment Value: None
  misc_feature: MA Experiment 20001560 PARAMETER Experiment Name: At_Drought_Soil_Dry_P Parameter: Timepoint (day) Value: 14
  misc_feature: MA Experiment 20001560 PARAMETER Experiment Name: At_Drought_Soil_Dry_P Parameter: Treatment Value: Drought vs. No Drought
  misc_feature: MA Experiment ID: 20001905 Result: Down-regulated in Transcription
  misc_feature: MA Experiment 20001905 PARAMETER Experiment Name: At_Drought_Reproduction_P Parameter: Age (day) Value: 40
  misc_feature: MA Experiment 20001905 PARAMETER Experiment Name: At_Drought_Reproduction_P Parameter: Organism Value: A. thaliana
  misc_feature: MA Experiment 20001905 PARAMETER Experiment Name: At_Drought_Reproduction_P Parameter: Plant Line Value: WS
  misc_feature: MA Experiment 20001905 PARAMETER Experiment Name: At_Drought_Reproduction_P Parameter: Timepoint (day) Value: 10
  misc_feature: MA Experiment 20001905 PARAMETER Experiment Name: At_Drought_Reproduction_P Parameter: Tissue Value: Rosettes
  misc_feature: MA Experiment 20001905 PARAMETER Experiment Name: At_Drought_Reproduction_P Parameter: Treatment Value: Drought vs. No Drought
  misc_feature: MA Experiment ID: 20001906 Result: Down-regulated in Transcription
  misc_feature: MA Experiment 20001906 PARAMETER Experiment Name: At_Drought_Reproduction_P Parameter: Age (day) Value: 35
  misc_feature: MA Experiment 20001906 PARAMETER Experiment Name: At_Drought_Reproduction_P Parameter: Organism Value: A. thaliana
  misc_feature: MA Experiment 20001906 PARAMETER Experiment Name: At_Drought_Reproduction_P Parameter: Plant Line Value: WS
  misc_feature: MA Experiment 20001906 PARAMETER Experiment Name: At_Drought_Reproduction_P Parameter: Timepoint (day) Value: 5
  misc_feature: MA Experiment 20001906 PARAMETER Experiment Name: At_Drought_Reproduction_P Parameter: Tissue Value: Siliques
  misc_feature: MA Experiment 20001906 PARAMETER Experiment Name: At_Drought_Reproduction_P Parameter: Treatment Value: Drought vs. No Drought
  misc_feature: MA Experiment ID: 20001911 Result: Down-regulated in Transcription
  misc_feature: MA Experiment 20001911 PARAMETER Experiment Name: At_Drought_Reproduction_P Parameter: Age (day) Value: 40
  misc_feature: MA Experiment 20001911 PARAMETER Experiment Name: At_Drought_Reproduction_P Parameter: Organism Value: A. thaliana
  misc_feature: MA Experiment 20001911 PARAMETER Experiment Name: At_Drought_Reproduction_P Parameter: Plant Line Value: WS
  misc_feature: MA Experiment 20001911 PARAMETER Experiment Name: At_Drought_Reproduction_P Parameter: Timepoint (day) Value: 10
  misc_feature: MA Experiment 20001911 PARAMETER Experiment Name: At_Drought_Reproduction_P Parameter: Tissue Value: Flowers
  misc_feature: MA Experiment 20001911 PARAMETER Experiment Name: At_Drought_Reproduction_P Parameter: Treatment Value: Drought vs. No Drought
acaacataaacccaatctctcactcagactaagacagagtcagaaacaatggcgaaatctccagaaacagagcatccgaacaaagtctttggttggggtgctagagacaaatccggtgttctctctccttttcacttctctagaagagacaatggtgaaaatgatgtgacagtgaagatcttgttctgtggagtttgccacactgatttacacaccatcaaaaacgactggggatactcgtattacccagtagttccagggcatgaaatcgttgggatcgctacaaaagttggtaagaacgtgactaaattcaaagaaggagatcgtgtcggagtaggagtgatcagtggctcgtgccaatcttgcgaatcttgtgaccaagatcttgaaaactactgtcctcaaatgtctttcacatacaatgcgattggatccgatggaaccaagaattacggtggctattcggagaacattgtggttgatcaacggtttgttttgcggtttccggagaatttaccgagcgattcgggtgcgccgttgctgtgtgctggaatcactgtgtatagtccaatgaagtattatggtatgactgaggcagggaagcatttaggggttgctggacttggtgggcttggtcatgttgctgttaagattggtaaagcttttggtttgaaagttactgtcattagttcttcttctacgaaagcagaggaagccattaatcatcttggtgctgattcgtttcttgtcacaactgatcctcagaaaatgaaggctgcaattggaacaatggactacattatcgatacgatatcagcagtacatgctctgtatccgttgctcggtttactcaaagtcaacggaaagctcattgctttaggcttacctgagaagcctctcgagctaccaatgttccctcttgttctcggaaggaaaatggttggaggaagtgacgtgggagggatgaaggagacacaagagatgcttgatttctgcgctaagcacaacattacagctgatattgaattgattaagatggatgagattaacactgcgatggagaggcttgctaagtctgatgttaggtacaggttcgtgatcgacgtggctaactccttgagccctccatgaatgatccggatctaagaattgagcattgaggaggctttaaatctatgtcataatcttggtgtttgtttgtgtctctcgagttatcttcgttttctgctttcggtttgagaatcggtttcttctcagacaagttaccttatttcgttgttttcttctcatgttctgtttcctgagagaaactctttctgattccagataagactttgatccattttcagtttgctaataatataaagatgggtctaaaacctaaacagctttaaact

SEQ ID NO: 22802 - protein, 360 aa, Arabidopsis thaliana
  peptide (1)..(360): Ceres Seq. ID no. 12562343
  misc_feature (1)..(358): Homolog of NCBI NO: 14279694 NR Description: sinapyl alcohol dehydrogenase [Populus
  misc_feature (11)..(358): Homolog of NCBI NO: 3913193 NR Description: Probable mannitol dehydrogenase 1 (NAD-dependent
  misc_feature (1)..(358): Homolog of NCBI NO: 10720088 NR Description: Probable mannitol dehydrogenase (NAD-dependent
  misc_feature (11)..(359): Homolog of NCBI NO: 15227106 NR Description: putative cinnamyl-alcohol dehydrogenase; protein
  misc_feature (11)..(359): Homolog of NCBI NO: 15227091 NR Description: putative cinnamyl-alcohol dehydrogenase; protein
  misc_feature (1)..(358): Homolog of NCBI NO: 22475166 NR Description: putative sinapyl alcohol dehydrogenase
  misc_feature (5)..(360): Homolog of NCBI NO: 2146727 NR Description: cinnamyl-alcohol dehydrogenase (EC 1.1.1.195)
  misc_feature (1)..(360): Homolog of NCBI NO: 1168728 NR Description: Probable mannitol dehydrogenase (NAD-dependent
  misc_feature (1)..(360): Homolog of NCBI NO: 21592964 NR Description: cinnamyl-alcohol dehydrogenase CAD1 [Arabidopsis
  misc_feature (1)..(360): Homolog of NCBI NO: 15235022 NR Description: cinnamyl-alcohol dehydrogenase CAD1
  misc_feature (1)..(358): Homolog of NCBI NO: 14279694 NR Description: sinapyl alcohol dehydrogenase [Populus
  misc_feature (11)..(358): Homolog of NCBI NO: 3913193 NR Description: Probable mannitol dehydrogenase 1 (NAD-dependent
  misc_feature (1)..(358): Homolog of NCBI NO: 10720088 NR Description: Probable mannitol dehydrogenase (NAD-dependent
  misc_feature (11)..(359): Homolog of NCBI NO: 15227106 NR Description: putative cinnamyl-alcohol dehydrogenase; protein
  misc_feature (11)..(359): Homolog of NCBI NO: 15227091 NR Description: putative cinnamyl-alcohol dehydrogenase; protein
  misc_feature (1)..(358): Homolog of NCBI NO: 22475166 NR Description: putative sinapyl alcohol dehydrogenase
  misc_feature (5)..(360): Homolog of NCBI NO: 2146727 NR Description: cinnamyl-alcohol dehydrogenase (EC 1.1.1.195)
  misc_feature (1)..(360): Homolog of NCBI NO: 1168728 NR Description: Probable mannitol dehydrogenase (NAD-dependent
  misc_feature (1)..(360): Homolog of NCBI NO: 21592964 NR Description: cinnamyl-alcohol dehydrogenase CAD1 [Arabidopsis
  misc_feature (1)..(360): Homolog of NCBI NO: 15235022 NR Description: cinnamyl-alcohol dehydrogenase CAD1
MAKSPETEHPNKVFGWGARDKSGVLSPFHFSRRDNGENDVTVKILFCGVCHTDLHTIKNDWGYSYYPVVPGHEIVGIATKVGKNVTKFKEGDRVGVGVISGSCQSCESCDQDLENYCPQMSFTYNAIGSDGTKNYGGYSENIVVDQRFVLRFPENLPSDSGAPLLCAGITVYSPMKYYGMTEAGKHLGVAGLGGLGHVAVKIGKAFGLKVTVISSSSTKAEEAINHLGADSFLVTTDPQKMKAAIGTMDYIIDTISAVHALYPLLGLLKVNGKLIALGLPEKPLELPMFPLVLGRKMVGGSDVGGMKETQEMLDFCAKHNITADIELIKMDEINTAMERLAKSDVRYRFVIDVANSLSPP

SEQ ID NO: 22803 - protein, 241 aa, Arabidopsis thaliana
  peptide (1)..(241): Ceres Seq. ID no. 12562344
  misc_feature (1)..(239): Homolog of NCBI NO: 14279694 NR Description: sinapyl alcohol dehydrogenase [Populus
  misc_feature (1)..(239): Homolog of NCBI NO: 3913193 NR Description: Probable mannitol dehydrogenase 1 (NAD-dependent
  misc_feature (1)..(239): Homolog of NCBI NO: 10720088 NR Description: Probable mannitol dehydrogenase (NAD-dependent
  misc_feature (1)..(240): Homolog of NCBI NO: 15227106 NR Description: putative cinnamyl-alcohol dehydrogenase; protein
  misc_feature (1)..(240): Homolog of NCBI NO: 15227091 NR Description: putative cinnamyl-alcohol dehydrogenase; protein
  misc_feature (1)..(239): Homolog of NCBI NO: 22475166 NR Description: putative sinapyl alcohol dehydrogenase
  misc_feature (1)..(241): Homolog of NCBI NO: 2146727 NR Description: cinnamyl-alcohol dehydrogenase (EC 1.1.1.195)
  misc_feature (1)..(241): Homolog of NCBI NO: 1168728 NR Description: Probable mannitol dehydrogenase (NAD-dependent
  misc_feature (1)..(241): Homolog of NCBI NO: 21592964 NR Description: cinnamyl-alcohol dehydrogenase CAD1 [Arabidopsis
  misc_feature (1)..(241): Homolog of NCBI NO: 15235022 NR Description: cinnamyl-alcohol dehydrogenase CAD1
  misc_feature (1)..(239): Homolog of NCBI NO: 14279694 NR Description: sinapyl alcohol dehydrogenase [Populus
  misc_feature (1)..(239): Homolog of NCBI NO: 3913193 NR Description: Probable mannitol dehydrogenase 1 (NAD-dependent
  misc_feature (1)..(239): Homolog of NCBI NO: 10720088 NR Description: Probable mannitol dehydrogenase (NAD-dependent
  misc_feature (1)..(240): Homolog of NCBI NO: 15227106 NR Description: putative cinnamyl-alcohol dehydrogenase; protein
  misc_feature (1)..(240): Homolog of NCBI NO: 15227091 NR Description: putative cinnamyl-alcohol dehydrogenase; protein
  misc_feature (1)..(239): Homolog of NCBI NO: 22475166 NR Description: putative sinapyl alcohol dehydrogenase
  misc_feature (1)..(241): Homolog of NCBI NO: 2146727 NR Description: cinnamyl-alcohol dehydrogenase (EC 1.1.1.195)
  misc_feature (1)..(241): Homolog of NCBI NO: 1168728 NR Description: Probable mannitol dehydrogenase (NAD-dependent
  misc_feature (1)..(241): Homolog of NCBI NO: 21592964 NR Description: cinnamyl-alcohol dehydrogenase CAD1 [Arabidopsis
  misc_feature (1)..(241): Homolog of NCBI NO: 15235022 NR Description: cinnamyl-alcohol dehydrogenase CAD1
MSFTYNAIGSDGTKNYGGYSENIVVDQRFVLRFPENLPSDSGAPLLCAGITVYSPMKYYGMTEAGKHLGVAGLGGLGHVAVKIGKAFGLKVTVISSSSTKAEEAINHLGADSFLVTTDPQKMKAAIGTMDYIIDTISAVHALYPLLGLLKVNGKLIALGLPEKPLELPMFPLVLGRKMVGGSDVGGMKETQEMLDFCAKHNITADIELIKMDEINTAMERLAKSDVRYRFVIDVANSLSPP

SEQ ID NO: 22804 - protein, 186 aa, Arabidopsis thaliana
  peptide (1)..(186): Ceres Seq. ID no. 12562345
  misc_feature (1)..(184): Homolog of NCBI NO: 14279694 NR Description: sinapyl alcohol dehydrogenase [Populus
  misc_feature (1)..(184): Homolog of NCBI NO: 3913193 NR Description: Probable mannitol dehydrogenase 1 (NAD-dependent
  misc_feature (1)..(184): Homolog of NCBI NO: 10720088 NR Description: Probable mannitol dehydrogenase (NAD-dependent
  misc_feature (1)..(185): Homolog of NCBI NO: 15227106 NR Description: putative cinnamyl-alcohol dehydrogenase; protein
  misc_feature (1)..(185): Homolog of NCBI NO: 15227091 NR Description: putative cinnamyl-alcohol dehydrogenase; protein
  misc_feature (1)..(184): Homolog of NCBI NO: 22475166 NR Description: putative sinapyl alcohol dehydrogenase
  misc_feature (1)..(186): Homolog of NCBI NO: 2146727 NR Description: cinnamyl-alcohol dehydrogenase (EC 1.1.1.195)
  misc_feature (1)..(186): Homolog of NCBI NO: 1168728 NR Description: Probable mannitol dehydrogenase (NAD-dependent
  misc_feature (1)..(186): Homolog of NCBI NO: 21592964 NR Description: cinnamyl-alcohol dehydrogenase CAD1 [Arabidopsis
  misc_feature (1)..(186): Homolog of NCBI NO: 15235022 NR Description: cinnamyl-alcohol dehydrogenase CAD1
  misc_feature (1)..(184): Homolog of NCBI NO: 14279694 NR Description: sinapyl alcohol dehydrogenase [Populus
  misc_feature (1)..(184): Homolog of NCBI NO: 3913193 NR Description: Probable mannitol dehydrogenase 1 (NAD-dependent
  misc_feature (1)..(184): Homolog of NCBI NO: 10720088 NR Description: Probable mannitol dehydrogenase (NAD-dependent
  misc_feature (1)..(185): Homolog of NCBI NO: 15227106 NR Description: putative cinnamyl-alcohol dehydrogenase; protein
  misc_feature (1)..(185): Homolog of NCBI NO: 15227091 NR Description: putative cinnamyl-alcohol dehydrogenase; protein
  misc_feature (1)..(184): Homolog of NCBI NO: 22475166 NR Description: putative sinapyl alcohol dehydrogenase
  misc_feature (1)..(186): Homolog of NCBI NO: 2146727 NR Description: cinnamyl-alcohol dehydrogenase (EC 1.1.1.195)
  misc_feature (1)..(186): Homolog of NCBI NO: 1168728 NR Description: Probable mannitol dehydrogenase (NAD-dependent
  misc_feature (1)..(186): Homolog of NCBI NO: 21592964 NR Description: cinnamyl-alcohol dehydrogenase CAD1 [Arabidopsis
  misc_feature (1)..(186): Homolog of NCBI NO: 15235022 NR Description: cinnamyl-alcohol dehydrogenase CAD1
MKYYGMTEAGKHLGVAGLGGLGHVAVKIGKAFGLKVTVISSSSTKAEEAINHLGADSFLVTTDPQKMKAAIGTMDYIIDTISAVHALYPLLGLLKVNGKLIALGLPEKPLELPMFPLVLGRKMVGGSDVGGMKETQEMLDFCAKHNITADIELIKMDEINTAMERLAKSDVRYRFVIDVANSLSPP

SEQ ID NO: 22805 - DNA, 1191 bp, Arabidopsis thaliana
  misc_feature (1)..(1191): Ceres Seq. ID no. 12334603
  misc_feature: MA Experiment ID: 108434 Result: Down-regulated in Transcription
  misc_feature: MA Experiment 108434 PARAMETER Experiment Name: At_Root_Tips_cDNA_P Parameter: Tissue Value: Root Tips
  misc_feature: MA Experiment ID: 108435 Result: Down-regulated in Transcription
  misc_feature: MA Experiment 108435 PARAMETER Experiment Name: At_stm_Mutants_cDNA_P Parameter: Plant Line Value: wt Landsburg vs stm
  misc_feature: MA Experiment 108435 PARAMETER Experiment Name: At_stm_Mutants_cDNA_P Parameter: Tissue Value: Shoot Apical Meristem Region
  misc_feature: MA Experiment ID: 108488 Result: Down-regulated in Transcription
  misc_feature: MA Experiment ID: 108573 Result: Up-regulated in Transcription
  misc_feature: MA Experiment 108573 PARAMETER Experiment Name: At_Drought_cDNA_P Parameter: Timepoint (hr) Value: 6
  misc_feature: MA Experiment 108573 PARAMETER Experiment Name: At_Drought_cDNA_P Parameter: Tissue Value: Aerial
  misc_feature: MA Experiment 108573 PARAMETER Experiment Name: At_Drought_cDNA_P Parameter: Treatment Value: Drought vs. No Drought
  misc_feature: MA Experiment ID: 108574 Result: Up-regulated in Transcription
  misc_feature: MA Experiment 108574 PARAMETER Experiment Name: At_Wounding__cDNA_P Parameter: Timepoint (hr) Value: 1
  misc_feature: MA Experiment 108574 PARAMETER Experiment Name: At_Wounding__cDNA_P Parameter: Tissue Value: Aerial
  misc_feature: MA Experiment 108574 PARAMETER Experiment Name: At_Wounding__cDNA_P Parameter: Treatment Value: Wounding vs. No Wounding
  misc_feature: MA Experiment ID: 108577 Result: Down-regulated in Transcription
  misc_feature: MA Experiment 108577 PARAMETER Experiment Name: At_42deg_Heat_cDNA_P Parameter: Temperature (deg C) Value: 42 vs. 22
  misc_feature: MA Experiment 108577 PARAMETER Experiment Name: At_42deg_Heat_cDNA_P Parameter: Timepoint (hr) Value: 6
  misc_feature: MA Experiment 108577 PARAMETER Experiment Name: At_42deg_Heat_cDNA_P Parameter: Tissue Value: Aerial
  misc_feature: MA Experiment ID: 108579 Result: Up-regulated in Transcription
  misc_feature: MA Experiment 108579 PARAMETER Experiment Name: At_4deg_Cold_cDNA_P Parameter: Temperature (deg C) Value: 4 vs. 22
  misc_feature: MA Experiment 108579 PARAMETER Experiment Name: At_4deg_Cold_cDNA_P Parameter: Timepoint (hr) Value: 6
  misc_feature: MA Experiment 108579 PARAMETER Experiment Name: At_4deg_Cold_cDNA_P Parameter: Tissue Value: Aerial
  misc_feature: MA Experiment ID: 108594 Result: Up-regulated in Transcription
  misc_feature: MA Experiment 108594 PARAMETER Experiment Name: At_Ler-rhl_Root_cDNA_P Parameter: Plant Line Value: null
  misc_feature: MA Experiment ID: 108595 Result: Down-regulated in Transcription
  misc_feature: MA Experiment 108595 PARAMETER Experiment Name: At_Ler-pi_Ovule_cDNA_P Parameter: Plant Line Value: null
  misc_feature: MA Experiment ID: 20000069 Result: Up-regulated in Transcription
  misc_feature: MA Experiment 20000069 PARAMETER Experiment Name: At_100uM_ABA_Mutants_cDNA_P Parameter: Plant Line Value: CS23
  misc_feature: MA Experiment 20000069 PARAMETER Experiment Name: At_100uM_ABA_Mutants_cDNA_P Parameter: Timepoint (hr) Value: 6
  misc_feature: MA Experiment 20000069 PARAMETER Experiment Name: At_100uM_ABA_Mutants_cDNA_P Parameter: Tissue Value: Aerial
  misc_feature: MA Experiment 20000069 PARAMETER Experiment Name: At_100uM_ABA_Mutants_cDNA_P Parameter: Treatment Value: 100uM ABA vs. No Treatment
  misc_feature: MA Experiment ID: 20000070 Result: Up-regulated in Transcription
  misc_feature: MA Experiment 20000070 PARAMETER Experiment Name: At_100uM_ABA_Mutants_cDNA_P Parameter: Plant Line Value: CS24
  misc_feature: MA Experiment 20000070 PARAMETER Experiment Name: At_100uM_ABA_Mutants_cDNA_P Parameter: Timepoint (hr) Value: 6
  misc_feature: MA Experiment 20000070 PARAMETER Experiment Name: At_100uM_ABA_Mutants_cDNA_P Parameter: Tissue Value: Aerial
  misc_feature: MA Experiment 20000070 PARAMETER Experiment Name: At_100uM_ABA_Mutants_cDNA_P Parameter: Treatment Value: 100uM ABA vs. No Treatment
  misc_feature: MA Experiment ID: 20000071 Result: Up-regulated in Transcription
  misc_feature: MA Experiment 20000071 PARAMETER Experiment Name: At_100uM_ABA_Mutants_cDNA_P Parameter: Plant Line Value: CS8104
  misc_feature: MA Experiment 20000071 PARAMETER Experiment Name: At_100uM_ABA_Mutants_cDNA_P Parameter: Timepoint (hr) Value: 6
  misc_feature: MA Experiment 20000071 PARAMETER Experiment Name: At_100uM_ABA_Mutants_cDNA_P Parameter: Tissue Value: Aerial
  misc_feature: MA Experiment 20000071 PARAMETER Experiment Name: At_100uM_ABA_Mutants_cDNA_P Parameter: Treatment Value: 100uM ABA vs. No Treatment
  misc_feature: MA Experiment ID: 20000072 Result: Up-regulated in Transcription
  misc_feature: MA Experiment 20000072 PARAMETER Experiment Name: At_100uM_ABA_Mutants_cDNA_P Parameter: Plant Line Value: CS8105
  misc_feature: MA Experiment 20000072 PARAMETER Experiment Name: At_100uM_ABA_Mutants_cDNA_P Parameter: Timepoint (hr) Value: 6
  misc_feature: MA Experiment 20000072 PARAMETER Experiment Name: At_100uM_ABA_Mutants_cDNA_P Parameter: Tissue Value: Aerial
  misc_feature: MA Experiment 20000072 PARAMETER Experiment Name: At_100uM_ABA_Mutants_cDNA_P Parameter: Treatment Value: 100uM ABA vs. No Treatment
  misc_feature: MA Experiment ID: 20000086 Result: Up-regulated in Transcription
  misc_feature: MA Experiment 20000086 PARAMETER Experiment Name: At_100uM_ABA_Mutants_cDNA_P Parameter: Plant Line Value: CS22
  misc_feature: MA Experiment 20000086 PARAMETER Experiment Name: At_100uM_ABA_Mutants_cDNA_P Parameter: Timepoint (hr) Value: 6
  misc_feature: MA Experiment 20000086 PARAMETER Experiment Name: At_100uM_ABA_Mutants_cDNA_P Parameter: Tissue Value: Aerial
  misc_feature: MA Experiment 20000086 PARAMETER Experiment Name: At_100uM_ABA_Mutants_cDNA_P Parameter: Treatment Value: 100uM ABA vs. No Treatment
  misc_feature: MA Experiment ID: 20000087 Result: Up-regulated in Transcription
  misc_feature: MA Experiment 20000087 PARAMETER Experiment Name: At_100uM_ABA_Mutants_cDNA_P Parameter: Plant Line Value: WS
  misc_feature: MA Experiment 20000087 PARAMETER Experiment Name: At_100uM_ABA_Mutants_cDNA_P Parameter: Timepoint (hr) Value: 6
  misc_feature: MA Experiment 20000087 PARAMETER Experiment Name: At_100uM_ABA_Mutants_cDNA_P Parameter: Tissue Value: Aerial
  misc_feature: MA Experiment 20000087 PARAMETER Experiment Name: At_100uM_ABA_Mutants_cDNA_P Parameter: Treatment Value: 100uM ABA vs. No Treatment
  misc_feature: MA Experiment ID: 20000088 Result: Up-regulated in Transcription
  misc_feature: MA Experiment 20000088 PARAMETER Experiment Name: At_100uM_ABA_Mutants_cDNA_P Parameter: Plant Line Value: Landsberg
  misc_feature: MA Experiment 20000088 PARAMETER Experiment Name: At_100uM_ABA_Mutants_cDNA_P Parameter: Timepoint (hr) Value: 6
  misc_feature: MA Experiment 20000088 PARAMETER Experiment Name: At_100uM_ABA_Mutants_cDNA_P Parameter: Tissue Value: Aerial
  misc_feature: MA Experiment 20000088 PARAMETER Experiment Name: At_100uM_ABA_Mutants_cDNA_P Parameter: Treatment Value: 100uM ABA vs. No Treatment
  misc_feature: MA Experiment ID: 20000090 Result: Up-regulated in Transcription
  misc_feature: MA Experiment ID: 20000112 Result: Up-regulated in Transcription
  misc_feature: MA Experiment 20000112 PARAMETER Experiment Name: At_42deg_Heat_cDNA_P Parameter: Temperature (deg C) Value: 42 vs. 22
  misc_feature: MA Experiment 20000112 PARAMETER Experiment Name: At_42deg_Heat_cDNA_P Parameter: Timepoint (hr) Value: 2
  misc_feature: MA Experiment 20000112 PARAMETER Experiment Name: At_42deg_Heat_cDNA_P Parameter: Tissue Value: Aerial
  misc_feature: MA Experiment ID: 20000117 Result: Up-regulated in Transcription
  misc_feature: MA Experiment 20000117 PARAMETER Experiment Name: At_100uM_ABA_Mutants_cDNA_P Parameter: Plant Line Value: Columbia
  misc_feature: MA Experiment 20000117 PARAMETER Experiment Name: At_100uM_ABA_Mutants_cDNA_P Parameter: Timepoint (hr) Value: 6
  misc_feature: MA Experiment 20000117 PARAMETER Experiment Name: At_100uM_ABA_Mutants_cDNA_P Parameter: Tissue Value: Aerial
  misc_feature: MA Experiment 20000117 PARAMETER Experiment Name: At_100uM_ABA_Mutants_cDNA_P Parameter: Treatment Value: 100uM ABA vs. No Treatment
  misc_feature: MA Experiment ID: 20000144 Result: Up-regulated in Transcription
  misc_feature: MA Experiment 20000144 PARAMETER Experiment Name: At_42deg_Heat_cDNA_P Parameter: Temperature (deg C) Value: 42 vs. 22
  misc_feature: MA Experiment 20000144 PARAMETER Experiment Name: At_42deg_Heat_cDNA_P Parameter: Timepoint (hr) Value: 1
  misc_feature: MA Experiment 20000144 PARAMETER Experiment Name: At_42deg_Heat_cDNA_P Parameter: Tissue Value: Aerial
taccattcttctgaaaatgaacacctcagaagccctaagcaccacaatgattttgggcatcacactagaaaaccacaggctgctgtgaagcctgatgctttgaaggagcctccatctattgatgtgcctgcattgtcattggatgagttgaaagaaaagaccgataactttggatcaaagtcattgattggtgaaggatcttacggcagagcctattatgcaaccttgaaagatggaaaggctgtcgcggtgaagaagcttgacaatgcagcggaacctgaatcaaatgttgagttcttgactcaggtctcgagggtttccaagctgaagcacgataattttgttgagctcttcggttattgcgttgaagggaatttccgcattcttgcgtatgagtttgctactatgggatctttacatgacatcttacacgggaggaaaggagtccaaggagcacaaccaggtcctacgcttgactggatccaacgggtcagaatagcagttgatgcagctagaggacttgagtatttgcatgagaaagttcaacctgcagtaatacacagagatattcgatctagcaatgtgcttctctttgaagattttaaagccaagatcgctgattttaatctatcgaaccaatctcctgatatggctgctcgtcttcattctaccagagttttgggaaccttcggttaccacgcaccagagtatgcgatgactggtcaactgacacagaagagtgatgtttatagttttggtgtggtgcttttggagctcttgactggtaggaaacccgtcgatcatacgatgcctcgtggtcaacaaagtcttgttacttgggctactccaaggctaagtgaagacaaagtgaagcaatgtgttgatccaaaactaaagggagaatatcctcctaaagctgttgcaaagctcgctgcagtagcagcattgtgtgtgcaatatgaatcagagtttaggccaaacatgagcattgtggtaaaagctcttcaaccattgttgaggtcatcaacagcagcagctgtaccagtccaggaagcctgattcttctgtgcaatagcaacaatggaagattgggttcggtttcagttgttgccataccgtataaatgtgttcttaaagagagtctttttgtcgaggcttttcttcagttaagagctccaaaagcaccacacc

SEQ ID NO: 22806 - protein, 352 aa, Arabidopsis thaliana
  peptide (1)..(352): Ceres Seq. ID no. 12334604
  misc_feature (1)..(351): Homolog of NCBI NO: 25287594 NR Description: probable protein kinase [imported] - Arabidopsis
  misc_feature (1)..(351): Homolog of NCBI NO: 18406188 NR Description: putative protein kinase
  misc_feature (1)..(352): Homolog of NCBI NO: 30694972 NR Description: serine/threonine protein kinase, putative
  misc_feature (1)..(352): Homolog of NCBI NO: 30694970 NR Description: serine/threonine protein kinase, putative
  misc_feature (1)..(352): Homolog of NCBI NO: 11259776 NR Description: protein kinase-like protein - Arabidopsis
YHSSENEHLRSPKHHNDFGHHTRKPQAAVKPDALKEPPSIDVPALSLDELKEKTDNFGSKSLIGEGSYGRAYYATLKDGKAVAVKKLDNAAEPESNVEFLTQVSRVSKLKHDNFVELFGYCVEGNFRILAYEFATMGSLHDILHGRKGVQGAQPGPTLDWIQRVRIAVDAARGLEYLHEKVQPAVIHRDIRSSNVLLFEDFKAKIADFNLSNQSPDMAARLHSTRVLGTFGYHAPEYAMTGQLTQKSDVYSFGVVLLELLTGRKPVDHTMPRGQQSLVTWATPRLSEDKVKQCVDPKLKGEYPPKAVAKLAAVAALCVQYESEFRPNMSIVVKALQPLLRSSTAAAVPVQEA

SEQ ID NO: 22807 - protein, 217 aa, Arabidopsis thaliana
  peptide (1)..(217): Ceres Seq. ID no. 12334605
  misc_feature (1)..(216): Homolog of NCBI NO: 25287594 NR Description: probable protein kinase [imported] - Arabidopsis
  misc_feature (1)..(216): Homolog of NCBI NO: 18406188 NR Description: putative protein kinase
  misc_feature (1)..(217): Homolog of NCBI NO: 30694972 NR Description: serine/threonine protein kinase, putative
  misc_feature (1)..(217): Homolog of NCBI NO: 30694970 NR Description: serine/threonine protein kinase, putative
  misc_feature (1)..(217): Homolog of NCBI NO: 11259776 NR Description: protein kinase-like protein - Arabidopsis
MGSLHDILHGRKGVQGAQPGPTLDWIQRVRIAVDAARGLEYLHEKVQPAVIHRDIRSSNVLLFEDFKAKIADFNLSNQSPDMAARLHSTRVLGTFGYHAPEYAMTGQLTQKSDVYSFGVVLLELLTGRKPVDHTMPRGQQSLVTWATPRLSEDKVKQCVDPKLKGEYPPKAVAKLAAVAALCVQYESEFRPNMSIVVKALQPLLRSSTAAAVPVQEA

SEQ ID NO: 22808 - DNA, 1253 bp, Arabidopsis thaliana
  misc_feature (1)..(1253): Ceres Seq. ID no. 12338970
  misc_feature: MA Experiment ID: 108462 Result: Up-regulated in Transcription
  misc_feature: MA Experiment 108462 PARAMETER Experiment Name: At_Germinating_Seeds_cDNA_P Parameter: Age (day) Value: 2 vs. 0
  misc_feature: MA Experiment 108462 PARAMETER Experiment Name: At_Germinating_Seeds_cDNA_P Parameter: Tissue Value: Germinating Seeds
  misc_feature: MA Experiment ID: 108463 Result: Up-regulated in Transcription
  misc_feature: MA Experiment 108463 PARAMETER Experiment Name: At_Germinating_Seeds_cDNA_P Parameter: Age (day) Value: 3 vs. 0
  misc_feature: MA Experiment 108463 PARAMETER Experiment Name: At_Germinating_Seeds_cDNA_P Parameter: Tissue Value: Germinating Seeds
  misc_feature: MA Experiment ID: 108464 Result: Up-regulated in Transcription
  misc_feature: MA Experiment 108464 PARAMETER Experiment Name: At_Germinating_Seeds_cDNA_P Parameter: Age (day) Value: 4 vs. 0
  misc_feature: MA Experiment 108464 PARAMETER Experiment Name: At_Germinating_Seeds_cDNA_P Parameter: Tissue Value: Germinating Seeds
  misc_feature: MA Experiment ID: 108595 Result: Down-regulated in Transcription
  misc_feature: MA Experiment 108595 PARAMETER Experiment Name: At_Ler-pi_Ovule_cDNA_P Parameter: Plant Line Value: null
  misc_feature: MA Experiment ID: 108668 Result: Down-regulated in Transcription
  misc_feature: MA Experiment 108668 PARAMETER Experiment Name: At_2mM_SA_cDNA_P Parameter: Plant Line Value: WS
  misc_feature: MA Experiment 108668 PARAMETER Experiment Name: At_2mM_SA_cDNA_P Parameter: Timepoint (hr) Value: 6
  misc_feature: MA Experiment 108668 PARAMETER Experiment Name: At_2mM_SA_cDNA_P Parameter: Treatment Value: 2mM SA vs. No Treatment
  misc_feature: MA Experiment ID: 20000071 Result: Down-regulated in Transcription
  misc_feature: MA Experiment 20000071 PARAMETER Experiment Name: At_100uM_ABA_Mutants_cDNA_P Parameter: Plant Line Value: CS8104
  misc_feature: MA Experiment 20000071 PARAMETER Experiment Name: At_100uM_ABA_Mutants_cDNA_P Parameter: Timepoint (hr) Value: 6
  misc_feature: MA Experiment 20000071 PARAMETER Experiment Name: At_100uM_ABA_Mutants_cDNA_P Parameter: Tissue Value: Aerial
  misc_feature: MA Experiment 20000071 PARAMETER Experiment Name: At_100uM_ABA_Mutants_cDNA_P Parameter: Treatment Value: 100uM ABA vs. No Treatment
  misc_feature: MA Experiment ID: 20000086 Result: Down-regulated in Transcription
  misc_feature: MA Experiment 20000086 PARAMETER Experiment Name: At_100uM_ABA_Mutants_cDNA_P Parameter: Plant Line Value: CS22
  misc_feature: MA Experiment 20000086 PARAMETER Experiment Name: At_100uM_ABA_Mutants_cDNA_P Parameter: Timepoint (hr) Value: 6
  misc_feature: MA Experiment 20000086 PARAMETER Experiment Name: At_100uM_ABA_Mutants_cDNA_P Parameter: Tissue Value: Aerial
  misc_feature: MA Experiment 20000086 PARAMETER Experiment Name: At_100uM_ABA_Mutants_cDNA_P Parameter: Treatment Value: 100uM ABA vs. No Treatment
  misc_feature: MA Experiment ID: 20000089 Result: Down-regulated in Transcription
  misc_feature: MA Experiment ID: 20000090 Result: Down-regulated in Transcription
  misc_feature: MA Experiment ID: 20000113 Result: Down-regulated in Transcription
  misc_feature: MA Experiment 20000113 PARAMETER Experiment Name: At_42deg_Heat_cDNA_P Parameter: Temperature (deg C) Value: 42 vs. 22
  misc_feature: MA Experiment 20000113 PARAMETER Experiment Name: At_42deg_Heat_cDNA_P Parameter: Timepoint (hr) Value: 8
  misc_feature: MA Experiment 20000113 PARAMETER Experiment Name: At_42deg_Heat_cDNA_P Parameter: Tissue Value: Aerial
  misc_feature: MA Experiment ID: 20000117 Result: Down-regulated in Transcription
  misc_feature: MA Experiment 20000117 PARAMETER Experiment Name: At_100uM_ABA_Mutants_cDNA_P Parameter: Plant Line Value: Columbia
  misc_feature: MA Experiment 20000117 PARAMETER Experiment Name: At_100uM_ABA_Mutants_cDNA_P Parameter: Timepoint (hr) Value: 6
  misc_feature: MA Experiment 20000117 PARAMETER Experiment Name: At_100uM_ABA_Mutants_cDNA_P Parameter: Tissue Value: Aerial
  misc_feature: MA Experiment 20000117 PARAMETER Experiment Name: At_100uM_ABA_Mutants_cDNA_P Parameter: Treatment Value: 100uM ABA vs. No Treatment
  misc_feature: MA Experiment ID: 20000495 Result: Down-regulated in Transcription
  misc_feature: MA Experiment 20000495 PARAMETER Experiment Name: At_Guard_Cells_P Parameter: Harvest Date Value: 8/2/2002
  misc_feature: MA Experiment 20000495 PARAMETER Experiment Name: At_Guard_Cells_P Parameter: Organism Value: A. thaliana
  misc_feature: MA Experiment 20000495 PARAMETER Experiment Name: At_Guard_Cells_P Parameter: Tissue Value: Guard Cells vs. Leaves
cttcttggatgcatcagattcgcatcaaagttcgtcagaacagtaacagaatcctcaaacgccgtcattatcgccatcagcgatccatcactcgaaaccgcaaaaaccttcgccaccgggaacaatttatcgccggagaccgtcacgatatacggaagctacgaggagcttttaaacgatgcaaacgtcgacgccgtttacttgacgatgccggtgacgcaacgagcgaaatgggcggtgacggcggcagagaagaagaagcatctgcttgttgagaaaccaccagctcaagacgcgacggagctggagaagattgttgaggcgtgtgaatctaacggtgtgcagtttatggacggtacgatttggttgcatcatcaacggacggttaagattagagatacgatgtttgattctggattgcttggagatgttcgccacatgtatagcacgatgaccactccggtaccggagcaagtattggaaagactgactaaagaagctatgggtttagccggagctatcggagagcttggatggtaccctataggcgcagctttatgggctatgtcttaccaaatgcctatatcggtcagggcacttccctcctctgtctccacaaactcggttggcactatcttgtcctgcactgcctctcttcagttcggttcaaccgcaaccacaaccgcaatcgttcattgctctttcctctctcaactttcaacggacttagctatctcaggctcaaaagggtcgattcaaatgaatgactatgtgataccctacaaggaggacaaagcttggttcgaatacacaagtggtgcgaagtttgtggacatgcacattggttggaatgtgacgccagagagagttacagtggactgtagcggaactccggagacgcaagaggcaatgatgctgagagagttcacgcggcttgtggaaggaatcaagcggggcgacttagaggctgatcgtcggtggccggaggttagtaagaagacgcagttggtggttgatgctgtgaagaaatctgttgatattggttgtgaagtggttcatctgtaaaacttgttgaaatcttctgctaattagattatgatatttatgttagtgtcattgatacatgctttatggtaattaacttttataagtcgaagatgatatgtacttcatatttttatttggcactccatatgtactcaaaactgagatatgttaggtcagtagaagtaggtggagtttaagtttagttc

SEQ ID NO: 22809 - protein, 354 aa, Arabidopsis thaliana
  peptide (1)..(354): Ceres Seq. ID no. 12338971
  misc_feature (1)..(120): Pfam Name: Oxidoreductase family, NAD-binding Rossmann fold Pfam Description: Oxidoreductase family, NAD-binding Rossmann fold
  misc_feature (53)..(348): Homolog of NCBI NO: 5852136 NR Description: putative oxidoreductase [Leishmania major]
  misc_feature (1)..(344): Homolog of NCBI NO: 32474689 NR Description: putative oxidoreductase [Pirellula sp.]
  misc_feature (1)..(348): Homolog of NCBI NO: 17549134 NR Description: CONSERVED HYPOTHETICAL PROTEIN [Ralstonia
  misc_feature (1)..(310): Homolog of NCBI NO: 37534168 NR Description: putative oxidoreductase [Oryza sativa (japonica
  misc_feature (1)..(345): Homolog of NCBI NO: 7488933 NR Description: protein AX110P - carrot
  misc_feature (1)..(354): Homolog of NCBI NO: 25518452 NR Description: hypothetical protein F23M19.12 [imported] -
  misc_feature (1)..(354): Homolog of NCBI NO: 18399170 NR Description: expressed protein
  misc_feature (20)..(354): Homolog of NCBI NO: 21954073 NR Description: putative AX110P protein [Arabidopsis thaliana]
  misc_feature (1)..(354): Homolog of NCBI NO: 15233990 NR Description: AX110P -like protein
  misc_feature (1)..(354): Homolog of NCBI NO: 15218937 NR Description: oxidoreductase, putative; protein id: At1g66130.1
LLGCIRFASKFVRTVTESSNAVIIAISDPSLETAKTFATGNNLSPETVTIYGSYEELLNDANVDAVYLTMPVTQRAKWAVTAAEKKKHLLVEKPPAQDATELEKIVEACESNGVQFMDGTIWLHHQRTVKIRDTMFDSGLLGDVRHMYSTMTTPVPEQVLERLTKEAMGLAGAIGELGWYPIGAALWAMSYQMPISVRALPSSVSTNSVGTILSCTASLQFGSTATTTAIVHCSFLSQLSTDLAISGSKGSIQMNDYVIPYKEDKAWFEYTSGAKFVDMHIGWNVTPERVTVDCSGTPETQEAMMLREFTRLVEGIKRGDLEADRRWPEVSKKTQLVVDAVKKSVDIGCEVVHL

SEQ ID NO: 22810 - protein, 285 aa, Arabidopsis thaliana
  peptide (1)..(285): Ceres Seq. ID no. 12338973
  misc_feature (1)..(51): Pfam Name: Oxidoreductase family, NAD-binding Rossmann fold Pfam Description: Oxidoreductase family, NAD-binding Rossmann fold
  misc_feature (1)..(279): Homolog of NCBI NO: 5852136 NR Description: putative oxidoreductase [Leishmania major]
  misc_feature (1)..(275): Homolog of NCBI NO: 32474689 NR Description: putative oxidoreductase [Pirellula sp.]
  misc_feature (1)..(279): Homolog of NCBI NO: 17549134 NR Description: CONSERVED HYPOTHETICAL PROTEIN [Ralstonia
  misc_feature (1)..(241): Homolog of NCBI NO: 37534168 NR Description: putative oxidoreductase [Oryza sativa (japonica
  misc_feature (1)..(276): Homolog of NCBI NO: 7488933 NR Description: protein AX110P - carrot
  misc_feature (1)..(285): Homolog of NCBI NO: 25518452 NR Description: hypothetical protein F23M19.12 [imported] -
  misc_feature (1)..(285): Homolog of NCBI NO: 18399170 NR Description: expressed protein
  misc_feature (1)..(285): Homolog of NCBI NO: 21954073 NR Description: putative AX110P protein [Arabidopsis thaliana]
  misc_feature (1)..(285): Homolog of NCBI NO: 15233990 NR Description: AX110P -like protein
  misc_feature (1)..(285): Homolog of NCBI NO: 15218937 NR Description: oxidoreductase, putative; protein id: At1g66130.1
MPVTQRAKWAVTAAEKKKHLLVEKPPAQDATELEKIVEACESNGVQFMDGTIWLHHQRTVKIRDTMFDSGLLGDVRHMYSTMTTPVPEQVLERLTKEAMGLAGAIGELGWYPIGAALWAMSYQMPISVRALPSSVSTNSVGTILSCTASLQFGSTATTTAIVHCSFLSQLSTDLAISGSKGSIQMNDYVIPYKEDKAWFEYTSGAKFVDMHIGWNVTPERVTVDCSGTPETQEAMMLREFTRLVEGIKRGDLEADRRWPEVSKKTQLVVDAVKKSVDIGCEVVHL

SEQ ID NO: 22811 - protein, 238 aa, Arabidopsis thaliana
  peptide (1)..(238): Ceres Seq. ID no. 12338974
  misc_feature (16)..(129): Pfam Name: Oxidoreductase family, C-terminal alpha/beta domain Pfam Description: Oxidoreductase family, C-terminal alpha/beta
  misc_feature (1)..(232): Homolog of NCBI NO: 17549134 NR Description: CONSERVED HYPOTHETICAL PROTEIN [Ralstonia
  misc_feature (1)..(194): Homolog of NCBI NO: 37534168 NR Description: putative oxidoreductase [Oryza sativa (japonica
  misc_feature (1)..(229): Homolog of NCBI NO: 7488933 NR Description: protein AX110P - carrot
  misc_feature (1)..(238): Homolog of NCBI NO: 25518452 NR Description: hypothetical protein F23M19.12 [imported] -
  misc_feature (1)..(232): Homolog of NCBI NO: 5852136 NR Description: putative oxidoreductase [Leishmania major]
  misc_feature (1)..(228): Homolog of NCBI NO: 32474689 NR Description: putative oxidoreductase [Pirellula sp.]
  misc_feature (1)..(238): Homolog of NCBI NO: 18399170 NR Description: expressed protein
  misc_feature (1)..(238): Homolog of NCBI NO: 21954073 NR Description: putative AX110P protein [Arabidopsis thaliana]
  misc_feature (1)..(238): Homolog of NCBI NO: 15233990 NR Description: AX110P -like protein
  misc_feature (1)..(238): Homolog of NCBI NO: 15218937 NR Description: oxidoreductase, putative; protein id: At1g66130.1
MDGTIWLHHQRTVKIRDTMFDSGLLGDVRHMYSTMTTPVPEQVLERLTKEAMGLAGAIGELGWYPIGAALWAMSYQMPISVRALPSSVSTNSVGTILSCTASLQFGSTATTTAIVHCSFLSQLSTDLAISGSKGSIQMNDYVIPYKEDKAWFEYTSGAKFVDMHIGWNVTPERVTVDCSGTPETQEAMMLREFTRLVEGIKRGDLEADRRWPEVSKKTQLVVDAVKKSVDIGCEVVHL

SEQ ID NO: 22812 - DNA, 1393 bp, Arabidopsis thaliana
  misc_feature (1)..(1393): Ceres Seq. ID no. 13490612
  misc_feature: MA Experiment ID: 108473 Result: Down-regulated in Transcription
  misc_feature: MA Experiment 108473 PARAMETER Experiment Name: At_Drought_Flowers_cDNA_P Parameter: Timepoint (hr) Value: 7 d
  misc_feature: MA Experiment 108473 PARAMETER Experiment Name: At_Drought_Flowers_cDNA_P Parameter: Tissue Value: Flower
  misc_feature: MA Experiment 108473 PARAMETER Experiment Name: At_Drought_Flowers_cDNA_P Parameter: Treatment Value: Drought vs. No Drought
  misc_feature: MA Experiment ID: 108501 Result: Down-regulated in Transcription
  misc_feature: MA Experiment 108501 PARAMETER Experiment Name: At_ap2_floral_buds_cDNA_P Parameter: Plant Line Value: ap2 (Ler.)
  misc_feature: MA Experiment 108501 PARAMETER Experiment Name: At_ap2_floral_buds_cDNA_P Parameter: Tissue Value: Closed Flower
  misc_feature: MA Experiment ID: 20000069 Result: Down-regulated in Transcription
  misc_feature: MA Experiment 20000069 PARAMETER Experiment Name: At_100uM_ABA_Mutants_cDNA_P Parameter: Plant Line Value: CS23
  misc_feature: MA Experiment 20000069 PARAMETER Experiment Name: At_100uM_ABA_Mutants_cDNA_P Parameter: Timepoint (hr) Value: 6
  misc_feature: MA Experiment 20000069 PARAMETER Experiment Name: At_100uM_ABA_Mutants_cDNA_P Parameter: Tissue Value: Aerial
  misc_feature: MA Experiment 20000069 PARAMETER Experiment Name: At_100uM_ABA_Mutants_cDNA_P Parameter: Treatment Value: 100uM ABA vs. No Treatment
  misc_feature: MA Experiment ID: 20000093 Result: Down-regulated in Transcription
  misc_feature: MA Experiment 20000093 PARAMETER Experiment Name: At_42deg_Heat_cDNA_P Parameter: Temperature (deg C) Value: 42 vs. 22
  misc_feature: MA Experiment 20000093 PARAMETER Experiment Name: At_42deg_Heat_cDNA_P Parameter: Timepoint (hr) Value: 0.5
  misc_feature: MA Experiment 20000093 PARAMETER Experiment Name: At_42deg_Heat_cDNA_P Parameter: Tissue Value: Aerial
  misc_feature: MA Experiment ID: 20000111 Result: Down-regulated in Transcription
  misc_feature: MA Experiment 20000111 PARAMETER Experiment Name: At_42deg_Heat_cDNA_P Parameter: Temperature (deg C) Value: 42 vs. 22
  misc_feature: MA Experiment 20000111 PARAMETER Experiment Name: At_42deg_Heat_cDNA_P Parameter: Timepoint (hr) Value: 6
  misc_feature: MA Experiment 20000111 PARAMETER Experiment Name: At_42deg_Heat_cDNA_P Parameter: Tissue Value: Aerial
  misc_feature: MA Experiment ID: 20000112 Result: Down-regulated in Transcription
  misc_feature: MA Experiment 20000112 PARAMETER Experiment Name: At_42deg_Heat_cDNA_P Parameter: Temperature (deg C) Value: 42 vs. 22
  misc_feature: MA Experiment 20000112 PARAMETER Experiment Name: At_42deg_Heat_cDNA_P Parameter: Timepoint (hr) Value: 2
  misc_feature: MA Experiment 20000112 PARAMETER Experiment Name: At_42deg_Heat_cDNA_P Parameter: Tissue Value: Aerial
  misc_feature: MA Experiment ID: 20000117 Result: Down-regulated in Transcription
  misc_feature: MA Experiment 20000117 PARAMETER Experiment Name: At_100uM_ABA_Mutants_cDNA_P Parameter: Plant Line Value: Columbia
  misc_feature: MA Experiment 20000117 PARAMETER Experiment Name: At_100uM_ABA_Mutants_cDNA_P Parameter: Timepoint (hr) Value: 6
  misc_feature: MA Experiment 20000117 PARAMETER Experiment Name: At_100uM_ABA_Mutants_cDNA_P Parameter: Tissue Value: Aerial
  misc_feature: MA Experiment 20000117 PARAMETER Experiment Name: At_100uM_ABA_Mutants_cDNA_P Parameter: Treatment Value: 100uM ABA vs. No Treatment
  misc_feature: MA Experiment ID: 20000185 Result: Down-regulated in Transcription
  misc_feature: MA Experiment 20000185 PARAMETER Experiment Name: At_Roots__P Parameter: Age (day) Value: 7 vs. 21
  misc_feature: MA Experiment 20000185 PARAMETER Experiment Name: At_Roots__P Parameter: Organism Value: A. thaliana
  misc_feature: MA Experiment 20000185 PARAMETER Experiment Name: At_Roots__P Parameter: Tissue Value: Roots vs. Whole Plant
  misc_feature: MA Experiment ID: 20000234 Result: Up-regulated in Transcription
  misc_feature: MA Experiment 20000234 PARAMETER Experiment Name: At_Siliques_P Parameter: Age (day) Value: 21
  misc_feature: MA Experiment 20000234 PARAMETER Experiment Name: At_Siliques_P Parameter: Organism Value: A. thaliana
  misc_feature: MA Experiment 20000234 PARAMETER Experiment Name: At_Siliques_P Parameter: Plant Line Value: WS
  misc_feature: MA Experiment 20000234 PARAMETER Experiment Name: At_Siliques_P Parameter: Tissue Value: Less Than 5mm Siliques vs. Whole Plant
  misc_feature: MA Experiment ID: 20000265 Result: Up-regulated in Transcription
  misc_feature: MA Experiment 20000265 PARAMETER Experiment Name: At_Open_Flower_P Parameter: Age (day) Value: 21
  misc_feature: MA Experiment 20000265 PARAMETER Experiment Name: At_Open_Flower_P Parameter: Plant Line Value: WS
  misc_feature: MA Experiment 20000265 PARAMETER Experiment Name: At_Open_Flower_P Parameter: Tissue Value: Closed Flower vs. Whole Plant
  misc_feature: MA Experiment ID: 20000286 Result: Up-regulated in Transcription
  misc_feature: MA Experiment 20000286 PARAMETER Experiment Name: At_Open_Flower_P Parameter: Age (day) Value: 21
  misc_feature: MA Experiment 20000286 PARAMETER Experiment Name: At_Open_Flower_P Parameter: Plant Line Value: WS
  misc_feature: MA Experiment 20000286 PARAMETER Experiment Name: At_Open_Flower_P Parameter: Tissue Value: Half Open vs. Whole Plant
  misc_feature: MA Experiment ID: 20000439 Result: Down-regulated in Transcription
  misc_feature: MA Experiment 20000439 PARAMETER Experiment Name: At_Roots__P Parameter: Age (day) Value: 14 vs. 21
  misc_feature: MA Experiment 20000439 PARAMETER Experiment Name: At_Roots__P Parameter: Organism Value: A. thaliana
  misc_feature: MA Experiment 20000439 PARAMETER Experiment Name: At_Roots__P Parameter: Tissue Value: Roots vs. Whole Plant
  misc_feature: MA Experiment ID: 20001248 Result: Down-regulated in Transcription
  misc_feature: MA Experiment 20001248 PARAMETER Experiment Name: At_Far-red-induction_P Parameter: Age (day) Value: 7
  misc_feature: MA Experiment 20001248 PARAMETER Experiment Name: At_Far-red-induction_P Parameter: Light Value: Far-red vs. White
  misc_feature: MA Experiment 20001248 PARAMETER Experiment Name: At_Far-red-induction_P Parameter: Organism Value: A. thaliana
  misc_feature: MA Experiment 20001248 PARAMETER Experiment Name: At_Far-red-induction_P Parameter: Plant Line Value: Columbia
  misc_feature: MA Experiment 20001248 PARAMETER Experiment Name: At_Far-red-induction_P Parameter: Timepoint (hr) Value: 4
  misc_feature: MA Experiment 20001248 PARAMETER Experiment Name: At_Far-red-induction_P Parameter: Tissue Value: Whole Plant
  misc_feature: MA Experiment ID: 20001450 Result: Down-regulated in Transcription
  misc_feature: MA Experiment 20001450 PARAMETER Experiment Name: At_Far-red-induction_P Parameter: Age (day) Value: 7
  misc_feature: MA Experiment 20001450 PARAMETER Experiment Name: At_Far-red-induction_P Parameter: Light Value: Far-red vs. White
  misc_feature: MA Experiment 20001450 PARAMETER Experiment Name: At_Far-red-induction_P Parameter: Organism Value: A. thaliana
  misc_feature: MA Experiment 20001450 PARAMETER Experiment Name: At_Far-red-induction_P Parameter: Plant Line Value: Columbia
  misc_feature: MA Experiment 20001450 PARAMETER Experiment Name: At_Far-red-induction_P Parameter: Timepoint (hr) Value: 8
  misc_feature: MA Experiment 20001450 PARAMETER Experiment Name: At_Far-red-induction_P Parameter: Tissue Value: Whole Plant
  misc_feature: MA Experiment ID: 20001451 Result: Down-regulated in Transcription
  misc_feature: MA Experiment 20001451 PARAMETER Experiment Name: At_Far-red-induction_P Parameter: Age (day) Value: 7
  misc_feature: MA Experiment 20001451 PARAMETER Experiment Name: At_Far-red-induction_P Parameter: Light Value: Far-red vs. White
  misc_feature: MA Experiment 20001451 PARAMETER Experiment Name: At_Far-red-induction_P Parameter: Organism Value: A. thaliana
  misc_feature: MA Experiment 20001451 PARAMETER Experiment Name: At_Far-red-induction_P Parameter: Plant Line Value: Columbia
  misc_feature: MA Experiment 20001451 PARAMETER Experiment Name: At_Far-red-induction_P Parameter: Timepoint (hr) Value: 24
  misc_feature: MA Experiment 20001451 PARAMETER Experiment Name: At_Far-red-induction_P Parameter: Tissue Value: Whole Plant
  misc_feature: MA Experiment ID: 20001555 Result: Down-regulated in Transcription
  misc_feature: MA Experiment 20001555 PARAMETER Experiment Name: At_Drought_Soil_Dry_P Parameter: Age (day) Value: 24
  misc_feature: MA Experiment 20001555 PARAMETER Experiment Name: At_Drought_Soil_Dry_P Parameter: Organism Value: A. thaliana
  misc_feature: MA Experiment 20001555 PARAMETER Experiment Name: At_Drought_Soil_Dry_P Parameter: Plant Line Value: WS
  misc_feature: MA Experiment 20001555 PARAMETER Experiment Name: At_Drought_Soil_Dry_P Parameter: Post Timepoint (hr) Value: None
  misc_feature: MA Experiment 20001555 PARAMETER Experiment Name: At_Drought_Soil_Dry_P Parameter: Post-Treatment Value: None
  misc_feature: MA Experiment 20001555 PARAMETER Experiment Name: At_Drought_Soil_Dry_P Parameter: Timepoint (day) Value: 10
  misc_feature: MA Experiment 20001555 PARAMETER Experiment Name: At_Drought_Soil_Dry_P Parameter: Treatment Value: Drought vs. No Drought
  misc_feature: MA Experiment ID: 20001556 Result: Down-regulated in Transcription
  misc_feature: MA Experiment 20001556 PARAMETER Experiment Name: At_Drought_Soil_Dry_P Parameter: Age (day) Value: 26
  misc_feature: MA Experiment 20001556 PARAMETER Experiment Name: At_Drought_Soil_Dry_P Parameter: Organism Value: A. thaliana
  misc_feature: MA Experiment 20001556 PARAMETER Experiment Name: At_Drought_Soil_Dry_P Parameter: Plant Line Value: WS
  misc_feature: MA Experiment 20001556 PARAMETER Experiment Name: At_Drought_Soil_Dry_P Parameter: Post Timepoint (hr) Value: None
  misc_feature: MA Experiment 20001556 PARAMETER Experiment Name: At_Drought_Soil_Dry_P Parameter: Post-Treatment Value: None
  misc_feature: MA Experiment 20001556 PARAMETER Experiment Name: At_Drought_Soil_Dry_P Parameter: Timepoint (day) Value: 12
  misc_feature: MA Experiment 20001556 PARAMETER Experiment Name: At_Drought_Soil_Dry_P Parameter: Treatment Value: Drought vs. No Drought
  misc_feature: MA Experiment ID: 20001557 Result: Down-regulated in Transcription
  misc_feature: MA Experiment 20001557 PARAMETER Experiment Name: At_Drought_Soil_Dry_P Parameter: Age (day) Value: 27
  misc_feature: MA Experiment 20001557 PARAMETER Experiment Name: At_Drought_Soil_Dry_P Parameter: Organism Value: A. thaliana
  misc_feature: MA Experiment 20001557 PARAMETER Experiment Name: At_Drought_Soil_Dry_P Parameter: Plant Line Value: WS
  misc_feature: MA Experiment 20001557 PARAMETER Experiment Name: At_Drought_Soil_Dry_P Parameter: Post Timepoint (hr) Value: 3
  misc_feature: MA Experiment 20001557 PARAMETER Experiment Name: At_Drought_Soil_Dry_P Parameter: Post-Treatment Value: Re-Water vs. No Drought
  misc_feature: MA Experiment 20001557 PARAMETER Experiment Name: At_Drought_Soil_Dry_P Parameter: Timepoint (day) Value: 13
  misc_feature: MA Experiment 20001557 PARAMETER Experiment Name: At_Drought_Soil_Dry_P Parameter: Treatment Value: Drought vs. No Drought
  misc_feature: MA Experiment ID: 20001559 Result: Down-regulated in Transcription
  misc_feature: MA Experiment 20001559 PARAMETER Experiment Name: At_Drought_Soil_Dry_P Parameter: Age (day) Value: 28
  misc_feature: MA Experiment 20001559 PARAMETER Experiment Name: At_Drought_Soil_Dry_P Parameter: Organism Value: A. thaliana
  misc_feature: MA Experiment 20001559 PARAMETER Experiment Name: At_Drought_Soil_Dry_P Parameter: Plant Line Value: WS
  misc_feature: MA Experiment 20001559 PARAMETER Experiment Name: At_Drought_Soil_Dry_P Parameter: Post Timepoint (hr) Value: 29
  misc_feature: MA Experiment 20001559 PARAMETER Experiment Name: At_Drought_Soil_Dry_P Parameter: Post-Treatment Value: Re-Water vs. No Drought
  misc_feature: MA Experiment 20001559 PARAMETER Experiment Name: At_Drought_Soil_Dry_P Parameter: Timepoint (day) Value: 14
  misc_feature: MA Experiment 20001559 PARAMETER Experiment Name: At_Drought_Soil_Dry_P Parameter: Treatment Value: Drought vs. No Drought
  misc_feature: MA Experiment ID: 20001773 Result: Up-regulated in Transcription
  misc_feature: MA Experiment 20001773 PARAMETER Experiment Name: At_Far-red-enriched-adult_P Parameter: Age (day) Value: 30
  misc_feature: MA Experiment 20001773 PARAMETER Experiment Name: At_Far-red-enriched-adult_P Parameter: Light Value: Far-red enriched vs. White
  misc_feature: MA Experiment 20001773 PARAMETER Experiment Name: At_Far-red-enriched-adult_P Parameter: Organism Value: A. thaliana
  misc_feature: MA Experiment 20001773 PARAMETER Experiment Name: At_Far-red-enriched-adult_P Parameter: Plant Line Value: Columbia
  misc_feature: MA Experiment 20001773 PARAMETER Experiment Name: At_Far-red-enriched-adult_P Parameter: Timepoint (hr) Value: 48
  misc_feature: MA Experiment 20001773 PARAMETER Experiment Name: At_Far-red-enriched-adult_P Parameter: Tissue Value: Aerial
  misc_feature: MA Experiment ID: 20001906 Result: Down-regulated in Transcription
  misc_feature: MA Experiment 20001906 PARAMETER Experiment Name: At_Drought_Reproduction_P Parameter: Age (day) Value: 35
  misc_feature: MA Experiment 20001906 PARAMETER Experiment Name: At_Drought_Reproduction_P Parameter: Organism Value: A. thaliana
  misc_feature: MA Experiment 20001906 PARAMETER Experiment Name: At_Drought_Reproduction_P Parameter: Plant Line Value: WS
  misc_feature: MA Experiment 20001906 PARAMETER Experiment Name: At_Drought_Reproduction_P Parameter: Timepoint (day) Value: 5
  misc_feature: MA Experiment 20001906 PARAMETER Experiment Name: At_Drought_Reproduction_P Parameter: Tissue Value: Siliques
  misc_feature: MA Experiment 20001906 PARAMETER Experiment Name: At_Drought_Reproduction_P Parameter: Treatment Value: Drought vs. No Drought
aacattctcatttcatagcaaaacaccaaaacagagttcacagaaacatattcaaagatttttcacaaatattaccattttaaatctataaacaatgacgaactcggtggctaagttggcactactagggttttgcattctgcaagtgacgagcttacttgttccgcaagcaaatgctagggctttccttgtgtttggagattctctcgttgacaatggtaacaatgactttcttgctaccactgctcgtgccgataattacccttatggtatcgatttcccaactcatcgtcctacgggccgtttctccaatggtctaaacattccagatctcatcagtgaacatttgggtcaagagtctccaatgccgtaccttagtccaatgctgaagaaggacaaactcttaaggggagctaacttcgcctccgcgggtattggaatccttaacgacaccggaatccagtttctgaatattattaggatcacaaagcagctagagtacttcgagcagtacaaggttcgagtaagcgggttggtcggagaagaagagatgaatcggctcgtgaacggagctcttgtcctaataacacttggaggcaatgatttcgtcaacaactactacttggtccctttctctgcaagatctcgtcaattctctcttcctgactacgttgtctttgtcatttctgaataccgcaaagtcttacggaaaatgtacgatttgggtgctcgacgtgtccttgtgactggaacaggaccaatgggttgcgtcccggccgagctggcgcaacgtagccgcaacggcgagtgtgctaccgaactccaacgagccgcgtcactattcaacccacaactaattcaaatgataacagacctcaacaacgaagttggatcttcggccttcattgccgctaatactcaacaaatgcacatggacttcattagcgacccacaagcatatggattcgtcacgtcgaaggtggcttgttgtggacaagggccgtacaatgggatagggctatgcactccattatcaaatctttgcccaaacagagatctctttgccttttgggatccttttcacccatcagaaaaagcaagtagaatcatagctcaacaaatcctcaatggctctcctgaatacatgcatcccatgaatcttagcaccatcctcaccgttgattccatgacctaagcttctattcctcatctatcccaaatccactttatgctttgtttttgttttgcctttctcgtttattatatatttttacattggcactttaattagtttccttgagttatgttgtgagttttgtgttgttcatcaataattagtcaccaattgtgagctgagaagtaatattcaacaatcttacgaatgttcactatc

SEQ ID NO: 22813 - protein, 366 aa, Arabidopsis thaliana
  peptide (1)..(366): Ceres Seq. ID no. 13490613
  misc_feature (31)..(343): Pfam Name: GDSL-like Lipase/Acylhydrolase Pfam Description: GDSL-like Lipase/Acylhydrolase
  misc_feature (30)..(359): Homolog of NCBI NO: 15227849 NR Description: GDSL-motif lipase/hydrolase protein [Arabidopsis
  misc_feature (18)..(190): Homolog of NCBI NO: 37789825 NR Description: putative GDSL-motif lipase [Vitis vinifera]
  misc_feature (1)..(362): Homolog of NCBI NO: 15238814 NR Description: GDSL-motif lipase/hydrolase protein [Arabidopsis
  misc_feature (16)..(364): Homolog of NCBI NO: 15235421 NR Description: GDSL-motif lipase/hydrolase protein [Arabidopsis
  misc_feature (24)..(364): Homolog of NCBI NO: 22758315 NR Description: putative early nodulin gene (Enod) related
  misc_feature (1)..(364): Homolog of NCBI NO: 37535146 NR Description: putative early nodulin gene (Enod) related
  misc_feature (9)..(363): Homolog of NCBI NO: 32489520 NR Description: OSJNBa0043L24.11 [Oryza sativa (japonica
  misc_feature (25)..(366): Homolog of NCBI NO: 28071322 NR Description: P0705A05.30 [Oryza sativa (japonica
  misc_feature (11)..(364): Homolog of NCBI NO: 15229265 NR Description: GDSL-motif lipase/hydrolase protein [Arabidopsis
  misc_feature (1)..(366): Homolog of NCBI NO: 15242808 NR Description: GDSL-motif lipase/hydrolase protein [Arabidopsis
MTNSVAKLALLGFCILQVTSLLVPQANARAFLVFGDSLVDNGNNDFLATTARADNYPYGIDFPTHRPTGRFSNGLNIPDLISEHLGQESPMPYLSPMLKKDKLLRGANFASAGIGILNDTGIQFLNIIRITKQLEYFEQYKVRVSGLVGEEEMNRLVNGALVLITLGGNDFVNNYYLVPFSARSRQFSLPDYVVFVISEYRKVLRKMYDLGARRVLVTGTGPMGCVPAELAQRSRNGECATELQRAASLFNPQLIQMITDLNNEVGSSAFIAANTQQMHMDFISDPQAYGFVTSKVACCGQGPYNGIGLCTPLSNLCPNRDLFAFWDPFHPSEKASRIIAQQILNGSPEYMHPMNLSTILTVDSMT

SEQ ID NO: 22814 - protein, 276 aa, Arabidopsis thaliana
  peptide (1)..(276): Ceres Seq. ID no. 13490614
  misc_feature (1)..(253): Pfam Name: GDSL-like Lipase/Acylhydrolase Pfam Description: GDSL-like Lipase/Acylhydrolase
  misc_feature (1)..(269): Homolog of NCBI NO: 15227849 NR Description: GDSL-motif lipase/hydrolase protein [Arabidopsis
  misc_feature (1)..(100): Homolog of NCBI NO: 37789825 NR Description: putative GDSL-motif lipase [Vitis vinifera]
  misc_feature (1)..(272): Homolog of NCBI NO: 15238814 NR Description: GDSL-motif lipase/hydrolase protein [Arabidopsis
  misc_feature (1)..(274): Homolog of NCBI NO: 15235421 NR Description: GDSL-motif lipase/hydrolase protein [Arabidopsis
  misc_feature (1)..(274): Homolog of NCBI NO: 22758315 NR Description: putative early nodulin gene (Enod) related
  misc_feature (1)..(274): Homolog of NCBI NO: 37535146 NR Description: putative early nodulin gene (Enod) related
  misc_feature (1)..(273): Homolog of NCBI NO: 32489520 NR Description: OSJNBa0043L24.11 [Oryza sativa (japonica
  misc_feature (1)..(276): Homolog of NCBI NO: 28071322 NR Description: P0705A05.30 [Oryza sativa (japonica
  misc_feature (1)..(274): Homolog of NCBI NO: 15229265 NR Description: GDSL-motif lipase/hydrolase protein [Arabidopsis
  misc_feature (1)..(276): Homolog of NCBI NO: 15242808 NR Description: GDSL-motif lipase/hydrolase protein [Arabidopsis
MPYLSPMLKKDKLLRGANFASAGIGILNDTGIQFLNIIRITKQLEYFEQYKVRVSGLVGEEEMNRLVNGALVLITLGGNDFVNNYYLVPFSARSRQFSLPDYVVFVISEYRKVLRKMYDLGARRVLVTGTGPMGCVPAELAQRSRNGECATELQRAASLFNPQLIQMITDLNNEVGSSAFIAANTQQMHMDFISDPQAYGFVTSKVACCGQGPYNGIGLCTPLSNLCPNRDLFAFWDPFHPSEKASRIIAQQILNGSPEYMHPMNLSTILTVDSMT

SEQ ID NO: 22815 - protein, 270 aa, Arabidopsis thaliana
  peptide (1)..(270): Ceres Seq. ID no. 13490615
  misc_feature (1)..(247): Pfam Name: GDSL-like Lipase/Acylhydrolase Pfam Description: GDSL-like Lipase/Acylhydrolase
  misc_feature (1)..(263): Homolog of NCBI NO: 15227849 NR Description: GDSL-motif lipase/hydrolase protein [Arabidopsis
  misc_feature (1)..(94): Homolog of NCBI NO: 37789825 NR Description: putative GDSL-motif lipase [Vitis vinifera]
  misc_feature (1)..(266): Homolog of NCBI NO: 15238814 NR Description: GDSL-motif lipase/hydrolase protein [Arabidopsis
  misc_feature (1)..(268): Homolog of NCBI NO: 15235421 NR Description: GDSL-motif lipase/hydrolase protein [Arabidopsis
  misc_feature (1)..(268): Homolog of NCBI NO: 22758315 NR Description: putative early nodulin gene (Enod) related
  misc_feature (1)..(268): Homolog of NCBI NO: 37535146 NR Description: putative early nodulin gene (Enod) related
  misc_feature (1)..(267): Homolog of NCBI NO: 32489520 NR Description: OSJNBa0043L24.11 [Oryza sativa (japonica
  misc_feature (1)..(270): Homolog of NCBI NO: 28071322 NR Description: P0705A05.30 [Oryza sativa (japonica
  misc_feature (1)..(268): Homolog of NCBI NO: 15229265 NR Description: GDSL-motif lipase/hydrolase protein [Arabidopsis
  misc_feature (1)..(270): Homolog of NCBI NO: 15242808 NR Description: GDSL-motif lipase/hydrolase protein [Arabidopsis
MLKKDKLLRGANFASAGIGILNDTGIQFLNIIRITKQLEYFEQYKVRVSGLVGEEEMNRLVNGALVLITLGGNDFVNNYYLVPFSARSRQFSLPDYVVFVISEYRKVLRKMYDLGARRVLVTGTGPMGCVPAELAQRSRNGECATELQRAASLFNPQLIQMITDLNNEVGSSAFIAANTQQMHMDFISDPQAYGFVTSKVACCGQGPYNGIGLCTPLSNLCPNRDLFAFWDPFHPSEKASRIIAQQILNGSPEYMHPMNLSTILTVDSMT

SEQ ID NO: 22816 - DNA, 1252 bp, Arabidopsis thaliana
  misc_feature (1)..(1252): Ceres Seq. ID no. 12394465
  misc_feature: MA Experiment ID: 108434 Result: Up-regulated in Transcription
  misc_feature: MA Experiment 108434 PARAMETER Experiment Name: At_Root_Tips_cDNA_P Parameter: Tissue Value: Root Tips
  misc_feature: MA Experiment ID: 108461 Result: Up-regulated in Transcription
  misc_feature: MA Experiment 108461 PARAMETER Experiment Name: At_Germinating_Seeds_cDNA_P Parameter: Age (day) Value: 1 vs. 0
  misc_feature: MA Experiment 108461 PARAMETER Experiment Name: At_Germinating_Seeds_cDNA_P Parameter: Tissue Value: Germinating Seeds
  misc_feature: MA Experiment ID: 108462 Result: Up-regulated in Transcription
  misc_feature: MA Experiment 108462 PARAMETER Experiment Name: At_Germinating_Seeds_cDNA_P Parameter: Age (day) Value: 2 vs. 0
  misc_feature: MA Experiment 108462 PARAMETER Experiment Name: At_Germinating_Seeds_cDNA_P Parameter: Tissue Value: Germinating Seeds
  misc_feature: MA Experiment ID: 108594 Result: Down-regulated in Transcription
  misc_feature: MA Experiment 108594 PARAMETER Experiment Name: At_Ler-rhl_Root_cDNA_P Parameter: Plant Line Value: null
  misc_feature: MA Experiment ID: 20000180 Result: Up-regulated in Transcription
  misc_feature: MA Experiment 20000180 PARAMETER Experiment Name: At_Germinating_Seeds_P Parameter: Age (hr) Value: 24 vs. 0
  misc_feature: MA Experiment 20000180 PARAMETER Experiment Name: At_Germinating_Seeds_P Parameter: Tissue Value: Germinating Seeds
  misc_feature: MA Experiment ID: 20000185 Result: Up-regulated in Transcription
  misc_feature: MA Experiment 20000185 PARAMETER Experiment Name: At_Roots__P Parameter: Age (day) Value: 7 vs. 21
  misc_feature: MA Experiment 20000185 PARAMETER Experiment Name: At_Roots__P Parameter: Organism Value: A. thaliana
  misc_feature: MA Experiment 20000185 PARAMETER Experiment Name: At_Roots__P Parameter: Tissue Value: Roots vs. Whole Plant
  misc_feature: MA Experiment ID: 20000227 Result: Up-regulated in Transcription
  misc_feature: MA Experiment 20000227 PARAMETER Experiment Name: At_Root-Tips-vs-Tops_P Parameter: Tissue Value: Root Tips vs. Root Tops
  misc_feature: MA Experiment ID: 20000439 Result: Up-regulated in Transcription
  misc_feature: MA Experiment 20000439 PARAMETER Experiment Name: At_Roots__P Parameter: Age (day) Value: 14 vs. 21
  misc_feature: MA Experiment 20000439 PARAMETER Experiment Name: At_Roots__P Parameter: Organism Value: A. thaliana
  misc_feature: MA Experiment 20000439 PARAMETER Experiment Name: At_Roots__P Parameter: Tissue Value: Roots vs. Whole Plant
  misc_feature: MA Experiment ID: 20000451 Result: Down-regulated in Transcription
  misc_feature: MA Experiment 20000451 PARAMETER Experiment Name: At_CS6879_Shoots-Roots_P Parameter: Age (day) Value: 14
  misc_feature: MA Experiment 20000451 PARAMETER Experiment Name: At_CS6879_Shoots-Roots_P Parameter: Organism Value: A. thaliana
  misc_feature: MA Experiment 20000451 PARAMETER Experiment Name: At_CS6879_Shoots-Roots_P Parameter: Plant Line Value: CS6879 vs. WS
  misc_feature: MA Experiment 20000451 PARAMETER Experiment Name: At_CS6879_Shoots-Roots_P Parameter: Tissue Value: Roots
  misc_feature: MA Experiment ID: 20000527 Result: Down-regulated in Transcription
  misc_feature: MA Experiment 20000527 PARAMETER Experiment Name: At_10percent_PEG_P Parameter: Age (day) Value: 20
  misc_feature: MA Experiment 20000527 PARAMETER Experiment Name: At_10percent_PEG_P Parameter: Organism Value: A. thaliana
  misc_feature: MA Experiment 20000527 PARAMETER Experiment Name: At_10percent_PEG_P Parameter: Plant Line Value: WS
  misc_feature: MA Experiment 20000527 PARAMETER Experiment Name: At_10percent_PEG_P Parameter: Timepoint (day) Value: 20
  misc_feature: MA Experiment 20000527 PARAMETER Experiment Name: At_10percent_PEG_P Parameter: Tissue Value: Whole Plant
  misc_feature: MA Experiment 20000527 PARAMETER Experiment Name: At_10percent_PEG_P Parameter: Treatment Value: 10percent PEG vs. No Treatment
aaaaaacaaaccaactttccttctctaatcaaaacaagaaagacacaaagatggagatctcaaaaacccttttgctagtgatttctctggtggctgcaacttgtttcttgcaagccaaggcagctggagtttattgtagtaacccttacactcgatgttaccgcaagtacattaggtgtccagaggaatgtccaagcaaaaccgctatgaactccaagaacaaagtttgctacgccgattgcgatagacccacttgcaaatcccaatgccgcatgaggaaaccaaactgcaacagacctggatcagcttgttatgacccgaggttcattggaggagacggcattgtgttctacttccatggaaagagcaatgaagagtttagcctcgtctctgactctgaccttcagatcaatggtaggttcattggtcacagacccgctggtcgtgccagagacttcacatggatccaatctctaggattccttttcaactccaacaaattctccctcgaagccgcgaaaaccgcctcatgggacaacgaaatcgaccatctcaaattcagttacgatggccaagatttatctgttccagaagaaactctctccacctggtactcaccaaacaaggacatcaagatcgagagagtgagtatgagaaacagcgtgatcgtgacaatcaaagacaaagccgagatcatgatcaatgtggttccagtgacaaaagaagacgacagaatccatagctacaaagtaccatcagatgattgttttgcacatcttgaggttcaattcagattctttaacctttcacctaaggttgatggaatcttgggacgaacctacaggcccgatttccaaaatccggctaagcctggagtcgcaatgccagttgttggtggtgaagacagcttcaagacttcttctctactctccaatgactgtaaaacttgcattttctctgagtcacaagcagagattgattctgttaagtcagagattgaatatgcaactttggattgtacccgtggagcgtcttctggttacggtatcgtgtgcaggaagtaaaaaaagaatcatataaacttggcttaaaagaagaataatgccagagagctttagcttctactggagattttccaaagtataatataagtgaaggaataatatgtaaacttgcaatgtatttgtattgtatcatccaccatgtattctaatttgtattaacctaatcattgttattgatatataatacc

SEQ ID NO: 22817 - protein, 353 aa, Arabidopsis thaliana
  peptide (1)..(353): Ceres Seq. ID no. 12394466
  misc_feature (49)..(353): Homolog of NCBI NO: 4514637 NR Description: root cap protein 2 [Zea mays]
  misc_feature (38)..(353): Homolog of NCBI NO: 30685319 NR Description: late embryogenesis abundant protein -related
  misc_feature (38)..(353): Homolog of NCBI NO: 11994465 NR Description: contains similarity to late embryogenesis
  misc_feature (17)..(353): Homolog of NCBI NO: 7484468 NR Description: late embryonic abundant protein EMB7 - white
  misc_feature (52)..(327): Homolog of NCBI NO: 15809990 NR Description: AT5g60530/muf9_180 [Arabidopsis thaliana]
  misc_feature (52)..(327): Homolog of NCBI NO: 15239360 NR Description: late embryonic abundant protein - like
  misc_feature (52)..(318): Homolog of NCBI NO: 15239359 NR Description: late embryonic abundant protein - like; protein
  misc_feature (25)..(353): Homolog of NCBI NO: 15221921 NR Description: late embryogenesis protein, putative; protein id:
  misc_feature (17)..(353): Homolog of NCBI NO: 15234120 NR Description: putative protein; protein id: At4g27400.1
  misc_feature (17)..(353): Homolog of NCBI NO: 15239629 NR Description: root cap protein 2-like protein; protein id:
KTNQLSFSNQNKKDTKMEISKTLLLVISLVAATCFLQAKAAGVYCSNPYTRCYRKYIRCPEECPSKTAMNSKNKVCYADCDRPTCKSQCRMRKPNCNRPGSACYDPRFIGGDGIVFYFHGKSNEEFSLVSDSDLQINGRFIGHRPAGRARDFTWIQSLGFLFNSNKFSLEAAKTASWDNEIDHLKFSYDGQDLSVPEETLSTWYSPNKDIKIERVSMRNSVIVTIKDKAEIMINVVPVTKEDDRIHSYKVPSDDCFAHLEVQFRFFNLSPKVDGILGRTYRPDFQNPAKPGVAMPVVGGEDSFKTSSLLSNDCKTCIFSESQAEIDSVKSEIEYATLDCTRGASSGYGIVCRK

SEQ ID NO: 22818 - protein, 337 aa, Arabidopsis thaliana
  peptide (1)..(337): Ceres Seq. ID no. 12394467
  misc_feature (33)..(337): Homolog of NCBI NO: 4514637 NR Description: root cap protein 2 [Zea mays]
  misc_feature (22)..(337): Homolog of NCBI NO: 30685319 NR Description: late embryogenesis abundant protein -related
  misc_feature (22)..(337): Homolog of NCBI NO: 11994465 NR Description: contains similarity to late embryogenesis
  misc_feature (1)..(337): Homolog of NCBI NO: 7484468 NR Description: late embryonic abundant protein EMB7 - white
  misc_feature (36)..(311): Homolog of NCBI NO: 15809990 NR Description: AT5g60530/muf9_180 [Arabidopsis thaliana]
  misc_feature (36)..(311): Homolog of NCBI NO: 15239360 NR Description: late embryonic abundant protein - like
  misc_feature (36)..(302): Homolog of NCBI NO: 15239359 NR Description: late embryonic abundant protein - like; protein
  misc_feature (9)..(337): Homolog of NCBI NO: 15221921 NR Description: late embryogenesis protein, putative; protein id:
  misc_feature (1)..(337): Homolog of NCBI NO: 15234120 NR Description: putative protein; protein id: At4g27400.1
  misc_feature (1)..(337): Homolog of NCBI NO: 15239629 NR Description: root cap protein 2-like protein; protein id:
MEISKTLLLVISLVAATCFLQAKAAGVYCSNPYTRCYRKYIRCPEECPSKTAMNSKNKVCYADCDRPTCKSQCRMRKPNCNRPGSACYDPRFIGGDGIVFYFHGKSNEEFSLVSDSDLQINGRFIGHRPAGRARDFTWIQSLGFLFNSNKFSLEAAKTASWDNEIDHLKFSYDGQDLSVPEETLSTWYSPNKDIKIERVSMRNSVIVTIKDKAEIMINVVPVTKEDDRIHSYKVPSDDCFAHLEVQFRFFNLSPKVDGILGRTYRPDFQNPAKPGVAMPVVGGEDSFKTSSLLSNDCKTCIFSESQAEIDSVKSEIEYATLDCTRGASSGYGIVCRK

SEQ ID NO: 22819 - protein, 285 aa, Arabidopsis thaliana
  peptide (1)..(285): Ceres Seq. ID no. 12394468
  misc_feature (1)..(285): Homolog of NCBI NO: 4514637 NR Description: root cap protein 2 [Zea mays]
  misc_feature (1)..(285): Homolog of NCBI NO: 30685319 NR Description: late embryogenesis abundant protein -related
  misc_feature (1)..(285): Homolog of NCBI NO: 11994465 NR Description: contains similarity to late embryogenesis
  misc_feature (1)..(285): Homolog of NCBI NO: 7484468 NR Description: late embryonic abundant protein EMB7 - white
  misc_feature (1)..(259): Homolog of NCBI NO: 15809990 NR Description: AT5g60530/muf9_180 [Arabidopsis thaliana]
  misc_feature (1)..(259): Homolog of NCBI NO: 15239360 NR Description: late embryonic abundant protein - like
  misc_feature (1)..(250): Homolog of NCBI NO: 15239359 NR Description: late embryonic abundant protein - like; protein
  misc_feature (1)..(285): Homolog of NCBI NO: 15221921 NR Description: late embryogenesis protein, putative; protein id:
  misc_feature (1)..(285): Homolog of NCBI NO: 15234120 NR Description: putative protein; protein id: At4g27400.1
  misc_feature (1)..(285): Homolog of NCBI NO: 15239629 NR Description: root cap protein 2-like protein; protein id:
MNSKNKVCYADCDRPTCKSQCRMRKPNCNRPGSACYDPRFIGGDGIVFYFHGKSNEEFSLVSDSDLQINGRFIGHRPAGRARDFTWIQSLGFLFNSNKFSLEAAKTASWDNEIDHLKFSYDGQDLSVPEETLSTWYSPNKDIKIERVSMRNSVIVTIKDKAEIMINVVPVTKEDDRIHSYKVPSDDCFAHLEVQFRFFNLSPKVDGILGRTYRPDFQNPAKPGVAMPVVGGEDSFKTSSLLSNDCKTCIFSESQAEIDSVKSEIEYATLDCTRGASSGYGIVCRK

SEQ ID NO: 22820 - DNA, 636 bp, Arabidopsis thaliana
  misc_feature (1)..(636): Ceres Seq. ID no. 12562389
  misc_feature: MA Experiment ID: 108434 Result: Down-regulated in Transcription
  misc_feature: MA Experiment 108434 PARAMETER Experiment Name: At_Root_Tips_cDNA_P Parameter: Tissue Value: Root Tips
  misc_feature: MA Experiment ID: 108435 Result: Down-regulated in Transcription
  misc_feature: MA Experiment 108435 PARAMETER Experiment Name: At_stm_Mutants_cDNA_P Parameter: Plant Line Value: wt Landsburg vs stm
  misc_feature: MA Experiment 108435 PARAMETER Experiment Name: At_stm_Mutants_cDNA_P Parameter: Tissue Value: Shoot Apical Meristem Region
  misc_feature: MA Experiment ID: 108461 Result: Up-regulated in Transcription
  misc_feature: MA Experiment 108461 PARAMETER Experiment Name: At_Germinating_Seeds_cDNA_P Parameter: Age (day) Value: 1 vs. 0
  misc_feature: MA Experiment 108461 PARAMETER Experiment Name: At_Germinating_Seeds_cDNA_P Parameter: Tissue Value: Germinating Seeds
  misc_feature: MA Experiment ID: 108462 Result: Up-regulated in Transcription
  misc_feature: MA Experiment 108462 PARAMETER Experiment Name: At_Germinating_Seeds_cDNA_P Parameter: Age (day) Value: 2 vs. 0
  misc_feature: MA Experiment 108462 PARAMETER Experiment Name: At_Germinating_Seeds_cDNA_P Parameter: Tissue Value: Germinating Seeds
  misc_feature: MA Experiment ID: 108488 Result: Up-regulated in Transcription
  misc_feature: MA Experiment ID: 108489 Result: Down-regulated in Transcription
  misc_feature: MA Experiment ID: 20000180 Result: Up-regulated in Transcription
  misc_feature: MA Experiment 20000180 PARAMETER Experiment Name: At_Germinating_Seeds_P Parameter: Age (hr) Value: 24 vs. 0
  misc_feature: MA Experiment 20000180 PARAMETER Experiment Name: At_Germinating_Seeds_P Parameter: Tissue Value: Germinating Seeds
  misc_feature: MA Experiment ID: 20000185 Result: Down-regulated in Transcription
  misc_feature: MA Experiment 20000185 PARAMETER Experiment Name: At_Roots__P Parameter: Age (day) Value: 7 vs. 21
  misc_feature: MA Experiment 20000185 PARAMETER Experiment Name: At_Roots__P Parameter: Organism Value: A. thaliana
  misc_feature: MA Experiment 20000185 PARAMETER Experiment Name: At_Roots__P Parameter: Tissue Value: Roots vs. Whole Plant
  misc_feature: MA Experiment ID: 20000227 Result: Down-regulated in Transcription
  misc_feature: MA Experiment 20000227 PARAMETER Experiment Name: At_Root-Tips-vs-Tops_P Parameter: Tissue Value: Root Tips vs. Root Tops
  misc_feature: MA Experiment ID: 20000264 Result: Down-regulated in Transcription
  misc_feature: MA Experiment 20000264 PARAMETER Experiment Name: At_Open_Flower_P Parameter: Age (day) Value: 21
  misc_feature: MA Experiment 20000264 PARAMETER Experiment Name: At_Open_Flower_P Parameter: Plant Line Value: WS
  misc_feature: MA Experiment 20000264 PARAMETER Experiment Name: At_Open_Flower_P Parameter: Tissue Value: Open Flower vs. Whole Plant
  misc_feature: MA Experiment ID: 20000286 Result: Down-regulated in Transcription
  misc_feature: MA Experiment 20000286 PARAMETER Experiment Name: At_Open_Flower_P Parameter: Age (day) Value: 21
  misc_feature: MA Experiment 20000286 PARAMETER Experiment Name: At_Open_Flower_P Parameter: Plant Line Value: WS
  misc_feature: MA Experiment 20000286 PARAMETER Experiment Name: At_Open_Flower_P Parameter: Tissue Value: Half Open vs. Whole Plant
  misc_feature: MA Experiment ID: 20000439 Result: Down-regulated in Transcription
  misc_feature: MA Experiment 20000439 PARAMETER Experiment Name: At_Roots__P Parameter: Age (day) Value: 14 vs. 21
  misc_feature: MA Experiment 20000439 PARAMETER Experiment Name: At_Roots__P Parameter: Organism Value: A. thaliana
  misc_feature: MA Experiment 20000439 PARAMETER Experiment Name: At_Roots__P Parameter: Tissue Value: Roots vs. Whole Plant
  misc_feature: MA Experiment ID: 20000794 Result: Down-regulated in Transcription
  misc_feature: MA Experiment 20000794 PARAMETER Experiment Name: At_Petals_P Parameter: Age (day) Value: 23-25 days
  misc_feature: MA Experiment 20000794 PARAMETER Experiment Name: At_Petals_P Parameter: Plant Line Value: WS
  misc_feature: MA Experiment 20000794 PARAMETER Experiment Name: At_Petals_P Parameter: Tissue Value: Petals vs. Whole plant
  misc_feature: MA Experiment ID: 20001557 Result: Down-regulated in Transcription
  misc_feature: MA Experiment 20001557 PARAMETER Experiment Name: At_Drought_Soil_Dry_P Parameter: Age (day) Value: 27
  misc_feature: MA Experiment 20001557 PARAMETER Experiment Name: At_Drought_Soil_Dry_P Parameter: Organism Value: A. thaliana
  misc_feature: MA Experiment 20001557 PARAMETER Experiment Name: At_Drought_Soil_Dry_P Parameter: Plant Line Value: WS
  misc_feature: MA Experiment 20001557 PARAMETER Experiment Name: At_Drought_Soil_Dry_P Parameter: Post Timepoint (hr) Value: 3
  misc_feature: MA Experiment 20001557 PARAMETER Experiment Name: At_Drought_Soil_Dry_P Parameter: Post-Treatment Value: Re-Water vs. No Drought
  misc_feature: MA Experiment 20001557 PARAMETER Experiment Name: At_Drought_Soil_Dry_P Parameter: Timepoint (day) Value: 13
  misc_feature: MA Experiment 20001557 PARAMETER Experiment Name: At_Drought_Soil_Dry_P Parameter: Treatment Value: Drought vs. No Drought
  misc_feature: MA Experiment ID: 20001757 Result: Up-regulated in Transcription
  misc_feature: MA Experiment 20001757 PARAMETER Experiment Name: At_50mM_NH4NO3_L-to-H_P Parameter: Timepoint (hr) Value: 6
  misc_feature: MA Experiment 20001757 PARAMETER Experiment Name: At_50mM_NH4NO3_L-to-H_P Parameter: Tissue Value: Leaf
  misc_feature: MA Experiment 20001757 PARAMETER Experiment Name: At_50mM_NH4NO3_L-to-H_P Parameter: Treatment Value: 50mM NH4NO3 vs 100mM Mannitol
  misc_feature: MA Experiment ID: 20001908 Result: Down-regulated in Transcription
  misc_feature: MA Experiment 20001908 PARAMETER Experiment Name: At_Drought_Reproduction_P Parameter: Age (day) Value: 40
  misc_feature: MA Experiment 20001908 PARAMETER Experiment Name: At_Drought_Reproduction_P Parameter: Organism Value: A. thaliana
  misc_feature: MA Experiment 20001908 PARAMETER Experiment Name: At_Drought_Reproduction_P Parameter: Plant Line Value: WS
  misc_feature: MA Experiment 20001908 PARAMETER Experiment Name: At_Drought_Reproduction_P Parameter: Timepoint (day) Value: 10
  misc_feature: MA Experiment 20001908 PARAMETER Experiment Name: At_Drought_Reproduction_P Parameter: Tissue Value: Siliques
  misc_feature: MA Experiment 20001908 PARAMETER Experiment Name: At_Drought_Reproduction_P Parameter: Treatment Value: Drought vs. No Drought
cagaataaaaatctatttcttgtgtttgtgttatatttacttaaaaaaataaaggagatcagtttgggagaaagcagcaaagaagaaaaatggcagcaacatttgcaacaccatcgacggtgataggcctcggaggatcatccatcaccaccaaacccttctcttcatcctttttaaaaccaacattaagcgccaagaaccctttgagactcgccggtgcatcgggaggaagagtcacttgctttgagaggaactggttgaggagagatttgaacgtggtaggatttgggctgatcggatggctagctccgtcgagcattccagcgataaatgggaagagcctgacgggtctcttcttcgatagcatcggaactgagctcgctcacttcccgactcctccagctctcacttcacagttctggttgtggttggttacgtggcacttaggcctcttcctctgcctcactttcggacaaatcggattcaagggcaggactgaagattacttctaaggataactattcttgttttcgtttgtactatatgctctctcttggttatgtgtaatattatcaatcaaaacaaagctttctttgctatttgatgtttcattctatatctcgacaagtctttctt

SEQ ID NO: 22821 - protein, 140 aa, Arabidopsis thaliana
  peptide (1)..(140): Ceres Seq. ID no. 12562390
  misc_feature (6)..(140): Homolog of NCBI NO: 6996562 NR Description: putative 16kDa membrane protein [Nicotiana
  misc_feature (1)..(140): Homolog of NCBI NO: 22531014 NR Description: expressed protein [Arabidopsis thaliana]
  misc_feature (1)..(140): Homolog of NCBI NO: 18390888 NR Description: expressed protein
  misc_feature (6)..(140): Homolog of NCBI NO: 6996562 NR Description: putative 16kDa membrane protein [Nicotiana
  misc_feature (1)..(140): Homolog of NCBI NO: 22531014 NR Description: expressed protein [Arabidopsis thaliana]
  misc_feature (1)..(140): Homolog of NCBI NO: 18390888 NR Description: expressed protein
  misc_feature (6)..(140): Homolog of NCBI NO: 6996562 NR Description: putative 16kDa membrane protein [Nicotiana
  misc_feature (1)..(140): Homolog of NCBI NO: 22531014 NR Description: expressed protein [Arabidopsis thaliana]
  misc_feature (1)..(140): Homolog of NCBI NO: 18390888 NR Description: expressed protein
MAATFATPSTVIGLGGSSITTKPFSSSFLKPTLSAKNPLRLAGASGGRVTCFERNWLRRDLNVVGFGLIGWLAPSSIPAINGKSLTGLFFDSIGTELAHFPTPPALTSQFWLWLVTWHLGLFLCLTFGQIGFKGRTEDYF

SEQ ID NO: 22822 - DNA, 524 bp, Arabidopsis thaliana
  misc_feature (1)..(524): Ceres Seq. ID no. 12338408
  misc_feature: MA Experiment ID: 20001557 Result: Down-regulated in Transcription
  misc_feature: MA Experiment 20001557 PARAMETER Experiment Name: At_Drought_Soil_Dry_P Parameter: Age (day) Value: 27
  misc_feature: MA Experiment 20001557 PARAMETER Experiment Name: At_Drought_Soil_Dry_P Parameter: Organism Value: A. thaliana
  misc_feature: MA Experiment 20001557 PARAMETER Experiment Name: At_Drought_Soil_Dry_P Parameter: Plant Line Value: WS
  misc_feature: MA Experiment 20001557 PARAMETER Experiment Name: At_Drought_Soil_Dry_P Parameter: Post Timepoint (hr) Value: 3
  misc_feature: MA Experiment 20001557 PARAMETER Experiment Name: At_Drought_Soil_Dry_P Parameter: Post-Treatment Value: Re-Water vs. No Drought
  misc_feature: MA Experiment 20001557 PARAMETER Experiment Name: At_Drought_Soil_Dry_P Parameter: Timepoint (day) Value: 13
  misc_feature: MA Experiment 20001557 PARAMETER Experiment Name: At_Drought_Soil_Dry_P Parameter: Treatment Value: Drought vs. No Drought
  misc_feature: MA Experiment ID: 20001558 Result: Down-regulated in Transcription
  misc_feature: MA Experiment 20001558 PARAMETER Experiment Name: At_Drought_Soil_Dry_P Parameter: Age (day) Value: 27
  misc_feature: MA Experiment 20001558 PARAMETER Experiment Name: At_Drought_Soil_Dry_P Parameter: Organism Value: A. thaliana
  misc_feature: MA Experiment 20001558 PARAMETER Experiment Name: At_Drought_Soil_Dry_P Parameter: Plant Line Value: WS
  misc_feature: MA Experiment 20001558 PARAMETER Experiment Name: At_Drought_Soil_Dry_P Parameter: Post Timepoint (hr) Value: 6
  misc_feature: MA Experiment 20001558 PARAMETER Experiment Name: At_Drought_Soil_Dry_P Parameter: Post-Treatment Value: Re-Water vs. No Drought
  misc_feature: MA Experiment 20001558 PARAMETER Experiment Name: At_Drought_Soil_Dry_P Parameter: Timepoint (day) Value: 13
  misc_feature: MA Experiment 20001558 PARAMETER Experiment Name: At_Drought_Soil_Dry_P Parameter: Treatment Value: Drought vs. No Drought
  misc_feature: MA Experiment ID: 20001560 Result: Down-regulated in Transcription
  misc_feature: MA Experiment 20001560 PARAMETER Experiment Name: At_Drought_Soil_Dry_P Parameter: Age (day) Value: 28
  misc_feature: MA Experiment 20001560 PARAMETER Experiment Name: At_Drought_Soil_Dry_P Parameter: Organism Value: A. thaliana
  misc_feature: MA Experiment 20001560 PARAMETER Experiment Name: At_Drought_Soil_Dry_P Parameter: Plant Line Value: WS
  misc_feature: MA Experiment 20001560 PARAMETER Experiment Name: At_Drought_Soil_Dry_P Parameter: Post Timepoint (hr) Value: None
  misc_feature: MA Experiment 20001560 PARAMETER Experiment Name: At_Drought_Soil_Dry_P Parameter: Post-Treatment Value: None
  misc_feature: MA Experiment 20001560 PARAMETER Experiment Name: At_Drought_Soil_Dry_P Parameter: Timepoint (day) Value: 14
  misc_feature: MA Experiment 20001560 PARAMETER Experiment Name: At_Drought_Soil_Dry_P Parameter: Treatment Value: Drought vs. No Drought
  misc_feature: MA Experiment ID: 20001911 Result: Up-regulated in Transcription
  misc_feature: MA Experiment 20001911 PARAMETER Experiment Name: At_Drought_Reproduction_P Parameter: Age (day) Value: 40
  misc_feature: MA Experiment 20001911 PARAMETER Experiment Name: At_Drought_Reproduction_P Parameter: Organism Value: A. thaliana
  misc_feature: MA Experiment 20001911 PARAMETER Experiment Name: At_Drought_Reproduction_P Parameter: Plant Line Value: WS
  misc_feature: MA Experiment 20001911 PARAMETER Experiment Name: At_Drought_Reproduction_P Parameter: Timepoint (day) Value: 10
  misc_feature: MA Experiment 20001911 PARAMETER Experiment Name: At_Drought_Reproduction_P Parameter: Tissue Value: Flowers
  misc_feature: MA Experiment 20001911 PARAMETER Experiment Name: At_Drought_Reproduction_P Parameter: Treatment Value: Drought vs. No Drought
actcaaaaactcatcaaatcaaaaatcaaacacagagaagagaaaatggccgcagaaggagaagttatcgcttgccacaccgttgaagattggaccgagaagctcaaagccgccaacgaatccaagaaactgattgtgatagacttcactgcaacatggtgcccaccttgccgtttcattgcacccgtctttgctgacttagccaagaagcaccttgacgtagtcttcttcaaggtcgatgttgacgaattgaacactgttgctgaggagtttaaagttcaggcaatgccaacgtttatcttcatgaaagaaggagagatcaaggagactgtggttggtgctgcgaaagaagaaatcattgccaatctcgagaagcacaatacagttgttgctgctgcttgatttgcttttctctcttacctattttgctaaaatatgtttggtgttttaataaatcctttgttcgcccgagtcttttcaccttaaatgtgctcttatgtgtggtggtgaataaatgttgttgc

SEQ ID NO: 22823 - protein, 133 aa, Arabidopsis thaliana
  peptide (1)..(133): Ceres Seq. ID no. 12338409
  misc_feature (16)..(126): Homolog of NCBI NO: 15230385 NR Description: thioredoxin h; protein id: At3g51030.1, supported
  misc_feature (18)..(126): Homolog of NCBI NO: 12082335 NR Description: thioredoxin h [Oryza sativa (japonica
  misc_feature (16)..(44): Homolog of NCBI NO: 25405885 NR Description: protein F27F5.21 [imported] - Arabidopsis
  misc_feature (44)..(130): Homolog of NCBI NO: 25405885 NR Description: protein F27F5.21 [imported] - Arabidopsis
  misc_feature (20)..(132): Homolog of NCBI NO: 11135129 NR Description: Thioredoxin H-type (TRX-H)
  misc_feature (20)..(132): Homolog of NCBI NO: 11494247 NR Description: thioredoxin-h-like protein 1 [Brassica oleracea
  misc_feature (20)..(132): Homolog of NCBI NO: 11135277 NR Description: Thioredoxin H-type 1 (TRX-H-1) (Pollen coat
  misc_feature (16)..(133): Homolog of NCBI NO: 15219537 NR Description: thioredoxin, putative
  misc_feature (16)..(133): Homolog of NCBI NO: 1388084 NR Description: thioredoxin h
  misc_feature (16)..(133): Homolog of NCBI NO: 15239136 NR Description: thioredoxin (clone GIF1) (pir||S58118)
TQKLIKSKIKHREEKMAAEGEVIACHTVEDWTEKLKAANESKKLIVIDFTATWCPPCRFIAPVFADLAKKHLDVVFFKVDVDELNTVAEEFKVQAMPTFIFMKEGEIKETVVGAAKEEIIANLEKHNTVVAAA

SEQ ID NO: 22824 - protein, 118 aa, Arabidopsis thaliana
  peptide (1)..(118): Ceres Seq. ID no. 12338411
  misc_feature (5)..(117): Homolog of NCBI NO: 11494247 NR Description: thioredoxin-h-like protein 1 [Brassica oleracea
  misc_feature (5)..(117): Homolog of NCBI NO: 11135277 NR Description: Thioredoxin H-type 1 (TRX-H-1) (Pollen coat
  misc_feature (1)..(118): Homolog of NCBI NO: 15219537 NR Description: thioredoxin, putative
  misc_feature (1)..(118): Homolog of NCBI NO: 1388084 NR Description: thioredoxin h
  misc_feature (1)..(118): Homolog of NCBI NO: 15239136 NR Description: thioredoxin (clone GIF1) (pir||S58118)
  misc_feature (29)..(115): Homolog of NCBI NO: 25405885 NR Description: protein F27F5.21 [imported] - Arabidopsis
  misc_feature (5)..(117): Homolog of NCBI NO: 11135129 NR Description: Thioredoxin H-type (TRX-H)
  misc_feature (1)..(111): Homolog of NCBI NO: 15230385 NR Description: thioredoxin h; protein id: At3g51030.1, supported
  misc_feature (3)..(111): Homolog of NCBI NO: 12082335 NR Description: thioredoxin h [Oryza sativa (japonica
  misc_feature (1)..(29): Homolog of NCBI NO: 25405885 NR Description: protein F27F5.21 [imported] - Arabidopsis
MAAEGEVIACHTVEDWTEKLKAANESKKLIVIDFTATWCPPCRFIAPVFADLAKKHLDVVFFKVDVDELNTVAEEFKVQAMPTFIFMKEGEIKETVVGAAKEEIIANLEKHNTVVAAA

SEQ ID NO: 22825 - DNA, 926 bp, Arabidopsis thaliana
  misc_feature (1)..(926): Ceres Seq. ID no. 12384525
  misc_feature: MA Experiment ID: 108434 Result: Up-regulated in Transcription
  misc_feature: MA Experiment 108434 PARAMETER Experiment Name: At_Root_Tips_cDNA_P Parameter: Tissue Value: Root Tips
  misc_feature: MA Experiment ID: 108462 Result: Down-regulated in Transcription
  misc_feature: MA Experiment 108462 PARAMETER Experiment Name: At_Germinating_Seeds_cDNA_P Parameter: Age (day) Value: 2 vs. 0
  misc_feature: MA Experiment 108462 PARAMETER Experiment Name: At_Germinating_Seeds_cDNA_P Parameter: Tissue Value: Germinating Seeds
  misc_feature: MA Experiment ID: 108463 Result: Down-regulated in Transcription
  misc_feature: MA Experiment 108463 PARAMETER Experiment Name: At_Germinating_Seeds_cDNA_P Parameter: Age (day) Value: 3 vs. 0
  misc_feature: MA Experiment 108463 PARAMETER Experiment Name: At_Germinating_Seeds_cDNA_P Parameter: Tissue Value: Germinating Seeds
  misc_feature: MA Experiment ID: 108573 Result: Up-regulated in Transcription
  misc_feature: MA Experiment 108573 PARAMETER Experiment Name: At_Drought_cDNA_P Parameter: Timepoint (hr) Value: 6
  misc_feature: MA Experiment 108573 PARAMETER Experiment Name: At_Drought_cDNA_P Parameter: Tissue Value: Aerial
  misc_feature: MA Experiment 108573 PARAMETER Experiment Name: At_Drought_cDNA_P Parameter: Treatment Value: Drought vs. No Drought
  misc_feature: MA Experiment ID: 108585 Result: Up-regulated in Transcription
  misc_feature: MA Experiment 108585 PARAMETER Experiment Name: At_5mM_NaNP_cDNA_P Parameter: Timepoint (hr) Value: 6
  misc_feature: MA Experiment 108585 PARAMETER Experiment Name: At_5mM_NaNP_cDNA_P Parameter: Tissue Value: Aerial
  misc_feature: MA Experiment 108585 PARAMETER Experiment Name: At_5mM_NaNP_cDNA_P Parameter: Treatment Value: null
  misc_feature: MA Experiment ID: 20000179 Result: Down-regulated in Transcription
  misc_feature: MA Experiment 20000179 PARAMETER Experiment Name: At_Germinating_Seeds_P Parameter: Age (hr) Value: 6 vs. 0
  misc_feature: MA Experiment 20000179 PARAMETER Experiment Name: At_Germinating_Seeds_P Parameter: Tissue Value: Germinating Seeds
atttttcattcttctaagccctagctcaaagctttctctctcaaatccgccatgactaaacagcacgcgaactggtctccttacgataacaatggaggaacatgtgtggccatcgctggatcggattactgtgttatcgccgccgatactcggatgtctactggttacagtattcttagtcgcgattactccaaaatccataaactagcggacagacctgttttgtcttcctctggcttccaggctgatgtgaaagctttgcagaaggttctcaaatccagacacttgatctatcaacatcagcataacaagcagatgagctgtcctgcaatggcccagcttctctccaacacgctttatttcaagcggtttttcccctactatgcctttaatgttctaggagggcttgacgaggaaggaaaagggtgtgtctttacttacgacgctgttggctcatacgagagagttggatacggtgctcaaggttctggttccacactcatcatgcctttccttgacaatcagctcaagtctccaagtcctcttttgctacctaaacaggattcaaacacgcccctttccgaagctgaagcagttgacttggttaaaactgttttcgcatctgccacagagagggatatctacactggagacaagcttgagattatgatacttaaggccgacggtatcaagaccgaactcatggacctgaggaaagactaagctcctttagtgcatttagccaaccttatcggtttgttatttcacttcaacatcgagcttcctgagttgtagaactcgtatgaaatgctactgggtttgatattttacagttaaaatcatgactcgtgtttgaagtttctccaaaactgtttccttatgtatgagaatcactcgaatccttgtcttaaatcaatgtttctccc

SEQ ID NO: 22826 - protein, 223 aa, Arabidopsis thaliana
  peptide (1)..(223): Ceres Seq. ID no. 12384526
  misc_feature (12)..(208): Pfam Name: Proteasome A-type and B-type Pfam Description: Proteasome A-type and B-type
  misc_feature (8)..(223): Homolog of NCBI NO: 38174388 NR Description: Unknown (protein for MGC:75736) [Silurana
  misc_feature (8)..(223): Homolog of NCBI NO: 27694605 NR Description: Unknown (protein for MGC:52861) [Xenopus laevis]
  misc_feature (5)..(223): Homolog of NCBI NO: 28829610 NR Description: similar to Petunia hybrida (Petunia). Proteasome beta type 1 (EC 3.4.99.46) (20S proteasome alpha subunit F) (20S
  misc_feature (4)..(223): Homolog of NCBI NO: 17380207 NR Description: Proteasome subunit beta type 1-A (20S proteasome
  misc_feature (4)..(223): Homolog of NCBI NO: 17380206 NR Description: Proteasome subunit beta type 1-B (20S proteasome
  misc_feature (9)..(200): Homolog of NCBI NO: 14594933 NR Description: putative beta6 proteasome subunit [Nicotiana
  misc_feature (4)..(223): Homolog of NCBI NO: 17380182 NR Description: Proteasome subunit beta type 1 (20S proteasome
  misc_feature (1)..(223): Homolog of NCBI NO: 17380185 NR Description: Proteasome subunit beta type 1 (20S proteasome
  misc_feature (1)..(223): Homolog of NCBI NO: 15232965 NR Description: 20S proteasome beta subunit F1 (PBF1)
  misc_feature (1)..(223): Homolog of NCBI NO: 600387 NR Description: proteosome subunit [Arabidopsis thaliana]
MTKQHANWSPYDNNGGTCVAIAGSDYCVIAADTRMSTGYSILSRDYSKIHKLADRPVLSSSGFQADVKALQKVLKSRHLIYQHQHNKQMSCPAMAQLLSNTLYFKRFFPYYAFNVLGGLDEEGKGCVFTYDAVGSYERVGYGAQGSGSTLIMPFLDNQLKSPSPLLLPKQDSNTPLSEAEAVDLVKTVFASATERDIYTGDKLEIMILKADGIKTELMDLRKD

SEQ ID NO: 22827 - protein, 189 aa, Arabidopsis thaliana
  peptide (1)..(189): Ceres Seq. ID no. 12384527
  misc_feature (1)..(174): Pfam Name: Proteasome A-type and B-type Pfam Description: Proteasome A-type and B-type
  misc_feature (1)..(189): Homolog of NCBI NO: 38174388 NR Description: Unknown (protein for MGC:75736) [Silurana
  misc_feature (1)..(189): Homolog of NCBI NO: 27694605 NR Description: Unknown (protein for MGC:52861) [Xenopus laevis]
  misc_feature (1)..(189): Homolog of NCBI NO: 28829610 NR Description: similar to Petunia hybrida (Petunia). Proteasome beta type 1 (EC 3.4.99.46) (20S proteasome alpha subunit F) (20S
  misc_feature (1)..(189): Homolog of NCBI NO: 17380207 NR Description: Proteasome subunit beta type 1-A (20S proteasome
  misc_feature (1)..(189): Homolog of NCBI NO: 17380206 NR Description: Proteasome subunit beta type 1-B (20S proteasome
  misc_feature (1)..(166): Homolog of NCBI NO: 14594933 NR Description: putative beta6 proteasome subunit [Nicotiana
  misc_feature (1)..(189): Homolog of NCBI NO: 17380182 NR Description: Proteasome subunit beta type 1 (20S proteasome
  misc_feature (1)..(189): Homolog of NCBI NO: 17380185 NR Description: Proteasome subunit beta type 1 (20S proteasome
  misc_feature (1)..(189): Homolog of NCBI NO: 15232965 NR Description: 20S proteasome beta subunit F1 (PBF1)
  misc_feature (1)..(189): Homolog of NCBI NO: 600387 NR Description: proteosome subunit [Arabidopsis thaliana]
MSTGYSILSRDYSKIHKLADRPVLSSSGFQADVKALQKVLKSRHLIYQHQHNKQMSCPAMAQLLSNTLYFKRFFPYYAFNVLGGLDEEGKGCVFTYDAVGSYERVGYGAQGSGSTLIMPFLDNQLKSPSPLLLPKQDSNTPLSEAEAVDLVKTVFASATERDIYTGDKLEIMILKADGIKTELMDLRKD

SEQ ID NO: 22828 - protein, 135 aa, Arabidopsis thaliana
  peptide (1)..(135): Ceres Seq. ID no. 12384528
  misc_feature (1)..(120): Pfam Name: Proteasome A-type and B-type Pfam Description: Proteasome A-type and B-type
  misc_feature (1)..(135): Homolog of NCBI NO: 38174388 NR Description: Unknown (protein for MGC:75736) [Silurana
  misc_feature (1)..(135): Homolog of NCBI NO: 27694605 NR Description: Unknown (protein for MGC:52861) [Xenopus laevis]
  misc_feature (1)..(135): Homolog of NCBI NO: 28829610 NR Description: similar to Petunia hybrida (Petunia). Proteasome beta type 1 (EC 3.4.99.46) (20S proteasome alpha subunit F) (20S
  misc_feature (1)..(135): Homolog of NCBI NO: 17380207 NR Description: Proteasome subunit beta type 1-A (20S proteasome
  misc_feature (1)..(135): Homolog of NCBI NO: 17380206 NR Description: Proteasome subunit beta type 1-B (20S proteasome
  misc_feature (1)..(112): Homolog of NCBI NO: 14594933 NR Description: putative beta6 proteasome subunit [Nicotiana
  misc_feature (1)..(135): Homolog of NCBI NO: 17380182 NR Description: Proteasome subunit beta type 1 (20S proteasome
  misc_feature (1)..(135): Homolog of NCBI NO: 17380185 NR Description: Proteasome subunit beta type 1 (20S proteasome
  misc_feature (1)..(135): Homolog of NCBI NO: 15232965 NR Description: 20S proteasome beta subunit F1 (PBF1)
  misc_feature (1)..(135): Homolog of NCBI NO: 600387 NR Description: proteosome subunit [Arabidopsis thaliana]
MSCPAMAQLLSNTLYFKRFFPYYAFNVLGGLDEEGKGCVFTYDAVGSYERVGYGAQGSGSTLIMPFLDNQLKSPSPLLLPKQDSNTPLSEAEAVDLVKTVFASATERDIYTGDKLEIMILKADGIKTELMDLRKD

SEQ ID NO: 22829 - DNA, 959 bp, Arabidopsis thaliana
  misc_feature (1)..(959): Ceres Seq. ID no. 12483430
  misc_feature: MA Experiment ID: 108501 Result: Down-regulated in Transcription
  misc_feature: MA Experiment 108501 PARAMETER Experiment Name: At_ap2_floral_buds_cDNA_P Parameter: Plant Line Value: ap2 (Ler.)
  misc_feature: MA Experiment 108501 PARAMETER Experiment Name: At_ap2_floral_buds_cDNA_P Parameter: Tissue Value: Closed Flower
  misc_feature: MA Experiment ID: 20000113 Result: Down-regulated in Transcription
  misc_feature: MA Experiment 20000113 PARAMETER Experiment Name: At_42deg_Heat_cDNA_P Parameter: Temperature (deg C) Value: 42 vs. 22
  misc_feature: MA Experiment 20000113 PARAMETER Experiment Name: At_42deg_Heat_cDNA_P Parameter: Timepoint (hr) Value: 8
  misc_feature: MA Experiment 20000113 PARAMETER Experiment Name: At_42deg_Heat_cDNA_P Parameter: Tissue Value: Aerial
  misc_feature: MA Experiment ID: 20000234 Result: Up-regulated in Transcription
  misc_feature: MA Experiment 20000234 PARAMETER Experiment Name: At_Siliques_P Parameter: Age (day) Value: 21
  misc_feature: MA Experiment 20000234 PARAMETER Experiment Name: At_Siliques_P Parameter: Organism Value: A. thaliana
  misc_feature: MA Experiment 20000234 PARAMETER Experiment Name: At_Siliques_P Parameter: Plant Line Value: WS
  misc_feature: MA Experiment 20000234 PARAMETER Experiment Name: At_Siliques_P Parameter: Tissue Value: Less Than 5mm Siliques vs. Whole Plant
  misc_feature: MA Experiment ID: 20000235 Result: Up-regulated in Transcription
  misc_feature: MA Experiment 20000235 PARAMETER Experiment Name: At_Siliques_P Parameter: Age (day) Value: 21
  misc_feature: MA Experiment 20000235 PARAMETER Experiment Name: At_Siliques_P Parameter: Organism Value: A. thaliana
  misc_feature: MA Experiment 20000235 PARAMETER Experiment Name: At_Siliques_P Parameter: Plant Line Value: WS
  misc_feature: MA Experiment 20000235 PARAMETER Experiment Name: At_Siliques_P Parameter: Tissue Value: 5-10mm Siliques vs. Whole Plant
  misc_feature: MA Experiment ID: 20000264 Result: Up-regulated in Transcription
  misc_feature: MA Experiment 20000264 PARAMETER Experiment Name: At_Open_Flower_P Parameter: Age (day) Value: 21
  misc_feature: MA Experiment 20000264 PARAMETER Experiment Name: At_Open_Flower_P Parameter: Plant Line Value: WS
  misc_feature: MA Experiment 20000264 PARAMETER Experiment Name: At_Open_Flower_P Parameter: Tissue Value: Open Flower vs. Whole Plant
  misc_feature: MA Experiment ID: 20000265 Result: Up-regulated in Transcription
  misc_feature: MA Experiment 20000265 PARAMETER Experiment Name: At_Open_Flower_P Parameter: Age (day) Value: 21
  misc_feature: MA Experiment 20000265 PARAMETER Experiment Name: At_Open_Flower_P Parameter: Plant Line Value: WS
  misc_feature: MA Experiment 20000265 PARAMETER Experiment Name: At_Open_Flower_P Parameter: Tissue Value: Closed Flower vs. Whole Plant
  misc_feature: MA Experiment ID: 20000286 Result: Up-regulated in Transcription
  misc_feature: MA Experiment 20000286 PARAMETER Experiment Name: At_Open_Flower_P Parameter: Age (day) Value: 21
  misc_feature: MA Experiment 20000286 PARAMETER Experiment Name: At_Open_Flower_P Parameter: Plant Line Value: WS
  misc_feature: MA Experiment 20000286 PARAMETER Experiment Name: At_Open_Flower_P Parameter: Tissue Value: Half Open vs. Whole Plant
  misc_feature: MA Experiment ID: 20000794 Result: Up-regulated in Transcription
  misc_feature: MA Experiment 20000794 PARAMETER Experiment Name: At_Petals_P Parameter: Age (day) Value: 23-25 days
  misc_feature: MA Experiment 20000794 PARAMETER Experiment Name: At_Petals_P Parameter: Plant Line Value: WS
  misc_feature: MA Experiment 20000794 PARAMETER Experiment Name: At_Petals_P Parameter: Tissue Value: Petals vs. Whole plant
aaaacaaaaagattaaacaaagagagaagaatatggcgagagggaagatccagatcaagaggatagagaaccagacaaacagacaagtgacgtattcaaagagaagaaatggtttattcaagaaagcacatgagctcacggttttgtgtgatgctagggtttcgattatcatgttctctagctccaacaagcttcatgagtatatcagccctaacaccacaacgaaggagatcgtagatctgtaccaaactatttctgatgtcgatgtttgggccactcaatatgagcgaatgcaagaaaccaagaggaaactgttggagacaaatagaaatctccggactcagatcaagcagaggctaggtgagtgtttgaacaagcttgacattcaggagctgcgtcgtcttgaggatgaaatggaaaacactttcaaactcgttcgcgagcgcaagttcaaatctcttgggaatcagatcgagaccaccaagaaaaagaacaaaagtcaacaagacatacaaaagaatctcatacatgagctggaactaagagctgaagatcctcactatggactagtagacaatggaggagattacgactcagttcttggataccaaatcgaagggtcacgtgcttacgctcttcgtttccaccagaaccatcaccactattaccccaaccatggccttcatgcaccctctgcctctgacatcattaccttccatcttcttgaataattaaaggctaaaaggtttgctggtgccatcattgtctatctaattatttagtaactacttaaaacataaggcatggtgttgctaaaaccttaaactgtcatgtttcttagttatgtattttaaagcctaaagaaatatggattgtgtgatcagtagtgcttaggcttattgtgtgtggaatgttttcaagacttttatcatgtatcgtattattatattgaccactcc

SEQ ID NO: 22830 - protein, 242 aa, Arabidopsis thaliana
  peptide (1)..(242): Ceres Seq. ID no. 12483431
  misc_feature (81)..(180): Pfam Name: K-box region Pfam Description: K-box region
  misc_feature (11)..(242): Homolog of NCBI NO: 5805240 NR Description: floral homeotic protein AP3 [Arabidopsis thaliana]
  misc_feature (11)..(242): Homolog of NCBI NO: 5805238 NR Description: floral homeotic protein AP3 [Arabidopsis thaliana]
  misc_feature (11)..(242): Homolog of NCBI NO: 5805228 NR Description: floral homeotic protein AP3 [Arabidopsis thaliana]
  misc_feature (11)..(242): Homolog of NCBI NO: 5805234 NR Description: floral homeotic protein AP3 [Arabidopsis thaliana]
  misc_feature (11)..(242): Homolog of NCBI NO: 5805226 NR Description: floral homeotic protein AP3 [Arabidopsis thaliana]
  misc_feature (11)..(242): Homolog of NCBI NO: 1384044 NR Description: APETALA3 [Arabidopsis thaliana]
  misc_feature (11)..(242): Homolog of NCBI NO: 5805230 NR Description: floral homeotic protein AP3 [Arabidopsis thaliana]
  misc_feature (11)..(242): Homolog of NCBI NO: 15232493 NR Description: floral homeotic protein APETALA3 (AP3)
  misc_feature (11)..(242): Homolog of NCBI NO: 5805210 NR Description: floral homeotic protein AP3 [Arabidopsis
  misc_feature (11)..(242): Homolog of NCBI NO: 21592970 NR Description: floral homeotic protein APETALA3 (AP3)
NKKIKQREKNMARGKIQIKRIENQTNRQVTYSKRRNGLFKKAHELTVLCDARVSIIMFSSSNKLHEYISPNTTTKEIVDLYQTISDVDVWATQYERMQETKRKLLETNRNLRTQIKQRLGECLNKLDIQELRRLEDEMENTFKLVRERKFKSLGNQIETTKKKNKSQQDIQKNLIHELELRAEDPHYGLVDNGGDYDSVLGYQIEGSRAYALRFHQNHHHYYPNHGLHAPSASDIITFHLLE

SEQ ID NO: 22831 - protein, 232 aa, Arabidopsis thaliana
  peptide (1)..(232): Ceres Seq. ID no. 12483432
  misc_feature (71)..(170): Pfam Name: K-box region Pfam Description: K-box region
  misc_feature (1)..(232): Homolog of NCBI NO: 5805240 NR Description: floral homeotic protein AP3 [Arabidopsis thaliana]
  misc_feature (1)..(232): Homolog of NCBI NO: 5805238 NR Description: floral homeotic protein AP3 [Arabidopsis thaliana]
  misc_feature (1)..(232): Homolog of NCBI NO: 5805228 NR Description: floral homeotic protein AP3 [Arabidopsis thaliana]
  misc_feature (1)..(232): Homolog of NCBI NO: 5805226 NR Description: floral homeotic protein AP3 [Arabidopsis thaliana]
  misc_feature (1)..(232): Homolog of NCBI NO: 5805234 NR Description: floral homeotic protein AP3 [Arabidopsis thaliana]
  misc_feature (1)..(232): Homolog of NCBI NO: 1384044 NR Description: APETALA3 [Arabidopsis thaliana]
  misc_feature (1)..(232): Homolog of NCBI NO: 5805230 NR Description: floral homeotic protein AP3 [Arabidopsis thaliana]
  misc_feature (1)..(232): Homolog of NCBI NO: 15232493 NR Description: floral homeotic protein APETALA3 (AP3)
  misc_feature (1)..(232): Homolog of NCBI NO: 5805210 NR Description: floral homeotic protein AP3 [Arabidopsis
  misc_feature (1)..(232): Homolog of NCBI NO: 21592970 NR Description: floral homeotic protein APETALA3 (AP3)
MARGKIQIKRIENQTNRQVTYSKRRNGLFKKAHELTVLCDARVSIIMFSSSNKLHEYISPNTTTKEIVDLYQTISDVDVWATQYERMQETKRKLLETNRNLRTQIKQRLGECLNKLDIQELRRLEDEMENTFKLVRERKFKSLGNQIETTKKKNKSQQDIQKNLIHELELRAEDPHYGLVDNGGDYDSVLGYQIEGSRAYALRFHQNHHHYYPNHGLHAPSASDIITFHLLE

SEQ ID NO: 22832 - protein, 186 aa, Arabidopsis thaliana
  peptide (1)..(186): Ceres Seq. ID no. 12483433
  misc_feature (25)..(124): Pfam Name: K-box region Pfam Description: K-box region
  misc_feature (1)..(186): Homolog of NCBI NO: 5805240 NR Description: floral homeotic protein AP3 [Arabidopsis thaliana]
  misc_feature (1)..(186): Homolog of NCBI NO: 5805238 NR Description: floral homeotic protein AP3 [Arabidopsis thaliana]
  misc_feature (1)..(186): Homolog of NCBI NO: 5805228 NR Description: floral homeotic protein AP3 [Arabidopsis thaliana]
  misc_feature (1)..(186): Homolog of NCBI NO: 5805226 NR Description: floral homeotic protein AP3 [Arabidopsis thaliana]
  misc_feature (1)..(186): Homolog of NCBI NO: 5805234 NR Description: floral homeotic protein AP3 [Arabidopsis thaliana]
  misc_feature (1)..(186): Homolog of NCBI NO: 1384044 NR Description: APETALA3 [Arabidopsis thaliana]
  misc_feature (1)..(186): Homolog of NCBI NO: 5805230 NR Description: floral homeotic protein AP3 [Arabidopsis thaliana]
  misc_feature (1)..(186): Homolog of NCBI NO: 15232493 NR Description: floral homeotic protein APETALA3 (AP3)
  misc_feature (1)..(186): Homolog of NCBI NO: 5805210 NR Description: floral homeotic protein AP3 [Arabidopsis
  misc_feature (1)..(186): Homolog of NCBI NO: 21592970 NR Description: floral homeotic protein APETALA3 (AP3)
MFSSSNKLHEYISPNTTTKEIVDLYQTISDVDVWATQYERMQETKRKLLETNRNLRTQIKQRLGECLNKLDIQELRRLEDEMENTFKLVRERKFKSLGNQIETTKKKNKSQQDIQKNLIHELELRAEDPHYGLVDNGGDYDSVLGYQIEGSRAYALRFHQNHHHYYPNHGLHAPSASDIITFHLLE

SEQ ID NO: 22833 - DNA, 687 bp, Arabidopsis thaliana
  misc_feature (1)..(687): Ceres Seq. ID no. 13593815
  misc_feature: MA Experiment ID: 108594 Result: Down-regulated in Transcription
  misc_feature: MA Experiment 108594 PARAMETER Experiment Name: At_Ler-rhl_Root_cDNA_P Parameter: Plant Line Value: null
  misc_feature: MA Experiment ID: 108595 Result: Down-regulated in Transcription
  misc_feature: MA Experiment 108595 PARAMETER Experiment Name: At_Ler-pi_Ovule_cDNA_P Parameter: Plant Line Value: null
  misc_feature: MA Experiment ID: 20000180 Result: Up-regulated in Transcription
  misc_feature: MA Experiment 20000180 PARAMETER Experiment Name: At_Germinating_Seeds_P Parameter: Age (hr) Value: 24 vs. 0
  misc_feature: MA Experiment 20000180 PARAMETER Experiment Name: At_Germinating_Seeds_P Parameter: Tissue Value: Germinating Seeds
  misc_feature: MA Experiment ID: 20000185 Result: Down-regulated in Transcription
  misc_feature: MA Experiment 20000185 PARAMETER Experiment Name: At_Roots__P Parameter: Age (day) Value: 7 vs. 21
  misc_feature: MA Experiment 20000185 PARAMETER Experiment Name: At_Roots__P Parameter: Organism Value: A. thaliana
  misc_feature: MA Experiment 20000185 PARAMETER Experiment Name: At_Roots__P Parameter: Tissue Value: Roots vs. Whole Plant
  misc_feature: MA Experiment ID: 20000264 Result: Down-regulated in Transcription
  misc_feature: MA Experiment 20000264 PARAMETER Experiment Name: At_Open_Flower_P Parameter: Age (day) Value: 21
  misc_feature: MA Experiment 20000264 PARAMETER Experiment Name: At_Open_Flower_P Parameter: Plant Line Value: WS
  misc_feature: MA Experiment 20000264 PARAMETER Experiment Name: At_Open_Flower_P Parameter: Tissue Value: Open Flower vs. Whole Plant
  misc_feature: MA Experiment ID: 20000286 Result: Down-regulated in Transcription
  misc_feature: MA Experiment 20000286 PARAMETER Experiment Name: At_Open_Flower_P Parameter: Age (day) Value: 21
  misc_feature: MA Experiment 20000286 PARAMETER Experiment Name: At_Open_Flower_P Parameter: Plant Line Value: WS
  misc_feature: MA Experiment 20000286 PARAMETER Experiment Name: At_Open_Flower_P Parameter: Tissue Value: Half Open vs. Whole Plant
  misc_feature: MA Experiment ID: 20000438 Result: Up-regulated in Transcription
  misc_feature: MA Experiment 20000438 PARAMETER Experiment Name: At_Shoots__P Parameter: Age (day) Value: 14
  misc_feature: MA Experiment 20000438 PARAMETER Experiment Name: At_Shoots__P Parameter: Tissue Value: Shoots vs. Whole Plant
  misc_feature: MA Experiment ID: 20000439 Result: Down-regulated in Transcription
  misc_feature: MA Experiment 20000439 PARAMETER Experiment Name: At_Roots__P Parameter: Age (day) Value: 14 vs. 21
  misc_feature: MA Experiment 20000439 PARAMETER Experiment Name: At_Roots__P Parameter: Organism Value: A. thaliana
  misc_feature: MA Experiment 20000439 PARAMETER Experiment Name: At_Roots__P Parameter: Tissue Value: Roots vs. Whole Plant
  misc_feature: MA Experiment ID: 20000794 Result: Down-regulated in Transcription
  misc_feature: MA Experiment 20000794 PARAMETER Experiment Name: At_Petals_P Parameter: Age (day) Value: 23-25 days
  misc_feature: MA Experiment 20000794 PARAMETER Experiment Name: At_Petals_P Parameter: Plant Line Value: WS
  misc_feature: MA Experiment 20000794 PARAMETER Experiment Name: At_Petals_P Parameter: Tissue Value: Petals vs. Whole plant
  misc_feature: MA Experiment ID: 20001451 Result: Down-regulated in Transcription
  misc_feature: MA Experiment 20001451 PARAMETER Experiment Name: At_Far-red-induction_P Parameter: Age (day) Value: 7
  misc_feature: MA Experiment 20001451 PARAMETER Experiment Name: At_Far-red-induction_P Parameter: Light Value: Far-red vs. White
  misc_feature: MA Experiment 20001451 PARAMETER Experiment Name: At_Far-red-induction_P Parameter: Organism Value: A. thaliana
  misc_feature: MA Experiment 20001451 PARAMETER Experiment Name: At_Far-red-induction_P Parameter: Plant Line Value: Columbia
  misc_feature: MA Experiment 20001451 PARAMETER Experiment Name: At_Far-red-induction_P Parameter: Timepoint (hr) Value: 24
  misc_feature: MA Experiment 20001451 PARAMETER Experiment Name: At_Far-red-induction_P Parameter: Tissue Value: Whole Plant
  misc_feature: MA Experiment ID: 20001557 Result: Down-regulated in Transcription
  misc_feature: MA Experiment 20001557 PARAMETER Experiment Name: At_Drought_Soil_Dry_P Parameter: Age (day) Value: 27
  misc_feature: MA Experiment 20001557 PARAMETER Experiment Name: At_Drought_Soil_Dry_P Parameter: Organism Value: A. thaliana
  misc_feature: MA Experiment 20001557 PARAMETER Experiment Name: At_Drought_Soil_Dry_P Parameter: Plant Line Value: WS
  misc_feature: MA Experiment 20001557 PARAMETER Experiment Name: At_Drought_Soil_Dry_P Parameter: Post Timepoint (hr) Value: 3
  misc_feature: MA Experiment 20001557 PARAMETER Experiment Name: At_Drought_Soil_Dry_P Parameter: Post-Treatment Value: Re-Water vs. No Drought
  misc_feature: MA Experiment 20001557 PARAMETER Experiment Name: At_Drought_Soil_Dry_P Parameter: Timepoint (day) Value: 13
  misc_feature: MA Experiment 20001557 PARAMETER Experiment Name: At_Drought_Soil_Dry_P Parameter: Treatment Value: Drought vs. No Drought
  misc_feature: MA Experiment ID: 20001757 Result: Up-regulated in Transcription
  misc_feature: MA Experiment 20001757 PARAMETER Experiment Name: At_50mM_NH4NO3_L-to-H_P Parameter: Timepoint (hr) Value: 6
  misc_feature: MA Experiment 20001757 PARAMETER Experiment Name: At_50mM_NH4NO3_L-to-H_P Parameter: Tissue Value: Leaf
  misc_feature: MA Experiment 20001757 PARAMETER Experiment Name: At_50mM_NH4NO3_L-to-H_P Parameter: Treatment Value: 50mM NH4NO3 vs 100mM Mannitol
  misc_feature: MA Experiment ID: 20001905 Result: Down-regulated in Transcription
  misc_feature: MA Experiment 20001905 PARAMETER Experiment Name: At_Drought_Reproduction_P Parameter: Age (day) Value: 40
  misc_feature: MA Experiment 20001905 PARAMETER Experiment Name: At_Drought_Reproduction_P Parameter: Organism Value: A. thaliana
  misc_feature: MA Experiment 20001905 PARAMETER Experiment Name: At_Drought_Reproduction_P Parameter: Plant Line Value: WS
  misc_feature: MA Experiment 20001905 PARAMETER Experiment Name: At_Drought_Reproduction_P Parameter: Timepoint (day) Value: 10
  misc_feature: MA Experiment 20001905 PARAMETER Experiment Name: At_Drought_Reproduction_P Parameter: Tissue Value: Rosettes
  misc_feature: MA Experiment 20001905 PARAMETER Experiment Name: At_Drought_Reproduction_P Parameter: Treatment Value: Drought vs. No Drought
  misc_feature: MA Experiment ID: 20001906 Result: Down-regulated in Transcription
  misc_feature: MA Experiment 20001906 PARAMETER Experiment Name: At_Drought_Reproduction_P Parameter: Age (day) Value: 35
  misc_feature: MA Experiment 20001906 PARAMETER Experiment Name: At_Drought_Reproduction_P Parameter: Organism Value: A. thaliana
  misc_feature: MA Experiment 20001906 PARAMETER Experiment Name: At_Drought_Reproduction_P Parameter: Plant Line Value: WS
  misc_feature: MA Experiment 20001906 PARAMETER Experiment Name: At_Drought_Reproduction_P Parameter: Timepoint (day) Value: 5
  misc_feature: MA Experiment 20001906 PARAMETER Experiment Name: At_Drought_Reproduction_P Parameter: Tissue Value: Siliques
  misc_feature: MA Experiment 20001906 PARAMETER Experiment Name: At_Drought_Reproduction_P Parameter: Treatment Value: Drought vs. No Drought
  misc_feature: MA Experiment ID: 20001908 Result: Down-regulated in Transcription
  misc_feature: MA Experiment 20001908 PARAMETER Experiment Name: At_Drought_Reproduction_P Parameter: Age (day) Value: 40
  misc_feature: MA Experiment 20001908 PARAMETER Experiment Name: At_Drought_Reproduction_P Parameter: Organism Value: A. thaliana
  misc_feature: MA Experiment 20001908 PARAMETER Experiment Name: At_Drought_Reproduction_P Parameter: Plant Line Value: WS
  misc_feature: MA Experiment 20001908 PARAMETER Experiment Name: At_Drought_Reproduction_P Parameter: Timepoint (day) Value: 10
  misc_feature: MA Experiment 20001908 PARAMETER Experiment Name: At_Drought_Reproduction_P Parameter: Tissue Value: Siliques
  misc_feature: MA Experiment 20001908 PARAMETER Experiment Name: At_Drought_Reproduction_P Parameter: Treatment Value: Drought vs. No Drought
actcatttttctattactgaaatttttcttagagaagaagaagaagaggcaaaatggccacaagcgcatcagctttgctctcaccaaccacattctccactgcaatctcccacaaaaaccctaactccatctcattccatggccttcgtcccctccgtctaggtggctcctcctccgccctacccaaactatcaaccaccgggagaaaatcctcctccactgtcgtgagagctgagctaagcccttccatcgtcataagtctcaggtctctccctcttcctcggtcgtttcgtcttcttcaacttccagagagagaacgtagcaaaacagggcttaccggagcagaacggaaaaacccatttcgaagctggagatgatcgtgctaaggagtacgtcagtctcttgaaatcgaacgatccaattggattcaacattgttgatgttcttgcttggggttctattggacacatcgttgcttactacatcttggctacttccagcaatggatacgacccaagcttctttggatgattcgtttcaatgtcaatctctcgtatatgtatatgtatatgtttgacttgtgttgcaagctatctaatctgttctctatctctgtttcttcttctgttgttgttgttgttgtctaagacttgtccctctttttgcaaatgttttatttctccattt

SEQ ID NO: 22834 - protein, 107 aa, Arabidopsis thaliana
  peptide (1)..(107): Ceres Seq. ID no. 13593816
  misc_feature (1)..(105): Homolog of NCBI NO: 15222757 NR Description: photosystem I subunit V precursor -related
  misc_feature (20)..(70): Homolog of NCBI NO: 131194 NR Description: Photosystem I reaction center subunit V,
MATSASALLSPTTFSTAISHKNPNSISFHGLRPLRLGGSSSALPKLSTTGRKSSSTVVRAELSPSIVISLRSLPLPRSFRLLQLPERERSKTGLTGAERKNPFRSWR

SEQ ID NO: 22835 - protein, 53 aa, Arabidopsis thaliana
  peptide (1)..(53): Ceres Seq. ID no. 13593817
THFSITEIFLREEEEEAKWPQAHQLCSHQPHSPLQSPTKTLTPSHSMAFVPSV

SEQ ID NO: 22836 - DNA, 1016 bp, Arabidopsis thaliana
  misc_feature (1)..(1016): Ceres Seq. ID no. 12739204
  misc_feature: MA Experiment ID: 108434 Result: Down-regulated in Transcription
  misc_feature: MA Experiment 108434 PARAMETER Experiment Name: At_Root_Tips_cDNA_P Parameter: Tissue Value: Root Tips
  misc_feature: MA Experiment ID: 108461 Result: Up-regulated in Transcription
  misc_feature: MA Experiment 108461 PARAMETER Experiment Name: At_Germinating_Seeds_cDNA_P Parameter: Age (day) Value: 1 vs. 0
  misc_feature: MA Experiment 108461 PARAMETER Experiment Name: At_Germinating_Seeds_cDNA_P Parameter: Tissue Value: Germinating Seeds
  misc_feature: MA Experiment ID: 108462 Result: Up-regulated in Transcription
  misc_feature: MA Experiment 108462 PARAMETER Experiment Name: At_Germinating_Seeds_cDNA_P Parameter: Age (day) Value: 2 vs. 0
  misc_feature: MA Experiment 108462 PARAMETER Experiment Name: At_Germinating_Seeds_cDNA_P Parameter: Tissue Value: Germinating Seeds
  misc_feature: MA Experiment ID: 108464 Result: Up-regulated in Transcription
  misc_feature: MA Experiment 108464 PARAMETER Experiment Name: At_Germinating_Seeds_cDNA_P Parameter: Age (day) Value: 4 vs. 0
  misc_feature: MA Experiment 108464 PARAMETER Experiment Name: At_Germinating_Seeds_cDNA_P Parameter: Tissue Value: Germinating Seeds
  misc_feature: MA Experiment ID: 108488 Result: Up-regulated in Transcription
  misc_feature: MA Experiment ID: 108489 Result: Down-regulated in Transcription
  misc_feature: MA Experiment ID: 108595 Result: Down-regulated in Transcription
  misc_feature: MA Experiment 108595 PARAMETER Experiment Name: At_Ler-pi_Ovule_cDNA_P Parameter: Plant Line Value: null
  misc_feature: MA Experiment ID: 20000180 Result: Up-regulated in Transcription
  misc_feature: MA Experiment 20000180 PARAMETER Experiment Name: At_Germinating_Seeds_P Parameter: Age (hr) Value: 24 vs. 0
  misc_feature: MA Experiment 20000180 PARAMETER Experiment Name: At_Germinating_Seeds_P Parameter: Tissue Value: Germinating Seeds
  misc_feature: MA Experiment ID: 20000185 Result: Down-regulated in Transcription
  misc_feature: MA Experiment 20000185 PARAMETER Experiment Name: At_Roots__P Parameter: Age (day) Value: 7 vs. 21
  misc_feature: MA Experiment 20000185 PARAMETER Experiment Name: At_Roots__P Parameter: Organism Value: A. thaliana
  misc_feature: MA Experiment 20000185 PARAMETER Experiment Name: At_Roots__P Parameter: Tissue Value: Roots vs. Whole Plant
  misc_feature: MA Experiment ID: 20000227 Result: Down-regulated in Transcription
  misc_feature: MA Experiment 20000227 PARAMETER Experiment Name: At_Root-Tips-vs-Tops_P Parameter: Tissue Value: Root Tips vs. Root Tops
  misc_feature: MA Experiment ID: 20000439 Result: Down-regulated in Transcription
  misc_feature: MA Experiment 20000439 PARAMETER Experiment Name: At_Roots__P Parameter: Age (day) Value: 14 vs. 21
  misc_feature: MA Experiment 20000439 PARAMETER Experiment Name: At_Roots__P Parameter: Organism Value: A. thaliana
  misc_feature: MA Experiment 20000439 PARAMETER Experiment Name: At_Roots__P Parameter: Tissue Value: Roots vs. Whole Plant
  misc_feature: MA Experiment ID: 20000794 Result: Down-regulated in Transcription
  misc_feature: MA Experiment 20000794 PARAMETER Experiment Name: At_Petals_P Parameter: Age (day) Value: 23-25 days
  misc_feature: MA Experiment 20000794 PARAMETER Experiment Name: At_Petals_P Parameter: Plant Line Value: WS
  misc_feature: MA Experiment 20000794 PARAMETER Experiment Name: At_Petals_P Parameter: Tissue Value: Petals vs. Whole plant
  misc_feature: MA Experiment ID: 20001450 Result: Up-regulated in Transcription
  misc_feature: MA Experiment 20001450 PARAMETER Experiment Name: At_Far-red-induction_P Parameter: Age (day) Value: 7
  misc_feature: MA Experiment 20001450 PARAMETER Experiment Name: At_Far-red-induction_P Parameter: Light Value: Far-red vs. White
  misc_feature: MA Experiment 20001450 PARAMETER Experiment Name: At_Far-red-induction_P Parameter: Organism Value: A. thaliana
  misc_feature: MA Experiment 20001450 PARAMETER Experiment Name: At_Far-red-induction_P Parameter: Plant Line Value: Columbia
  misc_feature: MA Experiment 20001450 PARAMETER Experiment Name: At_Far-red-induction_P Parameter: Timepoint (hr) Value: 8
  misc_feature: MA Experiment 20001450 PARAMETER Experiment Name: At_Far-red-induction_P Parameter: Tissue Value: Whole Plant
  misc_feature: MA Experiment ID: 20001451 Result: Up-regulated in Transcription
  misc_feature: MA Experiment 20001451 PARAMETER Experiment Name: At_Far-red-induction_P Parameter: Age (day) Value: 7
  misc_feature: MA Experiment 20001451 PARAMETER Experiment Name: At_Far-red-induction_P Parameter: Light Value: Far-red vs. White
  misc_feature: MA Experiment 20001451 PARAMETER Experiment Name: At_Far-red-induction_P Parameter: Organism Value: A. thaliana
  misc_feature: MA Experiment 20001451 PARAMETER Experiment Name: At_Far-red-induction_P Parameter: Plant Line Value: Columbia
  misc_feature: MA Experiment 20001451 PARAMETER Experiment Name: At_Far-red-induction_P Parameter: Timepoint (hr) Value: 24
  misc_feature: MA Experiment 20001451 PARAMETER Experiment Name: At_Far-red-induction_P Parameter: Tissue Value: Whole Plant
  misc_feature: MA Experiment ID: 20001757 Result: Up-regulated in Transcription
  misc_feature: MA Experiment 20001757 PARAMETER Experiment Name: At_50mM_NH4NO3_L-to-H_P Parameter: Timepoint (hr) Value: 6
  misc_feature: MA Experiment 20001757 PARAMETER Experiment Name: At_50mM_NH4NO3_L-to-H_P Parameter: Tissue Value: Leaf
  misc_feature: MA Experiment 20001757 PARAMETER Experiment Name: At_50mM_NH4NO3_L-to-H_P Parameter: Treatment Value: 50mM NH4NO3 vs 100mM Mannitol
aatcaataacaaaccacccatttcttggcttacaacaacaaatcttaaacgttttactttgtgctgcactactcaacctcaatggccgcctcaacaatggctctctcctcccctgccttcgccggtaaggccgtcaagctttcccccgcggcatctgaagtccttggaagcggccgtgtgacaatgaggaagactgttgccaagccaaagggcccatcaggcagcccatggtacggatctgaccgtgtcaagtacttgggtccattctctggcgaatcaccgagctaccttaccggagagttccccggagactacggatgggacaccgccggactttcagctgaccccgagacattcgcaaggaaccgtgagctagaagttatccacagcaggtgggcaatgctcggagccctaggctgcgtcttccctgagcttttggctaggaacggagtcaagttcggagaggcggtttggttcaaggccggttcacagatcttcagcgatggagggctcgattacttgggaaaccctagcttagttcacgctcagagcattttggccatttgggccacacaagttattttgatgggagccgttgaaggctacagagtcgcaggaaatgggccattgggagaggccgaggacttgctttaccccggtggcagcttcgacccattgggtttggctaccgacccagaggcattcgctgagttgaaggtgaaggagctcaagaacggaagattggctatgttctctatgtttggattcttcgttcaagccatcgtcactggtaagggaccgatagagaaccttgctgaccatttggccgatccagttaacaacaacgcatgggccttcgccaccaactttgttcccggaaagtgagccaagttttatctgtattttgcttcagtctttgcttcgtgagtgtgagaggagaaagagagcttgtttagatgtaaaatttgcaagactttgtattttttttcattaatcaaataactcgtttttctctc

SEQ ID NO: 22837 - protein, 267 aa, Arabidopsis thaliana; identical to SEQ ID NO: 22639
  peptide (1)..(267): Ceres Seq. ID no. 12739205
  misc_feature (65)..(234): Pfam Name: Chlorophyll A-B binding protein Pfam Description: Chlorophyll A-B binding protein
  misc_feature (1)..(267): Homolog of NCBI NO: 115819 NR Description: Chlorophyll A-B binding protein 1B, chloroplast
  misc_feature (19)..(267): Homolog of NCBI NO: 12324161 NR Description: chlorophyll A-B-binding protein 2 precursor, 5'
  misc_feature (1)..(267): Homolog of NCBI NO: 21592428 NR Description: putative photosystem II type I chlorophyll a b
  misc_feature (1)..(267): Homolog of NCBI NO: 18266039 NR Description: chlorophyll a/b binding protein [Brassica
  misc_feature (1)..(267): Homolog of NCBI NO: 18403549 NR Description: photosystem II type I chlorophyll a /b binding
  misc_feature (1)..(267): Homolog of NCBI NO: 115778 NR Description: Chlorophyll A-B binding protein 1, chloroplast
  misc_feature (1)..(267): Homolog of NCBI NO: 18403546 NR Description: photosystem II type I chlorophyll a /b binding
  misc_feature (1)..(267): Homolog of NCBI NO: 17473828 NR Description: chlorophyll a/b-binding protein [Arabidopsis
  misc_feature (1)..(267): Homolog of NCBI NO: 18397286 NR Description: photosystem II type I chlorophyll a /b binding
  misc_feature (1)..(267): Homolog of NCBI NO: 15220615 NR Description: light-harvesting chlorophyll a/b binding protein

SEQ ID NO: 22838 - protein, 262 aa, Arabidopsis thaliana; identical to SEQ ID NO: 22640
  peptide (1)..(262): Ceres Seq. ID no. 12739206
  misc_feature (60)..(229): Pfam Name: Chlorophyll A-B binding protein Pfam Description: Chlorophyll A-B binding protein
  misc_feature (1)..(262): Homolog of NCBI NO: 115819 NR Description: Chlorophyll A-B binding protein 1B, chloroplast
  misc_feature (14)..(262): Homolog of NCBI NO: 12324161 NR Description: chlorophyll A-B-binding protein 2 precursor, 5'
  misc_feature (1)..(262): Homolog of NCBI NO: 21592428 NR Description: putative photosystem II type I chlorophyll a b
  misc_feature (1)..(262): Homolog of NCBI NO: 18266039 NR Description: chlorophyll a/b binding protein [Brassica
  misc_feature (1)..(262): Homolog of NCBI NO: 18403549 NR Description: photosystem II type I chlorophyll a /b binding
  misc_feature (1)..(262): Homolog of NCBI NO: 115778 NR Description: Chlorophyll A-B binding protein 1, chloroplast
  misc_feature (1)..(262): Homolog of NCBI NO: 18403546 NR Description: photosystem II type I chlorophyll a /b binding
  misc_feature (1)..(262): Homolog of NCBI NO: 17473828 NR Description: chlorophyll a/b-binding protein [Arabidopsis
  misc_feature (1)..(262): Homolog of NCBI NO: 18397286 NR Description: photosystem II type I chlorophyll a /b binding
  misc_feature (1)..(262): Homolog of NCBI NO: 15220615 NR Description: light-harvesting chlorophyll a/b binding protein

SEQ ID NO: 22839 - protein, 233 aa, Arabidopsis thaliana; identical to SEQ ID NO: 21214
  peptide (1)..(233): Ceres Seq. ID no. 12739207
  misc_feature (31)..(200): Pfam Name: Chlorophyll A-B binding protein Pfam Description: Chlorophyll A-B binding protein
  misc_feature (1)..(233): Homolog of NCBI NO: 115819 NR Description: Chlorophyll A-B binding protein 1B, chloroplast
  misc_feature (1)..(233): Homolog of NCBI NO: 12324161 NR Description: chlorophyll A-B-binding protein 2 precursor, 5'
  misc_feature (1)..(233): Homolog of NCBI NO: 21592428 NR Description: putative photosystem II type I chlorophyll a b
  misc_feature (1)..(233): Homolog of NCBI NO: 18266039 NR Description: chlorophyll a/b binding protein [Brassica
  misc_feature (1)..(233): Homolog of NCBI NO: 18403549 NR Description: photosystem II type I chlorophyll a /b binding
  misc_feature (1)..(233): Homolog of NCBI NO: 115778 NR Description: Chlorophyll A-B binding protein 1, chloroplast
  misc_feature (1)..(233): Homolog of NCBI NO: 18403546 NR Description: photosystem II type I chlorophyll a /b binding
  misc_feature (1)..(233): Homolog of NCBI NO: 17473828 NR Description: chlorophyll a/b-binding protein [Arabidopsis
  misc_feature (1)..(233): Homolog of NCBI NO: 18397286 NR Description: photosystem II type I chlorophyll a /b binding
  misc_feature (1)..(233): Homolog of NCBI NO: 15220615 NR Description: light-harvesting chlorophyll a/b binding protein

SEQ ID NO: 22840 - DNA, 1500 bp, Arabidopsis thaliana
  misc_feature (1)..(1500): Ceres Seq. ID no. 12323725
  misc_feature: MA Experiment ID: 108573 Result: Up-regulated in Transcription
  misc_feature: MA Experiment 108573 PARAMETER Experiment Name: At_Drought_cDNA_P Parameter: Timepoint (hr) Value: 6
  misc_feature: MA Experiment 108573 PARAMETER Experiment Name: At_Drought_cDNA_P Parameter: Tissue Value: Aerial
  misc_feature: MA Experiment 108573 PARAMETER Experiment Name: At_Drought_cDNA_P Parameter: Treatment Value: Drought vs. No Drought
  misc_feature: MA Experiment ID: 108577 Result: Down-regulated in Transcription
  misc_feature: MA Experiment 108577 PARAMETER Experiment Name: At_42deg_Heat_cDNA_P Parameter: Temperature (deg C) Value: 42 vs. 22
  misc_feature: MA Experiment 108577 PARAMETER Experiment Name: At_42deg_Heat_cDNA_P Parameter: Timepoint (hr) Value: 6
  misc_feature: MA Experiment 108577 PARAMETER Experiment Name: At_42deg_Heat_cDNA_P Parameter: Tissue Value: Aerial
aacgtttcgacagtctctacaccgtcatgaacactgaatcagttgtcgagttccttgggaatgtgaccttgttgcagcggttacctagttcctctctgaagagaatctccgaagtcgttgtcttcaaaggttatgacagaggtgattatgtggttcgtgaaaatcaaaatgtggatggagtttattttctcttgcaaggacaggctcaggttctgagatcagccgaagaggaaaactatcaagagttccctttgaaacgatatgatttcttcggccatggtattttcggggatgtttactcagcagatgttgttgctgtgacagagcttacctgcttgctgttgatgtctgatcatcgtgctttacttgaaataaagtcagtctcggattcagataaggaacgctgtcttgtggaagacatactatatctagaaccattagatttgaatgtataccgggggttcaccccacctaatgctccaacctatggaaaggtttatggagggcaattagttggacaggcacttgccgcagcatcaaaaactgttgaaactatgaagatagtccataattttcattgctatttccttcttgttggagatataaatattcccatcatatatgatgttaaccgcttacgtgacggcaacaactttgccaccagaagtgtagatgctagacagaaaggaaaaactatattcaccttgttcgcgtcatttcagaaaaagcaacaaggttttattcaccaggagtcgaccatgcctcatacaccagctcctgaaacgcttctaccaagggaggagatgcttgaacggcttgttactgagcctctgctacctagggattaccgaaaccaagttgcaactgaaattagtgttccattccctatagatattcgattttgtgagccaaatcgttccactaaacagaataagtctcctccaagactaaaatattggtttagagcaaagggaaaactttctgatgatgatcaagctttgcacagatgtgtggttgcatttgcttccgatttgatattcgccactatcagtttaaaccctcaccggagagagggcatgagtgtagctgctcttagcctggaccactcgatgtggttccaccgacctgtaagagcagatgattggttgttgtttgtgtgagtccaactgcgacctaaagccgcggttttgcaactggcaaaatgttcaacagaaagggagagctggtggtatcattgacgcaagaagctgtgttaagagaagctgtgactattaagccatccttcggggccaagctatgaagccataggattttgatagtgagagaattgctgcatctgttactcctcacggtcacattccaaagagtcgtcacttatactacatttgcatatgtttttcgatccacaattattattttcccctctaaaagggtctacacatatgtttgtttgtaaccacgataatgtttcaacagcaatgaaaaagcaaacagtggttc

SEQ ID NO: 22841 - protein, 385 aa, Arabidopsis thaliana
  peptide (1)..(385): Ceres Seq. ID no. 12323726
  misc_feature (286)..(385): Pfam Name: Acyl-CoA thioesterase Pfam Description: Acyl-CoA thioesterase
  misc_feature (131)..(384): Homolog of NCBI NO: 18543371 NR Description: 4,8-dimethylnonanoyl-CoA thioesterase
  misc_feature (131)..(384): Homolog of NCBI NO: 14548007 NR Description: Peroxisomal acyl-coenzyme A thioester hydrolase 1
  misc_feature (9)..(165): Homolog of NCBI NO: 15236847 NR Description: similar to Similar to protein kinase; protein id:
  misc_feature (281)..(315): Homolog of NCBI NO: 15236850 NR Description: putative acetyl CoA thioesterase; protein id:
  misc_feature (335)..(385): Homolog of NCBI NO: 15236850 NR Description: putative acetyl CoA thioesterase; protein id:
  misc_feature (173)..(240): Homolog of NCBI NO: 15236850 NR Description: putative acetyl CoA thioesterase; protein id:
  misc_feature (152)..(385): Homolog of NCBI NO: 25304479 NR Description: hypothetical protein T1N6.10 - Arabidopsis
  misc_feature (13)..(385): Homolog of NCBI NO: 38345758 NR Description: OSJNBa0065O17.11 [Oryza sativa (japonica
  misc_feature (9)..(385): Homolog of NCBI NO: 26449786 NR Description: putative acyl CoA thioesterase [Arabidopsis
  misc_feature (9)..(385): Homolog of NCBI NO: 30678177 NR Description: acyl CoA thioesterase -related [Arabidopsis
RFDSLYTVMNTESVVEFLGNVTLLQRLPSSSLKRISEVVVFKGYDRGDYVVRENQNVDGVYFLLQGQAQVLRSAEEENYQEFPLKRYDFFGHGIFGDVYSADVVAVTELTCLLLMSDHRALLEIKSVSDSDKERCLVEDILYLEPLDLNVYRGFTPPNAPTYGKVYGGQLVGQALAAASKTVETMKIVHNFHCYFLLVGDINIPIIYDVNRLRDGNNFATRSVDARQKGKTIFTLFASFQKKQQGFIHQESTMPHTPAPETLLPREEMLERLVTEPLLPRDYRNQVATEISVPFPIDIRFCEPNRSTKQNKSPPRLKYWFRAKGKLSDDDQALHRCVVAFASDLIFATISLNPHRREGMSVAALSLDHSMWFHRPVRADDWLLFV

SEQ ID NO: 22842 - protein, 377 aa, Arabidopsis thaliana
  peptide (1)..(377): Ceres Seq. ID no. 12323727
  misc_feature (278)..(377): Pfam Name: Acyl-CoA thioesterase Pfam Description: Acyl-CoA thioesterase
  misc_feature (123)..(376): Homolog of NCBI NO: 18543371 NR Description: 4,8-dimethylnonanoyl-CoA thioesterase
  misc_feature (123)..(376): Homolog of NCBI NO: 14548007 NR Description: Peroxisomal acyl-coenzyme A thioester hydrolase 1
  misc_feature (1)..(157): Homolog of NCBI NO: 15236847 NR Description: similar to Similar to protein kinase; protein id:
  misc_feature (273)..(307): Homolog of NCBI NO: 15236850 NR Description: putative acetyl CoA thioesterase; protein id:
  misc_feature (327)..(377): Homolog of NCBI NO: 15236850 NR Description: putative acetyl CoA thioesterase; protein id:
  misc_feature (165)..(232): Homolog of NCBI NO: 15236850 NR Description: putative acetyl CoA thioesterase; protein id:
  misc_feature (144)..(377): Homolog of NCBI NO: 25304479 NR Description: hypothetical protein T1N6.10 - Arabidopsis
  misc_feature (5)..(377): Homolog of NCBI NO: 38345758 NR Description: OSJNBa0065O17.11 [Oryza sativa (japonica
  misc_feature (1)..(377): Homolog of NCBI NO: 26449786 NR Description: putative acyl CoA thioesterase [Arabidopsis
  misc_feature (1)..(377): Homolog of NCBI NO: 30678177 NR Description: acyl CoA thioesterase -related [Arabidopsis
MNTESVVEFLGNVTLLQRLPSSSLKRISEVVVFKGYDRGDYVVRENQNVDGVYFLLQGQAQVLRSAEEENYQEFPLKRYDFFGHGIFGDVYSADVVAVTELTCLLLMSDHRALLEIKSVSDSDKERCLVEDILYLEPLDLNVYRGFTPPNAPTYGKVYGGQLVGQALAAASKTVETMKIVHNFHCYFLLVGDINIPIIYDVNRLRDGNNFATRSVDARQKGKTIFTLFASFQKKQQGFIHQESTMPHTPAPETLLPREEMLERLVTEPLLPRDYRNQVATEISVPFPIDIRFCEPNRSTKQNKSPPRLKYWFRAKGKLSDDDQALHRCVVAFASDLIFATISLNPHRREGMSVAALSLDHSMWFHRPVRADDWLLFV

SEQ ID NO: 22843 - protein, 271 aa, Arabidopsis thaliana
  peptide (1)..(271): Ceres Seq. ID no. 12323728
  misc_feature (172)..(271): Pfam Name: Acyl-CoA thioesterase Pfam Description: Acyl-CoA thioesterase
  misc_feature (17)..(270): Homolog of NCBI NO: 18543371 NR Description: 4,8-dimethylnonanoyl-CoA thioesterase
  misc_feature (17)..(270): Homolog of NCBI NO: 14548007 NR Description: Peroxisomal acyl-coenzyme A thioester hydrolase 1
  misc_feature (1)..(51): Homolog of NCBI NO: 15236847 NR Description: similar to Similar to protein kinase; protein id:
  misc_feature (167)..(201): Homolog of NCBI NO: 15236850 NR Description: putative acetyl CoA thioesterase; protein id:
  misc_feature (221)..(271): Homolog of NCBI NO: 15236850 NR Description: putative acetyl CoA thioesterase; protein id:
  misc_feature (59)..(126): Homolog of NCBI NO: 15236850 NR Description: putative acetyl CoA thioesterase; protein id:
  misc_feature (38)..(271): Homolog of NCBI NO: 25304479 NR Description: hypothetical protein T1N6.10 - Arabidopsis
  misc_feature (1)..(271): Homolog of NCBI NO: 38345758 NR Description: OSJNBa0065O17.11 [Oryza sativa (japonica
  misc_feature (1)..(271): Homolog of NCBI NO: 26449786 NR Description: putative acyl CoA thioesterase [Arabidopsis
  misc_feature (1)..(271): Homolog of NCBI NO: 30678177 NR Description: acyl CoA thioesterase -related [Arabidopsis
MSDHRALLEIKSVSDSDKERCLVEDILYLEPLDLNVYRGFTPPNAPTYGKVYGGQLVGQALAAASKTVETMKIVHNFHCYFLLVGDINIPIIYDVNRLRDGNNFATRSVDARQKGKTIFTLFASFQKKQQGFIHQESTMPHTPAPETLLPREEMLERLVTEPLLPRDYRNQVATEISVPFPIDIRFCEPNRSTKQNKSPPRLKYWFRAKGKLSDDDQALHRCVVAFASDLIFATISLNPHRREGMSVAALSLDHSMWFHRPVRADDWLLFV

SEQ ID NO: 22844 - DNA, 1407 bp, Arabidopsis thaliana
  misc_feature (1)..(1407): Ceres Seq. ID no. 12395930
  misc_feature: MA Experiment ID: 108488 Result: Up-regulated in Transcription
  misc_feature: MA Experiment ID: 108561 Result: Down-regulated in Transcription
  misc_feature: MA Experiment 108561 PARAMETER Experiment Name: At_100uM_ABA_cDNA_P Parameter: Timepoint (hr) Value: 6
  misc_feature: MA Experiment 108561 PARAMETER Experiment Name: At_100uM_ABA_cDNA_P Parameter: Tissue Value: Aerial
  misc_feature: MA Experiment 108561 PARAMETER Experiment Name: At_100uM_ABA_cDNA_P Parameter: Treatment Value: 100uM ABA vs. No Treatment
  misc_feature: MA Experiment ID: 108569 Result: Up-regulated in Transcription
  misc_feature: MA Experiment 108569 PARAMETER Experiment Name: At_0.001%_MeJA__cDNA_P Parameter: Timepoint (hr) Value: 6
  misc_feature: MA Experiment 108569 PARAMETER Experiment Name: At_0.001%_MeJA__cDNA_P Parameter: Tissue Value: Aerial
  misc_feature: MA Experiment 108569 PARAMETER Experiment Name: At_0.001%_MeJA__cDNA_P Parameter: Treatment Value: 0.001% MeJA vs. No Treatment
  misc_feature: MA Experiment ID: 108573 Result: Up-regulated in Transcription
  misc_feature: MA Experiment 108573 PARAMETER Experiment Name: At_Drought_cDNA_P Parameter: Timepoint (hr) Value: 6
  misc_feature: MA Experiment 108573 PARAMETER Experiment Name: At_Drought_cDNA_P Parameter: Tissue Value: Aerial
  misc_feature: MA Experiment 108573 PARAMETER Experiment Name: At_Drought_cDNA_P Parameter: Treatment Value: Drought vs. No Drought
  misc_feature: MA Experiment ID: 108577 Result: Down-regulated in Transcription
  misc_feature: MA Experiment 108577 PARAMETER Experiment Name: At_42deg_Heat_cDNA_P Parameter: Temperature (deg C) Value: 42 vs. 22
  misc_feature: MA Experiment 108577 PARAMETER Experiment Name: At_42deg_Heat_cDNA_P Parameter: Timepoint (hr) Value: 6
  misc_feature: MA Experiment 108577 PARAMETER Experiment Name: At_42deg_Heat_cDNA_P Parameter: Tissue Value: Aerial
  misc_feature: MA Experiment ID: 108579 Result: Down-regulated in Transcription
  misc_feature: MA Experiment 108579 PARAMETER Experiment Name: At_4deg_Cold_cDNA_P Parameter: Temperature (deg C) Value: 4 vs. 22
  misc_feature: MA Experiment 108579 PARAMETER Experiment Name: At_4deg_Cold_cDNA_P Parameter: Timepoint (hr) Value: 6
  misc_feature: MA Experiment 108579 PARAMETER Experiment Name: At_4deg_Cold_cDNA_P Parameter: Tissue Value: Aerial
  misc_feature: MA Experiment ID: 108595 Result: Down-regulated in Transcription
  misc_feature: MA Experiment 108595 PARAMETER Experiment Name: At_Ler-pi_Ovule_cDNA_P Parameter: Plant Line Value: null
  misc_feature: MA Experiment ID: 108605 Result: Down-regulated in Transcription
  misc_feature: MA Experiment 108605 PARAMETER Experiment Name: At_100uM_ABA_cDNA_P Parameter: Timepoint (hr) Value: 6
  misc_feature: MA Experiment 108605 PARAMETER Experiment Name: At_100uM_ABA_cDNA_P Parameter: Tissue Value: Aerial
  misc_feature: MA Experiment 108605 PARAMETER Experiment Name: At_100uM_ABA_cDNA_P Parameter: Treatment Value: 100uM ABA vs. No Treatment
  misc_feature: MA Experiment ID: 108607 Result: Down-regulated in Transcription
  misc_feature: MA Experiment 108607 PARAMETER Experiment Name: At_100uM_ABA_cDNA_P Parameter: Timepoint (hr) Value: 4
  misc_feature: MA Experiment 108607 PARAMETER Experiment Name: At_100uM_ABA_cDNA_P Parameter: Tissue Value: Aerial
  misc_feature: MA Experiment 108607 PARAMETER Experiment Name: At_100uM_ABA_cDNA_P Parameter: Treatment Value: 100uM ABA vs. No Treatment
  misc_feature: MA Experiment ID: 108668 Result: Up-regulated in Transcription
  misc_feature: MA Experiment 108668 PARAMETER Experiment Name: At_2mM_SA_cDNA_P Parameter: Plant Line Value: WS
  misc_feature: MA Experiment 108668 PARAMETER Experiment Name: At_2mM_SA_cDNA_P Parameter: Timepoint (hr) Value: 6
  misc_feature: MA Experiment 108668 PARAMETER Experiment Name: At_2mM_SA_cDNA_P Parameter: Treatment Value: 2mM SA vs. No Treatment
  misc_feature: MA Experiment ID: 20000089 Result: Up-regulated in Transcription
  misc_feature: MA Experiment ID: 20000090 Result: Up-regulated in Transcription
  misc_feature: MA Experiment ID: 20000111 Result: Down-regulated in Transcription
  misc_feature: MA Experiment 20000111 PARAMETER Experiment Name: At_42deg_Heat_cDNA_P Parameter: Temperature (deg C) Value: 42 vs. 22
  misc_feature: MA Experiment 20000111 PARAMETER Experiment Name: At_42deg_Heat_cDNA_P Parameter: Timepoint (hr) Value: 6
  misc_feature: MA Experiment 20000111 PARAMETER Experiment Name: At_42deg_Heat_cDNA_P Parameter: Tissue Value: Aerial
  misc_feature: MA Experiment ID: 20000112 Result: Down-regulated in Transcription
  misc_feature: MA Experiment 20000112 PARAMETER Experiment Name: At_42deg_Heat_cDNA_P Parameter: Temperature (deg C) Value: 42 vs. 22
  misc_feature: MA Experiment 20000112 PARAMETER Experiment Name: At_42deg_Heat_cDNA_P Parameter: Timepoint (hr) Value: 2
  misc_feature: MA Experiment 20000112 PARAMETER Experiment Name: At_42deg_Heat_cDNA_P Parameter: Tissue Value: Aerial
  misc_feature: MA Experiment ID: 20000113 Result: Down-regulated in Transcription
  misc_feature: MA Experiment 20000113 PARAMETER Experiment Name: At_42deg_Heat_cDNA_P Parameter: Temperature (deg C) Value: 42 vs. 22
  misc_feature: MA Experiment 20000113 PARAMETER Experiment Name: At_42deg_Heat_cDNA_P Parameter: Timepoint (hr) Value: 8
  misc_feature: MA Experiment 20000113 PARAMETER Experiment Name: At_42deg_Heat_cDNA_P Parameter: Tissue Value: Aerial
  misc_feature: MA Experiment ID: 20000169 Result: Down-regulated in Transcription
  misc_feature: MA Experiment 20000169 PARAMETER Experiment Name: At_100uM_ABA_P Parameter: Age (day) Value: 14
  misc_feature: MA Experiment 20000169 PARAMETER Experiment Name: At_100uM_ABA_P Parameter: Organism Value: A. thaliana
  misc_feature: MA Experiment 20000169 PARAMETER Experiment Name: At_100uM_ABA_P Parameter: Plant Line Value: WS
  misc_feature: MA Experiment 20000169 PARAMETER Experiment Name: At_100uM_ABA_P Parameter: Timepoint (hr) Value: 6
  misc_feature: MA Experiment 20000169 PARAMETER Experiment Name: At_100uM_ABA_P Parameter: Tissue Value: Aerial
  misc_feature: MA Experiment 20000169 PARAMETER Experiment Name: At_100uM_ABA_P Parameter: Treatment Value: 100uM ABA vs. No Treatment
  misc_feature: MA Experiment ID: 20000173 Result: Down-regulated in Transcription
  misc_feature: MA Experiment 20000173 PARAMETER Experiment Name: At_42deg_Heat_P Parameter: Age (day) Value: 14
  misc_feature: MA Experiment 20000173 PARAMETER Experiment Name: At_42deg_Heat_P Parameter: Organism Value: A. thaliana
  misc_feature: MA Experiment 20000173 PARAMETER Experiment Name: At_42deg_Heat_P Parameter: Plant Line Value: WS
  misc_feature: MA Experiment 20000173 PARAMETER Experiment Name: At_42deg_Heat_P Parameter: Temperature (deg C) Value: 42 vs. 22
  misc_feature: MA Experiment 20000173 PARAMETER Experiment Name: At_42deg_Heat_P Parameter: Timepoint (hr) Value: 6
  misc_feature: MA Experiment 20000173 PARAMETER Experiment Name: At_42deg_Heat_P Parameter: Tissue Value: Aerial
  misc_feature: MA Experiment ID: 20000184 Result: Down-regulated in Transcription
  misc_feature: MA Experiment 20000184 PARAMETER Experiment Name: At_Shoots__P Parameter: Age (day) Value: 7
  misc_feature: MA Experiment 20000184 PARAMETER Experiment Name: At_Shoots__P Parameter: Tissue Value: Shoots vs. Whole Plant
  misc_feature: MA Experiment ID: 20000185 Result: Down-regulated in Transcription
  misc_feature: MA Experiment 20000185 PARAMETER Experiment Name: At_Roots__P Parameter: Age (day) Value: 7 vs. 21
  misc_feature: MA Experiment 20000185 PARAMETER Experiment Name: At_Roots__P Parameter: Organism Value: A. thaliana
  misc_feature: MA Experiment 20000185 PARAMETER Experiment Name: At_Roots__P Parameter: Tissue Value: Roots vs. Whole Plant
  misc_feature: MA Experiment ID: 20000227 Result: Up-regulated in Transcription
  misc_feature: MA Experiment 20000227 PARAMETER Experiment Name: At_Root-Tips-vs-Tops_P Parameter: Tissue Value: Root Tips vs. Root Tops
  misc_feature: MA Experiment ID: 20000264 Result: Down-regulated in Transcription
  misc_feature: MA Experiment 20000264 PARAMETER Experiment Name: At_Open_Flower_P Parameter: Age (day) Value: 21
  misc_feature: MA Experiment 20000264 PARAMETER Experiment Name: At_Open_Flower_P Parameter: Plant Line Value: WS
  misc_feature: MA Experiment 20000264 PARAMETER Experiment Name: At_Open_Flower_P Parameter: Tissue Value: Open Flower vs. Whole Plant
  misc_feature: MA Experiment ID: 20000267 Result: Down-regulated in Transcription
  misc_feature: MA Experiment 20000267 PARAMETER Experiment Name: At_Drought_P Parameter: Age (day) Value: 7
  misc_feature: MA Experiment 20000267 PARAMETER Experiment Name: At_Drought_P Parameter: Organism Value: A. thaliana
  misc_feature: MA Experiment 20000267 PARAMETER Experiment Name: At_Drought_P Parameter: Plant Line Value: WS
  misc_feature: MA Experiment 20000267 PARAMETER Experiment Name: At_Drought_P Parameter: Timepoint (hr) Value: 6
  misc_feature: MA Experiment 20000267 PARAMETER Experiment Name: At_Drought_P Parameter: Tissue Value: Whole Plant
  misc_feature: MA Experiment 20000267 PARAMETER Experiment Name: At_Drought_P Parameter: Treatment Value: Drought vs. No Drought
  misc_feature: MA Experiment ID: 20000438 Result: Down-regulated in Transcription
  misc_feature: MA Experiment 20000438 PARAMETER Experiment Name: At_Shoots__P Parameter: Age (day) Value: 14
  misc_feature: MA Experiment 20000438 PARAMETER Experiment Name: At_Shoots__P Parameter: Tissue Value: Shoots vs. Whole Plant
  misc_feature: MA Experiment ID: 20000439 Result: Down-regulated in Transcription
  misc_feature: MA Experiment 20000439 PARAMETER Experiment Name: At_Roots__P Parameter: Age (day) Value: 14 vs. 21
  misc_feature: MA Experiment 20000439 PARAMETER Experiment Name: At_Roots__P Parameter: Organism Value: A. thaliana
  misc_feature: MA Experiment 20000439 PARAMETER Experiment Name: At_Roots__P Parameter: Tissue Value: Roots vs. Whole Plant
  misc_feature: MA Experiment ID: 20000495 Result: Up-regulated in Transcription
  misc_feature: MA Experiment 20000495 PARAMETER Experiment Name: At_Guard_Cells_P Parameter: Harvest Date Value: 8/2/2002
  misc_feature: MA Experiment 20000495 PARAMETER Experiment Name: At_Guard_Cells_P Parameter: Organism Value: A. thaliana
  misc_feature: MA Experiment 20000495 PARAMETER Experiment Name: At_Guard_Cells_P Parameter: Tissue Value: Guard Cells vs. Leaves
  misc_feature: MA Experiment ID: 20001248 Result: Up-regulated in Transcription
  misc_feature: MA Experiment 20001248 PARAMETER Experiment Name: At_Far-red-induction_P Parameter: Age (day) Value: 7
  misc_feature: MA Experiment 20001248 PARAMETER Experiment Name: At_Far-red-induction_P Parameter: Light Value: Far-red vs. White
  misc_feature: MA Experiment 20001248 PARAMETER Experiment Name: At_Far-red-induction_P Parameter: Organism Value: A. thaliana
  misc_feature: MA Experiment 20001248 PARAMETER Experiment Name: At_Far-red-induction_P Parameter: Plant Line Value: Columbia
  misc_feature: MA Experiment 20001248 PARAMETER Experiment Name: At_Far-red-induction_P Parameter: Timepoint (hr) Value: 4
  misc_feature: MA Experiment 20001248 PARAMETER Experiment Name: At_Far-red-induction_P Parameter: Tissue Value: Whole Plant
  misc_feature: MA Experiment ID: 20001554 Result: Down-regulated in Transcription
  misc_feature: MA Experiment 20001554 PARAMETER Experiment Name: At_Drought_Soil_Dry_P Parameter: Age (day) Value: 21
  misc_feature: MA Experiment 20001554 PARAMETER Experiment Name: At_Drought_Soil_Dry_P Parameter: Organism Value: A. thaliana
  misc_feature: MA Experiment 20001554 PARAMETER Experiment Name: At_Drought_Soil_Dry_P Parameter: Plant Line Value: WS
  misc_feature: MA Experiment 20001554 PARAMETER Experiment Name: At_Drought_Soil_Dry_P Parameter: Post Timepoint (hr) Value: None
  misc_feature: MA Experiment 20001554 PARAMETER Experiment Name: At_Drought_Soil_Dry_P Parameter: Post-Treatment Value: None
  misc_feature: MA Experiment 20001554 PARAMETER Experiment Name: At_Drought_Soil_Dry_P Parameter: Timepoint (day) Value: 7
  misc_feature: MA Experiment 20001554 PARAMETER Experiment Name: At_Drought_Soil_Dry_P Parameter: Treatment Value: Drought vs. No Drought
  misc_feature: MA Experiment ID: 20001555 Result: Down-regulated in Transcription
  misc_feature: MA Experiment 20001555 PARAMETER Experiment Name: At_Drought_Soil_Dry_P Parameter: Age (day) Value: 24
  misc_feature: MA Experiment 20001555 PARAMETER Experiment Name: At_Drought_Soil_Dry_P Parameter: Organism Value: A. thaliana
  misc_feature: MA Experiment 20001555 PARAMETER Experiment Name: At_Drought_Soil_Dry_P Parameter: Plant Line Value: WS
  misc_feature: MA Experiment 20001555 PARAMETER Experiment Name: At_Drought_Soil_Dry_P Parameter: Post Timepoint (hr) Value: None
  misc_feature: MA Experiment 20001555 PARAMETER Experiment Name: At_Drought_Soil_Dry_P Parameter: Post-Treatment Value: None
  misc_feature: MA Experiment 20001555 PARAMETER Experiment Name: At_Drought_Soil_Dry_P Parameter: Timepoint (day) Value: 10
  misc_feature: MA Experiment 20001555 PARAMETER Experiment Name: At_Drought_Soil_Dry_P Parameter: Treatment Value: Drought vs. No Drought
  misc_feature: MA Experiment ID: 20001556 Result: Down-regulated in Transcription
  misc_feature: MA Experiment 20001556 PARAMETER Experiment Name: At_Drought_Soil_Dry_P Parameter: Age (day) Value: 26
  misc_feature: MA Experiment 20001556 PARAMETER Experiment Name: At_Drought_Soil_Dry_P Parameter: Organism Value: A. thaliana
  misc_feature: MA Experiment 20001556 PARAMETER Experiment Name: At_Drought_Soil_Dry_P Parameter: Plant Line Value: WS
  misc_feature: MA Experiment 20001556 PARAMETER Experiment Name: At_Drought_Soil_Dry_P Parameter: Post Timepoint (hr) Value: None
  misc_feature: MA Experiment 20001556 PARAMETER Experiment Name: At_Drought_Soil_Dry_P Parameter: Post-Treatment Value: None
  misc_feature: MA Experiment 20001556 PARAMETER Experiment Name: At_Drought_Soil_Dry_P Parameter: Timepoint (day) Value: 12
  misc_feature: MA Experiment 20001556 PARAMETER Experiment Name: At_Drought_Soil_Dry_P Parameter: Treatment Value: Drought vs. No Drought
  misc_feature: MA Experiment ID: 20001557 Result: Up-regulated in Transcription
  misc_feature: MA Experiment 20001557 PARAMETER Experiment Name: At_Drought_Soil_Dry_P Parameter: Age (day) Value: 27
  misc_feature: MA Experiment 20001557 PARAMETER Experiment Name: At_Drought_Soil_Dry_P Parameter: Organism Value: A. thaliana
  misc_feature: MA Experiment 20001557 PARAMETER Experiment Name: At_Drought_Soil_Dry_P Parameter: Plant Line Value: WS
  misc_feature: MA Experiment 20001557 PARAMETER Experiment Name: At_Drought_Soil_Dry_P Parameter: Post Timepoint (hr) Value: 3
  misc_feature: MA Experiment 20001557 PARAMETER Experiment Name: At_Drought_Soil_Dry_P Parameter: Post-Treatment Value: Re-Water vs. No Drought
  misc_feature: MA Experiment 20001557 PARAMETER Experiment Name: At_Drought_Soil_Dry_P Parameter: Timepoint (day) Value: 13
  misc_feature: MA Experiment 20001557 PARAMETER Experiment Name: At_Drought_Soil_Dry_P Parameter: Treatment Value: Drought vs. No Drought
  misc_feature: MA Experiment ID: 20001559 Result: Down-regulated in Transcription
  misc_feature: MA Experiment 20001559 PARAMETER Experiment Name: At_Drought_Soil_Dry_P Parameter: Age (day) Value: 28
  misc_feature: MA Experiment 20001559 PARAMETER Experiment Name: At_Drought_Soil_Dry_P Parameter: Organism Value: A. thaliana
  misc_feature: MA Experiment 20001559 PARAMETER Experiment Name: At_Drought_Soil_Dry_P Parameter: Plant Line Value: WS
  misc_feature: MA Experiment 20001559 PARAMETER Experiment Name: At_Drought_Soil_Dry_P Parameter: Post Timepoint (hr) Value: 29
  misc_feature: MA Experiment 20001559 PARAMETER Experiment Name: At_Drought_Soil_Dry_P Parameter: Post-Treatment Value: Re-Water vs. No Drought
  misc_feature: MA Experiment 20001559 PARAMETER Experiment Name: At_Drought_Soil_Dry_P Parameter: Timepoint (day) Value: 14
  misc_feature: MA Experiment 20001559 PARAMETER Experiment Name: At_Drought_Soil_Dry_P Parameter: Treatment Value: Drought vs. No Drought
  misc_feature: MA Experiment ID: 20001560 Result: Up-regulated in Transcription
  misc_feature: MA Experiment 20001560 PARAMETER Experiment Name: At_Drought_Soil_Dry_P Parameter: Age (day) Value: 28
  misc_feature: MA Experiment 20001560 PARAMETER Experiment Name: At_Drought_Soil_Dry_P Parameter: Organism Value: A. thaliana
  misc_feature: MA Experiment 20001560 PARAMETER Experiment Name: At_Drought_Soil_Dry_P Parameter: Plant Line Value: WS
  misc_feature: MA Experiment 20001560 PARAMETER Experiment Name: At_Drought_Soil_Dry_P Parameter: Post Timepoint (hr) Value: None
  misc_feature: MA Experiment 20001560 PARAMETER Experiment Name: At_Drought_Soil_Dry_P Parameter: Post-Treatment Value: None
  misc_feature: MA Experiment 20001560 PARAMETER Experiment Name: At_Drought_Soil_Dry_P Parameter: Timepoint (day) Value: 14
  misc_feature: MA Experiment 20001560 PARAMETER Experiment Name: At_Drought_Soil_Dry_P Parameter: Treatment Value: Drought vs. No Drought
  misc_feature: MA Experiment ID: 20001757 Result: Up-regulated in Transcription
  misc_feature: MA Experiment 20001757 PARAMETER Experiment Name: At_50mM_NH4NO3_L-to-H_P Parameter: Timepoint (hr) Value: 6
  misc_feature: MA Experiment 20001757 PARAMETER Experiment Name: At_50mM_NH4NO3_L-to-H_P Parameter: Tissue Value: Leaf
  misc_feature: MA Experiment 20001757 PARAMETER Experiment Name: At_50mM_NH4NO3_L-to-H_P Parameter: Treatment Value: 50mM NH4NO3 vs 100mM Mannitol
  misc_feature: MA Experiment ID: 20001904 Result: Down-regulated in Transcription
  misc_feature: MA Experiment 20001904 PARAMETER Experiment Name: At_Drought_Reproduction_P Parameter: Age (day) Value: 37
  misc_feature: MA Experiment 20001904 PARAMETER Experiment Name: At_Drought_Reproduction_P Parameter: Organism Value: A. thaliana
  misc_feature: MA Experiment 20001904 PARAMETER Experiment Name: At_Drought_Reproduction_P Parameter: Plant Line Value: WS
  misc_feature: MA Experiment 20001904 PARAMETER Experiment Name: At_Drought_Reproduction_P Parameter: Timepoint (day) Value: 7
  misc_feature: MA Experiment 20001904 PARAMETER Experiment Name: At_Drought_Reproduction_P Parameter: Tissue Value: Rosettes
  misc_feature: MA Experiment 20001904 PARAMETER Experiment Name: At_Drought_Reproduction_P Parameter: Treatment Value: Drought vs. No Drought
  misc_feature: MA Experiment ID: 20001906 Result: Down-regulated in Transcription
  misc_feature: MA Experiment 20001906 PARAMETER Experiment Name: At_Drought_Reproduction_P Parameter: Age (day) Value: 35
  misc_feature: MA Experiment 20001906 PARAMETER Experiment Name: At_Drought_Reproduction_P Parameter: Organism Value: A. thaliana
  misc_feature: MA Experiment 20001906 PARAMETER Experiment Name: At_Drought_Reproduction_P Parameter: Plant Line Value: WS
  misc_feature: MA Experiment 20001906 PARAMETER Experiment Name: At_Drought_Reproduction_P Parameter: Timepoint (day) Value: 5
  misc_feature: MA Experiment 20001906 PARAMETER Experiment Name: At_Drought_Reproduction_P Parameter: Tissue Value: Siliques
  misc_feature: MA Experiment 20001906 PARAMETER Experiment Name: At_Drought_Reproduction_P Parameter: Treatment Value: Drought vs. No Drought
  misc_feature: MA Experiment ID: 20001908 Result: Down-regulated in Transcription
  misc_feature: MA Experiment 20001908 PARAMETER Experiment Name: At_Drought_Reproduction_P Parameter: Age (day) Value: 40
  misc_feature: MA Experiment 20001908 PARAMETER Experiment Name: At_Drought_Reproduction_P Parameter: Organism Value: A. thaliana
  misc_feature: MA Experiment 20001908 PARAMETER Experiment Name: At_Drought_Reproduction_P Parameter: Plant Line Value: WS
  misc_feature: MA Experiment 20001908 PARAMETER Experiment Name: At_Drought_Reproduction_P Parameter: Timepoint (day) Value: 10
  misc_feature: MA Experiment 20001908 PARAMETER Experiment Name: At_Drought_Reproduction_P Parameter: Tissue Value: Siliques
  misc_feature: MA Experiment 20001908 PARAMETER Experiment Name: At_Drought_Reproduction_P Parameter: Treatment Value: Drought vs. No Drought
ataaacttttaaagctctctctttcagattcctctctatccatttcattaacaccaaaacctttttcttctctctaaccaaacaagaagaggactccattttcgcaagaatggggaggcttaagcaatgttggtcaagtctgctagtattggcagtgttggtgatcggaactggagccgttcccatcacttatctccaaagcgccgtcgctaaaggagccgtgtgtttggatgggagtgcaccagcttaccattttgacaaagggtttggttcgggtgttaacaattggatcgtccacatggagggaggaggatggtgtaccgacgttgcttcatgtaatgaacgtaagggtacaatgaagggttcttccaaattcatgaacaaagactttggattttccggtatcttgggtggcaagcaaagcactaacccagatttctacaattggaacagaatcaaagtacgatattgtgacggatcatcctttaccggcaatgtagaagccgttaatccggcaaacaagctgttcttccgcggtgcccgagtttggcgtgcggtggttgatgatcttatggctaaaggaatgaaaaacgctcaaaacgctatactctccggttgttcagctggagcattggctgcgattcttcattgtgacactttccgtgccatacttccccgaacagctagcgtcaaatgtgtttctgatgccggttactttatccacggtaaagatatcacaggaggatcatacattcaatcatattacagcaaagtcgtcgcactccacggatctgcaaagagtcttcctgtttcttgtacctcaaaaatgaaaccagaactctgtttcttcccgcaatacgtcgttccttccatgcgaacaccgctctttgtcatcaatgccgcttttgattcttggcagatcaagaacgttttggctccaactgctgttgataagggaaaagagtggaagaattgtaagcttgatcttaagaaatgtagtgccgctcagctcaaaaccgtccaagggtttagagatcagatgatgcgagcattgtcaccggttcacagtacaccgtctagaggattgttcttagactcgtgtcacgctcattgccaaggaggaagcgccgcctcttggtccggtgacaaaggtccccaagtcgccaatacgagaattgcgaaagcagtcggaaactggttttatggccggagtgcatttcagaagatagattgtccgtcgccgacttgtaatcctacttgtcctgctatctctactgaagactagaatcatctctaaatgttcaattttttttaatttgaaattgaaagagctcgcaaacattttggatttgttttccaaatcggatcaataataatcactgcaatttgaataaagagtatatcttt

SEQ ID NO: 22845 - protein, 391 aa, Arabidopsis thaliana
  peptide (1)..(391): Ceres Seq. ID no. 12395931
  misc_feature (10)..(373): Pfam Name: Pectinacetylesterase Pfam Description: Pectinacetylesterase
  misc_feature (24)..(384): Homolog of NCBI NO: 30696158 NR Description: pectinacetylesterase, putative [Arabidopsis
  misc_feature (24)..(384): Homolog of NCBI NO: 25347293 NR Description: probable pectinacetylesterase precursor T8L23.6
  misc_feature (124)..(391): Homolog of NCBI NO: 7488140 NR Description: probable pectin acetylesterase (EC 3.1.1.-) -
  misc_feature (1)..(384): Homolog of NCBI NO: 22328797 NR Description: pectinacetylesterase family; protein id:
  misc_feature (8)..(384): Homolog of NCBI NO: 7488883 NR Description: pectin acetylesterase (EC 3.1.1.-) precursor -
  misc_feature (11)..(384): Homolog of NCBI NO: 38344147 NR Description: OSJNBa0041A02.14 [Oryza sativa (japonica
  misc_feature (4)..(305): Homolog of NCBI NO: 30694729 NR Description: pectinacetylesterase, putative [Arabidopsis
  misc_feature (4)..(391): Homolog of NCBI NO: 15242357 NR Description: pectinacetylesterase, putative
  misc_feature (1)..(391): Homolog of NCBI NO: 21593445 NR Description: pectin acetylesterase [Arabidopsis thaliana]
  misc_feature (1)..(391): Homolog of NCBI NO: 18415308 NR Description: pectinacetylesterase, putative
MGRLKQCWSSLLVLAVLVIGTGAVPITYLQSAVAKGAVCLDGSAPAYHFDKGFGSGVNNWIVHMEGGGWCTDVASCNERKGTMKGSSKFMNKDFGFSGILGGKQSTNPDFYNWNRIKVRYCDGSSFTGNVEAVNPANKLFFRGARVWRAVVDDLMAKGMKNAQNAILSGCSAGALAAILHCDTFRAILPRTASVKCVSDAGYFIHGKDITGGSYIQSYYSKVVALHGSAKSLPVSCTSKMKPELCFFPQYVVPSMRTPLFVINAAFDSWQIKNVLAPTAVDKGKEWKNCKLDLKKCSAAQLKTVQGFRDQMMRALSPVHSTPSRGLFLDSCHAHCQGGSAASWSGDKGPQVANTRIAKAVGNWFYGRSAFQKIDCPSPTCNPTCPAISTED

SEQ ID NO: 22846 - protein, 328 aa, Arabidopsis thaliana
  peptide (1)..(328): Ceres Seq. ID no. 12395932
  misc_feature (1)..(310): Pfam Name: Pectinacetylesterase Pfam Description: Pectinacetylesterase
  misc_feature (1)..(321): Homolog of NCBI NO: 30696158 NR Description: pectinacetylesterase, putative [Arabidopsis
  misc_feature (1)..(321): Homolog of NCBI NO: 25347293 NR Description: probable pectinacetylesterase precursor T8L23.6
  misc_feature (61)..(328): Homolog of NCBI NO: 7488140 NR Description: probable pectin acetylesterase (EC 3.1.1.-) -
  misc_feature (1)..(321): Homolog of NCBI NO: 22328797 NR Description: pectinacetylesterase family; protein id:
  misc_feature (1)..(321): Homolog of NCBI NO: 7488883 NR Description: pectin acetylesterase (EC 3.1.1.-) precursor -
  misc_feature (1)..(321): Homolog of NCBI NO: 38344147 NR Description: OSJNBa0041A02.14 [Oryza sativa (japonica
  misc_feature (1)..(242): Homolog of NCBI NO: 30694729 NR Description: pectinacetylesterase, putative [Arabidopsis
  misc_feature (1)..(328): Homolog of NCBI NO: 15242357 NR Description: pectinacetylesterase, putative
  misc_feature (1)..(328): Homolog of NCBI NO: 21593445 NR Description: pectin acetylesterase [Arabidopsis thaliana]
  misc_feature (1)..(328): Homolog of NCBI NO: 18415308 NR Description: pectinacetylesterase, putative
MEGGGWCTDVASCNERKGTMKGSSKFMNKDFGFSGILGGKQSTNPDFYNWNRIKVRYCDGSSFTGNVEAVNPANKLFFRGARVWRAVVDDLMAKGMKNAQNAILSGCSAGALAAILHCDTFRAILPRTASVKCVSDAGYFIHGKDITGGSYIQSYYSKVVALHGSAKSLPVSCTSKMKPELCFFPQYVVPSMRTPLFVINAAFDSWQIKNVLAPTAVDKGKEWKNCKLDLKKCSAAQLKTVQGFRDQMMRALSPVHSTPSRGLFLDSCHAHCQGGSAASWSGDKGPQVANTRIAKAVGNWFYGRSAFQKIDCPSPTCNPTCPAISTED

SEQ ID NO: 22847 - protein, 309 aa, Arabidopsis thaliana
  peptide (1)..(309): Ceres Seq. ID no. 12395933
  misc_feature (1)..(291): Pfam Name: Pectinacetylesterase Pfam Description: Pectinacetylesterase
  misc_feature (1)..(302): Homolog of NCBI NO: 30696158 NR Description: pectinacetylesterase, putative [Arabidopsis
  misc_feature (1)..(302): Homolog of NCBI NO: 25347293 NR Description: probable pectinacetylesterase precursor T8L23.6
  misc_feature (42)..(309): Homolog of NCBI NO: 7488140 NR Description: probable pectin acetylesterase (EC 3.1.1.-) -
  misc_feature (1)..(302): Homolog of NCBI NO: 22328797 NR Description: pectinacetylesterase family; protein id:
  misc_feature (1)..(302): Homolog of NCBI NO: 7488883 NR Description: pectin acetylesterase (EC 3.1.1.-) precursor -
  misc_feature (1)..(302): Homolog of NCBI NO: 38344147 NR Description: OSJNBa0041A02.14 [Oryza sativa (japonica
  misc_feature (1)..(223): Homolog of NCBI NO: 30694729 NR Description: pectinacetylesterase, putative [Arabidopsis
  misc_feature (1)..(309): Homolog of NCBI NO: 15242357 NR Description: pectinacetylesterase, putative
  misc_feature (1)..(309): Homolog of NCBI NO: 21593445 NR Description: pectin acetylesterase [Arabidopsis thaliana]
  misc_feature (1)..(309): Homolog of NCBI NO: 18415308 NR Description: pectinacetylesterase, putative
MKGSSKFMNKDFGFSGILGGKQSTNPDFYNWNRIKVRYCDGSSFTGNVEAVNPANKLFFRGARVWRAVVDDLMAKGMKNAQNAILSGCSAGALAAILHCDTFRAILPRTASVKCVSDAGYFIHGKDITGGSYIQSYYSKVVALHGSAKSLPVSCTSKMKPELCFFPQYVVPSMRTPLFVINAAFDSWQIKNVLAPTAVDKGKEWKNCKLDLKKCSAAQLKTVQGFRDQMMRALSPVHSTPSRGLFLDSCHAHCQGGSAASWSGDKGPQVANTRIAKAVGNWFYGRSAFQKIDCPSPTCNPTCPAISTED

SEQ ID NO: 22848 - DNA, 2141 bp, Arabidopsis thaliana
  misc_feature (1)..(2141): Ceres Seq. ID no. 13488454
  misc_feature: MA Experiment ID: 108434 Result: Up-regulated in Transcription
  misc_feature: MA Experiment 108434 PARAMETER Experiment Name: At_Root_Tips_cDNA_P Parameter: Tissue Value: Root Tips
  misc_feature: MA Experiment ID: 20000286 Result: Up-regulated in Transcription
  misc_feature: MA Experiment 20000286 PARAMETER Experiment Name: At_Open_Flower_P Parameter: Age (day) Value: 21
  misc_feature: MA Experiment 20000286 PARAMETER Experiment Name: At_Open_Flower_P Parameter: Plant Line Value: WS
  misc_feature: MA Experiment 20000286 PARAMETER Experiment Name: At_Open_Flower_P Parameter: Tissue Value: Half Open vs. Whole Plant
atcactctctcattaatcgaacttggcgtgtttaaataatcttccgatcgttaattctcttccgatttcgattcgattttagcggcgatgtctctcagacctagcgcgaagacggaggtgcgacggaatcggtacaaagtagcggtcgatgcggaggaaggacggcggaggcgagaggataacttggttgagatcaggaagaacaagagagaggaaaatttgcagaagaagagatttacgtcttctatggcttttggctcagcaacgggacaaacggaacaggatctttcttcagcgaaccaattaaaagataatctacctgctatggttgctggaatctggtcagaggatagcaattcacaattggaggcaacaaatctcttgcggaaactgctttctattgaacaaaatcctcctatcaatgaagttgtacaatctggtgttgttcctcgtgttgtgaagtttctttccagggatgacttccccaaacttcagtttgaggcagcttgggcgctcacccaacattgcttcagggacatcagagaacacaaatgtcatcattgaaagtggagctgtcccgatattcatccaacttctcagctctgctagtgaagatgtccgcgaacaggctgtttgggcattgggaaatgttgctggagactcaccaaaatgccgggatttagtcctaagttacggtgccatgacacctcttctgtctcaattcaatgagaatacaaagctttcaatgctgagaaatgctacatggacattatcaaacttctgcagagggaagcccccacctgcatttgaacagacacaaccagctttaccagttcttgagcgccttgtgcaatcaatggatgaagaagttctcacagatgcatgctgggctctgtcatacctctcggataattcaaacgacaaaatacaagcagtcattgaagcaggagttgttcctcgcctcatccagctcttaggtcattcgtcgccatcagtgctgattcctgctcttcgtaccattggaaatattgtaaccggggatgatctacagactcagatggttctcgaccagcaagcgcttccttgtcttttgaaccttctaaaaaacaattacaagaagagtatcaagaaggaagcttgctggactatctccaacattacagctggaaatgcagatcagatacaagcagtgattgatgcaggtataatccagtctcttgtttgggtgcttcaaagtgcagagttcgaagtaaaaaaagaagctgcttggggaatctcaaatgctacttctggtggcactcatgatcaaatcaagtttatggtgagccaaggctgtatcaaacctctatgcgatctccttacttgcccagatctgaaagttgtaacggtttgcttagaagcactagagaacattctcgtggttggagaagcagagaagaacttaggtcacacaggagaagacaacctctacgctcaaatgattgacgaagcagaagggttagagaagattgagaatcttcagagtcacgacaacaatgatatctacgacaaagccgtgaagatcctcgaaacattttggactgaagacaatgaagaagaaggcaacgacgagaatcatgctccacaatctggtttccagttcggaagcaccaatgttcctcctggtcaattcaactttatttgaaagacaacaagaacaacaacatagccagatataatgctgtcttcaccagcttttgctgcagcacgttctactctcggtcgtcgtcttcatgcgaagagactatcttcttctactggtcgaaccgctgatccagagattcatgcccgtaacgatggagacgagcctagtctttttccatcagaccccgagggtttggatgatgtagcgaacccgaagactccagcggatgaggatgtaccggatattcgaccacccggttttgtaaaggaaccgctttctccgccaaaaaatcccagagatacttcacacaagcttgaatctactcccgttggtctacctgcagatctcaatttccaacagaaacgaaattaatagcagcaaacgccttagccgttatggccttctagatcattcagaaatgcttacttttgattagctttgagaataaaatttaatt

SEQ ID NO: 22849 - protein, 402 aa, Arabidopsis thaliana
  peptide (1)..(402): Ceres Seq. ID no. 13488455
  misc_feature (63)..(104): Pfam Name: Armadillo/beta-catenin-like repeat Pfam Description: Armadillo/beta-catenin-like repeat
  misc_feature (1)..(402): Homolog of NCBI NO: 25314872 NR Description: probable nuclear transport factor importin alpha
  misc_feature (1)..(402): Homolog of NCBI NO: 2154717 NR Description: Kap alpha protein [Arabidopsis thaliana]
  misc_feature (16)..(401): Homolog of NCBI NO: 13605661 NR Description: AT3g06720/F3E22_14 [Arabidopsis thaliana]
  misc_feature (16)..(401): Homolog of NCBI NO: 15809794 NR Description: AT3g06720/F3E22_14 [Arabidopsis thaliana]
  misc_feature (16)..(401): Homolog of NCBI NO: 15230778 NR Description: importin alpha subunit [Arabidopsis thaliana]
  misc_feature (16)..(401): Homolog of NCBI NO: 15217828 NR Description: importin alpha subunit -related [Arabidopsis
  misc_feature (16)..(401): Homolog of NCBI NO: 25314876 NR Description: probable nuclear transport factor importin
  misc_feature (16)..(401): Homolog of NCBI NO: 13699777 NR Description: AtKAP alpha [Arabidopsis thaliana]
  misc_feature (16)..(401): Homolog of NCBI NO: 3915737 NR Description: Importin alpha subunit (Karyopherin alpha
  misc_feature (1)..(402): Homolog of NCBI NO: 15235257 NR Description: importin alpha-2 subunit [Arabidopsis thaliana]
MTSPNFSLRQLGRSPNIASGTSENTNVIIESGAVPIFIQLLSSASEDVREQAVWALGNVAGDSPKCRDLVLSYGAMTPLLSQFNENTKLSMLRNATWTLSNFCRGKPPPAFEQTQPALPVLERLVQSMDEEVLTDACWALSYLSDNSNDKIQAVIEAGVVPRLIQLLGHSSPSVLIPALRTIGNIVTGDDLQTQMVLDQQALPCLLNLLKNNYKKSIKKEACWTISNITAGNADQIQAVIDAGIIQSLVWVLQSAEFEVKKEAAWGISNATSGGTHDQIKFMVSQGCIKPLCDLLTCPDLKVVTVCLEALENILVVGEAEKNLGHTGEDNLYAQMIDEAEGLEKIENLQSHDNNDIYDKAVKILETFWTEDNEEEGNDENHAPQSGFQFGSTNVPPGQFNFI

SEQ ID NO: 22850 - protein, 327 aa, Arabidopsis thaliana
  peptide (1)..(327): Ceres Seq. ID no. 13488456
  misc_feature (1)..(326): Homolog of NCBI NO: 3915737 NR Description: Importin alpha subunit (Karyopherin alpha
  misc_feature (1)..(326): Homolog of NCBI NO: 13605661 NR Description: AT3g06720/F3E22_14 [Arabidopsis thaliana]
  misc_feature (1)..(326): Homolog of NCBI NO: 13699777 NR Description: AtKAP alpha [Arabidopsis thaliana]
  misc_feature (1)..(326): Homolog of NCBI NO: 15809794 NR Description: AT3g06720/F3E22_14 [Arabidopsis thaliana]
  misc_feature (1)..(326): Homolog of NCBI NO: 25314876 NR Description: probable nuclear transport factor importin
  misc_feature (1)..(326): Homolog of NCBI NO: 15230778 NR Description: importin alpha subunit [Arabidopsis thaliana]
  misc_feature (1)..(326): Homolog of NCBI NO: 15217828 NR Description: importin alpha subunit -related [Arabidopsis
  misc_feature (1)..(327): Homolog of NCBI NO: 25314872 NR Description: probable nuclear transport factor importin alpha
  misc_feature (1)..(327): Homolog of NCBI NO: 2154717 NR Description: Kap alpha protein [Arabidopsis thaliana]
  misc_feature (1)..(327): Homolog of NCBI NO: 15235257 NR Description: importin alpha-2 subunit [Arabidopsis thaliana]
MTPLLSQFNENTKLSMLRNATWTLSNFCRGKPPPAFEQTQPALPVLERLVQSMDEEVLTDACWALSYLSDNSNDKIQAVIEAGVVPRLIQLLGHSSPSVLIPALRTIGNIVTGDDLQTQMVLDQQALPCLLNLLKNNYKKSIKKEACWTISNITAGNADQIQAVIDAGIIQSLVWVLQSAEFEVKKEAAWGISNATSGGTHDQIKFMVSQGCIKPLCDLLTCPDLKVVTVCLEALENILVVGEAEKNLGHTGEDNLYAQMIDEAEGLEKIENLQSHDNNDIYDKAVKILETFWTEDNEEEGNDENHAPQSGFQFGSTNVPPGQFNFI

SEQ ID NO: 22851 - protein, 312 aa, Arabidopsis thaliana
  peptide (1)..(312): Ceres Seq. ID no. 13488457
  misc_feature (1)..(311): Homolog of NCBI NO: 3915737 NR Description: Importin alpha subunit (Karyopherin alpha
  misc_feature (1)..(311): Homolog of NCBI NO: 13605661 NR Description: AT3g06720/F3E22_14 [Arabidopsis thaliana]
  misc_feature (1)..(311): Homolog of NCBI NO: 13699777 NR Description: AtKAP alpha [Arabidopsis thaliana]
  misc_feature (1)..(311): Homolog of NCBI NO: 15809794 NR Description: AT3g06720/F3E22_14 [Arabidopsis thaliana]
  misc_feature (1)..(311): Homolog of NCBI NO: 25314876 NR Description: probable nuclear transport factor importin
  misc_feature (1)..(311): Homolog of NCBI NO: 15230778 NR Description: importin alpha subunit [Arabidopsis thaliana]
  misc_feature (1)..(311): Homolog of NCBI NO: 15217828 NR Description: importin alpha subunit -related [Arabidopsis
  misc_feature (1)..(312): Homolog of NCBI NO: 25314872 NR Description: probable nuclear transport factor importin alpha
  misc_feature (1)..(312): Homolog of NCBI NO: 2154717 NR Description: Kap alpha protein [Arabidopsis thaliana]
  misc_feature (1)..(312): Homolog of NCBI NO: 15235257 NR Description: importin alpha-2 subunit [Arabidopsis thaliana]
MLRNATWTLSNFCRGKPPPAFEQTQPALPVLERLVQSMDEEVLTDACWALSYLSDNSNDKIQAVIEAGVVPRLIQLLGHSSPSVLIPALRTIGNIVTGDDLQTQMVLDQQALPCLLNLLKNNYKKSIKKEACWTISNITAGNADQIQAVIDAGIIQSLVWVLQSAEFEVKKEAAWGISNATSGGTHDQIKFMVSQGCIKPLCDLLTCPDLKVVTVCLEALENILVVGEAEKNLGHTGEDNLYAQMIDEAEGLEKIENLQSHDNNDIYDKAVKILETFWTEDNEEEGNDENHAPQSGFQFGSTNVPPGQFNFI

SEQ ID NO: 22852 - DNA, 1287 bp, Arabidopsis thaliana
  misc_feature (1)..(1287): Ceres Seq. ID no. 13487395
  misc_feature: MA Experiment ID: 108463 Result: Down-regulated in Transcription
  misc_feature: MA Experiment 108463 PARAMETER Experiment Name: At_Germinating_Seeds_cDNA_P Parameter: Age (day) Value: 3 vs. 0
  misc_feature: MA Experiment 108463 PARAMETER Experiment Name: At_Germinating_Seeds_cDNA_P Parameter: Tissue Value: Germinating Seeds
  misc_feature: MA Experiment ID: 108464 Result: Down-regulated in Transcription
  misc_feature: MA Experiment 108464 PARAMETER Experiment Name: At_Germinating_Seeds_cDNA_P Parameter: Age (day) Value: 4 vs. 0
  misc_feature: MA Experiment 108464 PARAMETER Experiment Name: At_Germinating_Seeds_cDNA_P Parameter: Tissue Value: Germinating Seeds
  misc_feature: MA Experiment ID: 108473 Result: Down-regulated in Transcription
  misc_feature: MA Experiment 108473 PARAMETER Experiment Name: At_Drought_Flowers_cDNA_P Parameter: Timepoint (hr) Value: 7 d
  misc_feature: MA Experiment 108473 PARAMETER Experiment Name: At_Drought_Flowers_cDNA_P Parameter: Tissue Value: Flower
  misc_feature: MA Experiment 108473 PARAMETER Experiment Name: At_Drought_Flowers_cDNA_P Parameter: Treatment Value: Drought vs. No Drought
  misc_feature: MA Experiment ID: 108501 Result: Down-regulated in Transcription
  misc_feature: MA Experiment 108501 PARAMETER Experiment Name: At_ap2_floral_buds_cDNA_P Parameter: Plant Line Value: ap2 (Ler.)
  misc_feature: MA Experiment 108501 PARAMETER Experiment Name: At_ap2_floral_buds_cDNA_P Parameter: Tissue Value: Closed Flower
  misc_feature: MA Experiment ID: 108561 Result: Down-regulated in Transcription
  misc_feature: MA Experiment 108561 PARAMETER Experiment Name: At_100uM_ABA_cDNA_P Parameter: Timepoint (hr) Value: 6
  misc_feature: MA Experiment 108561 PARAMETER Experiment Name: At_100uM_ABA_cDNA_P Parameter: Tissue Value: Aerial
  misc_feature: MA Experiment 108561 PARAMETER Experiment Name: At_100uM_ABA_cDNA_P Parameter: Treatment Value: 100uM ABA vs. No Treatment
  misc_feature: MA Experiment ID: 108576 Result: Up-regulated in Transcription
  misc_feature: MA Experiment 108576 PARAMETER Experiment Name: At_42deg_Heat_cDNA_P Parameter: Temperature (deg C) Value: 42 vs. 22
  misc_feature: MA Experiment 108576 PARAMETER Experiment Name: At_42deg_Heat_cDNA_P Parameter: Timepoint (hr) Value: 1
  misc_feature: MA Experiment 108576 PARAMETER Experiment Name: At_42deg_Heat_cDNA_P Parameter: Tissue Value: Aerial
  misc_feature: MA Experiment ID: 108595 Result: Up-regulated in Transcription
  misc_feature: MA Experiment 108595 PARAMETER Experiment Name: At_Ler-pi_Ovule_cDNA_P Parameter: Plant Line Value: null
  misc_feature: MA Experiment ID: 108668 Result: Down-regulated in Transcription
  misc_feature: MA Experiment 108668 PARAMETER Experiment Name: At_2mM_SA_cDNA_P Parameter: Plant Line Value: WS
  misc_feature: MA Experiment 108668 PARAMETER Experiment Name: At_2mM_SA_cDNA_P Parameter: Timepoint (hr) Value: 6
  misc_feature: MA Experiment 108668 PARAMETER Experiment Name: At_2mM_SA_cDNA_P Parameter: Treatment Value: 2mM SA vs. No Treatment
  misc_feature: MA Experiment ID: 20000112 Result: Down-regulated in Transcription
  misc_feature: MA Experiment 20000112 PARAMETER Experiment Name: At_42deg_Heat_cDNA_P Parameter: Temperature (deg C) Value: 42 vs. 22
  misc_feature: MA Experiment 20000112 PARAMETER Experiment Name: At_42deg_Heat_cDNA_P Parameter: Timepoint (hr) Value: 2
  misc_feature: MA Experiment 20000112 PARAMETER Experiment Name: At_42deg_Heat_cDNA_P Parameter: Tissue Value: Aerial
  misc_feature: MA Experiment ID: 20000185 Result: Down-regulated in Transcription
  misc_feature: MA Experiment 20000185 PARAMETER Experiment Name: At_Roots__P Parameter: Age (day) Value: 7 vs. 21
  misc_feature: MA Experiment 20000185 PARAMETER Experiment Name: At_Roots__P Parameter: Organism Value: A. thaliana
  misc_feature: MA Experiment 20000185 PARAMETER Experiment Name: At_Roots__P Parameter: Tissue Value: Roots vs. Whole Plant
  misc_feature: MA Experiment ID: 20000234 Result: Up-regulated in Transcription
  misc_feature: MA Experiment 20000234 PARAMETER Experiment Name: At_Siliques_P Parameter: Age (day) Value: 21
  misc_feature: MA Experiment 20000234 PARAMETER Experiment Name: At_Siliques_P Parameter: Organism Value: A. thaliana
  misc_feature: MA Experiment 20000234 PARAMETER Experiment Name: At_Siliques_P Parameter: Plant Line Value: WS
  misc_feature: MA Experiment 20000234 PARAMETER Experiment Name: At_Siliques_P Parameter: Tissue Value: Less Than 5mm Siliques vs. Whole Plant
  misc_feature: MA Experiment ID: 20000235 Result: Up-regulated in Transcription
  misc_feature: MA Experiment 20000235 PARAMETER Experiment Name: At_Siliques_P Parameter: Age (day) Value: 21
  misc_feature: MA Experiment 20000235 PARAMETER Experiment Name: At_Siliques_P Parameter: Organism Value: A. thaliana
  misc_feature: MA Experiment 20000235 PARAMETER Experiment Name: At_Siliques_P Parameter: Plant Line Value: WS
  misc_feature: MA Experiment 20000235 PARAMETER Experiment Name: At_Siliques_P Parameter: Tissue Value: 5-10mm Siliques vs. Whole Plant
  misc_feature: MA Experiment ID: 20000264 Result: Up-regulated in Transcription
  misc_feature: MA Experiment 20000264 PARAMETER Experiment Name: At_Open_Flower_P Parameter: Age (day) Value: 21
  misc_feature: MA Experiment 20000264 PARAMETER Experiment Name: At_Open_Flower_P Parameter: Plant Line Value: WS
  misc_feature: MA Experiment 20000264 PARAMETER Experiment Name: At_Open_Flower_P Parameter: Tissue Value: Open Flower vs. Whole Plant
  misc_feature: MA Experiment ID: 20000265 Result: Up-regulated in Transcription
  misc_feature: MA Experiment 20000265 PARAMETER Experiment Name: At_Open_Flower_P Parameter: Age (day) Value: 21
  misc_feature: MA Experiment 20000265 PARAMETER Experiment Name: At_Open_Flower_P Parameter: Plant Line Value: WS
  misc_feature: MA Experiment 20000265 PARAMETER Experiment Name: At_Open_Flower_P Parameter: Tissue Value: Closed Flower vs. Whole Plant
  misc_feature: MA Experiment ID: 20000286 Result: Up-regulated in Transcription
  misc_feature: MA Experiment 20000286 PARAMETER Experiment Name: At_Open_Flower_P Parameter: Age (day) Value: 21
  misc_feature: MA Experiment 20000286 PARAMETER Experiment Name: At_Open_Flower_P Parameter: Plant Line Value: WS
  misc_feature: MA Experiment 20000286 PARAMETER Experiment Name: At_Open_Flower_P Parameter: Tissue Value: Half Open vs. Whole Plant
  misc_feature: MA Experiment ID: 20000438 Result: Down-regulated in Transcription
  misc_feature: MA Experiment 20000438 PARAMETER Experiment Name: At_Shoots__P Parameter: Age (day) Value: 14
  misc_feature: MA Experiment 20000438 PARAMETER Experiment Name: At_Shoots__P Parameter: Tissue Value: Shoots vs. Whole Plant
  misc_feature: MA Experiment ID: 20000439 Result: Down-regulated in Transcription
  misc_feature: MA Experiment 20000439 PARAMETER Experiment Name: At_Roots__P Parameter: Age (day) Value: 14 vs. 21
  misc_feature: MA Experiment 20000439 PARAMETER Experiment Name: At_Roots__P Parameter: Organism Value: A. thaliana
  misc_feature: MA Experiment 20000439 PARAMETER Experiment Name: At_Roots__P Parameter: Tissue Value: Roots vs. Whole Plant
  misc_feature: MA Experiment ID: 20000441 Result: Down-regulated in Transcription
  misc_feature: MA Experiment 20000441 PARAMETER Experiment Name: At_1uM_BR-BRZ__P Parameter: Tissue Value: Shoot Apices
  misc_feature: MA Experiment 20000441 PARAMETER Experiment Name: At_1uM_BR-BRZ__P Parameter: Treatment Value: 1uM BR vs. No Treatment
  misc_feature: MA Experiment ID: 20000443 Result: Down-regulated in Transcription
  misc_feature: MA Experiment 20000443 PARAMETER Experiment Name: At_1uM_BR-BRZ__P Parameter: Tissue Value: Shoot Apices
  misc_feature: MA Experiment 20000443 PARAMETER Experiment Name: At_1uM_BR-BRZ__P Parameter: Treatment Value: 1uM BRZ vs. No Treatment
  misc_feature: MA Experiment ID: 20000527 Result: Down-regulated in Transcription
  misc_feature: MA Experiment 20000527 PARAMETER Experiment Name: At_10percent_PEG_P Parameter: Age (day) Value: 20
  misc_feature: MA Experiment 20000527 PARAMETER Experiment Name: At_10percent_PEG_P Parameter: Organism Value: A. thaliana
  misc_feature: MA Experiment 20000527 PARAMETER Experiment Name: At_10percent_PEG_P Parameter: Plant Line Value: WS
  misc_feature: MA Experiment 20000527 PARAMETER Experiment Name: At_10percent_PEG_P Parameter: Timepoint (day) Value: 20
  misc_feature: MA Experiment 20000527 PARAMETER Experiment Name: At_10percent_PEG_P Parameter: Tissue Value: Whole Plant
  misc_feature: MA Experiment 20000527 PARAMETER Experiment Name: At_10percent_PEG_P Parameter: Treatment Value: 10percent PEG vs. No Treatment
  misc_feature: MA Experiment ID: 20001560 Result: Up-regulated in Transcription
  misc_feature: MA Experiment 20001560 PARAMETER Experiment Name: At_Drought_Soil_Dry_P Parameter: Age (day) Value: 28
  misc_feature: MA Experiment 20001560 PARAMETER Experiment Name: At_Drought_Soil_Dry_P Parameter: Organism Value: A. thaliana
  misc_feature: MA Experiment 20001560 PARAMETER Experiment Name: At_Drought_Soil_Dry_P Parameter: Plant Line Value: WS
  misc_feature: MA Experiment 20001560 PARAMETER Experiment Name: At_Drought_Soil_Dry_P Parameter: Post Timepoint (hr) Value: None
  misc_feature: MA Experiment 20001560 PARAMETER Experiment Name: At_Drought_Soil_Dry_P Parameter: Post-Treatment Value: None
  misc_feature: MA Experiment 20001560 PARAMETER Experiment Name: At_Drought_Soil_Dry_P Parameter: Timepoint (day) Value: 14
  misc_feature: MA Experiment 20001560 PARAMETER Experiment Name: At_Drought_Soil_Dry_P Parameter: Treatment Value: Drought vs. No Drought
  misc_feature: MA Experiment ID: 20001771 Result: Up-regulated in Transcription
  misc_feature: MA Experiment 20001771 PARAMETER Experiment Name: At_Far-red-enriched-adult_P Parameter: Age (day) Value: 28
  misc_feature: MA Experiment 20001771 PARAMETER Experiment Name: At_Far-red-enriched-adult_P Parameter: Light Value: Far-red enriched vs. White
  misc_feature: MA Experiment 20001771 PARAMETER Experiment Name: At_Far-red-enriched-adult_P Parameter: Organism Value: A. thaliana
  misc_feature: MA Experiment 20001771 PARAMETER Experiment Name: At_Far-red-enriched-adult_P Parameter: Plant Line Value: Columbia
  misc_feature: MA Experiment 20001771 PARAMETER Experiment Name: At_Far-red-enriched-adult_P Parameter: Timepoint (hr) Value: 16
  misc_feature: MA Experiment 20001771 PARAMETER Experiment Name: At_Far-red-enriched-adult_P Parameter: Tissue Value: Aerial
  misc_feature: MA Experiment ID: 20001773 Result: Up-regulated in Transcription
  misc_feature: MA Experiment 20001773 PARAMETER Experiment Name: At_Far-red-enriched-adult_P Parameter: Age (day) Value: 30
  misc_feature: MA Experiment 20001773 PARAMETER Experiment Name: At_Far-red-enriched-adult_P Parameter: Light Value: Far-red enriched vs. White
  misc_feature: MA Experiment 20001773 PARAMETER Experiment Name: At_Far-red-enriched-adult_P Parameter: Organism Value: A. thaliana
  misc_feature: MA Experiment 20001773 PARAMETER Experiment Name: At_Far-red-enriched-adult_P Parameter: Plant Line Value: Columbia
  misc_feature: MA Experiment 20001773 PARAMETER Experiment Name: At_Far-red-enriched-adult_P Parameter: Timepoint (hr) Value: 48
  misc_feature: MA Experiment 20001773 PARAMETER Experiment Name: At_Far-red-enriched-adult_P Parameter: Tissue Value: Aerial
  misc_feature: MA Experiment ID: 20001910 Result: Down-regulated in Transcription
  misc_feature: MA Experiment 20001910 PARAMETER Experiment Name: At_Drought_Reproduction_P Parameter: Age (day) Value: 37
  misc_feature: MA Experiment 20001910 PARAMETER Experiment Name: At_Drought_Reproduction_P Parameter: Organism Value: A. thaliana
  misc_feature: MA Experiment 20001910 PARAMETER Experiment Name: At_Drought_Reproduction_P Parameter: Plant Line Value: WS
  misc_feature: MA Experiment 20001910 PARAMETER Experiment Name: At_Drought_Reproduction_P Parameter: Timepoint (day) Value: 7
  misc_feature: MA Experiment 20001910 PARAMETER Experiment Name: At_Drought_Reproduction_P Parameter: Tissue Value: Flowers
  misc_feature: MA Experiment 20001910 PARAMETER Experiment Name: At_Drought_Reproduction_P Parameter: Treatment Value: Drought vs. No Drought
tggttatataacactaatcaggagtgaaatttcatccacaaaaattccttataaattcacgaccaaacacacacatttctttaattccataaaaacaaaaacaaaaatataatgtggacttctaaaaccataagcttcactctcttcatcacaacaacacttctcgggtcctgcaacgcatctgcaaaggccaaaacgcaaccgctattcccagcgattctaatctttggtgattcaacagtcgacacaggcaacaataattacccttcacaaacaatcttcagagctaaacatgttccttacggaattgatctcccaaaccactcacctaacggaagattctcaaacgggaaaattttctccgacataatcgcaaccaaactcaacatcaaacagtttgttcctcctttcttacaaccaaatctcaccgaccaagaaattgtaaccggagtctgtttcgcatcagcaggtgccggttacgatgaccaaaccagtctcacgacacaagcgattcgtgtctcggaacaaccaaatatgttcaagagttacattgctcgtcttaagagtatcgtaggagacaagaaagccatgaagatcataaacaatgctttggtggttgtgagtgcagggcctaatgatttcatcttgaattattacgaggttccctcatggcgtcgcatgtatcctagcatttctgattaccaagattttgttcttagtaggcttaacaatttcgtgaaggagctttacagcctaggttgccggaaaattttggtcggaggtttaccgccaatgggatgtttaccgattcaaatgactgctcaattccgcaacgtcctaaggttttgcttggaacaagagaacagagactctgttttatacaatcagaaacttcagaagctcttacctcagacacaagcatctcttacaggaagcaagatcctttactctgatgtctatgaccctatgatggagatgctccaaaaccctagcaaatacggatttaaagagacgacgagaggatgttgtggaacagggttcttggagacgaacttcatgtgtaatgcttattcttccatgtgtcagaatcgctcggagtttctgttctttgactcgattcatccatctgaagctacctacaattacattggtaatgttctggatactaagattcgtgggtggcttaaggcttaagttatcaagatttgcaaagattgaacaaaattatctgtttcataatgtgactatttgtggacttcgtttgtttatcaactattaactttggcc

SEQ ID NO: 22853 - protein, 360 aa, Arabidopsis thaliana
  peptide (1)..(360): Ceres Seq. ID no. 13487396
  misc_feature (36)..(350): Pfam Name: GDSL-like Lipase/Acylhydrolase Pfam Description: GDSL-like Lipase/Acylhydrolase
  misc_feature (1)..(143): Homolog of NCBI NO: 25336273 NR Description: probable GDSL-motif lipase/hydrolase
  misc_feature (153)..(360): Homolog of NCBI NO: 25336273 NR Description: probable GDSL-motif lipase/hydrolase
  misc_feature (1)..(359): Homolog of NCBI NO: 15227723 NR Description: GDSL-motif lipase/hydrolase protein [Arabidopsis
  misc_feature (1)..(360): Homolog of NCBI NO: 15227734 NR Description: GDSL-motif lipase/hydrolase protein [Arabidopsis
  misc_feature (1)..(301): Homolog of NCBI NO: 15224162 NR Description: GDSL-motif lipase/hydrolase protein [Arabidopsis
  misc_feature (1)..(360): Homolog of NCBI NO: 21537117 NR Description: putative GDSL-motif lipase/hydrolase [Arabidopsis
  misc_feature (1)..(360): Homolog of NCBI NO: 15225096 NR Description: GDSL-motif lipase/hydrolase protein [Arabidopsis
  misc_feature (1)..(360): Homolog of NCBI NO: 21592974 NR Description: proline-rich protein, putative [Arabidopsis
  misc_feature (1)..(360): Homolog of NCBI NO: 15217963 NR Description: GDSL-motif lipase/hydrolase protein [Arabidopsis
  misc_feature (1)..(360): Homolog of NCBI NO: 25336283 NR Description: hypothetical protein RXF26 [imported] -
MWTSKTISFTLFITTTLLGSCNASAKAKTQPLFPAILIFGDSTVDTGNNNYPSQTIFRAKHVPYGIDLPNHSPNGRFSNGKIFSDIIATKLNIKQFVPPFLQPNLTDQEIVTGVCFASAGAGYDDQTSLTTQAIRVSEQPNMFKSYIARLKSIVGDKKAMKIINNALVVVSAGPNDFILNYYEVPSWRRMYPSISDYQDFVLSRLNNFVKELYSLGCRKILVGGLPPMGCLPIQMTAQFRNVLRFCLEQENRDSVLYNQKLQKLLPQTQASLTGSKILYSDVYDPMMEMLQNPSKYGFKETTRGCCGTGFLETNFMCNAYSSMCQNRSEFLFFDSIHPSEATYNYIGNVLDTKIRGWLKA

SEQ ID NO: 22854 - protein, 219 aa, Arabidopsis thaliana
  peptide (1)..(219): Ceres Seq. ID no. 13487397
  misc_feature (1)..(209): Pfam Name: GDSL-like Lipase/Acylhydrolase Pfam Description: GDSL-like Lipase/Acylhydrolase
  misc_feature (1)..(219): Homolog of NCBI NO: 18402700 NR Description: GDSL-motif lipase/hydrolase protein [Arabidopsis
  misc_feature (12)..(219): Homolog of NCBI NO: 25336273 NR Description: probable GDSL-motif lipase/hydrolase
  misc_feature (1)..(218): Homolog of NCBI NO: 15227723 NR Description: GDSL-motif lipase/hydrolase protein [Arabidopsis
  misc_feature (1)..(219): Homolog of NCBI NO: 15227734 NR Description: GDSL-motif lipase/hydrolase protein [Arabidopsis
  misc_feature (1)..(160): Homolog of NCBI NO: 15224162 NR Description: GDSL-motif lipase/hydrolase protein [Arabidopsis
  misc_feature (1)..(219): Homolog of NCBI NO: 21537117 NR Description: putative GDSL-motif lipase/hydrolase [Arabidopsis
  misc_feature (1)..(219): Homolog of NCBI NO: 15225096 NR Description: GDSL-motif lipase/hydrolase protein [Arabidopsis
  misc_feature (1)..(219): Homolog of NCBI NO: 21592974 NR Description: proline-rich protein, putative [Arabidopsis
  misc_feature (1)..(219): Homolog of NCBI NO: 15217963 NR Description: GDSL-motif lipase/hydrolase protein [Arabidopsis
  misc_feature (1)..(219): Homolog of NCBI NO: 25336283 NR Description: hypothetical protein RXF26 [imported] -
MFKSYIARLKSIVGDKKAMKIINNALVVVSAGPNDFILNYYEVPSWRRMYPSISDYQDFVLSRLNNFVKELYSLGCRKILVGGLPPMGCLPIQMTAQFRNVLRFCLEQENRDSVLYNQKLQKLLPQTQASLTGSKILYSDVYDPMMEMLQNPSKYGFKETTRGCCGTGFLETNFMCNAYSSMCQNRSEFLFFDSIHPSEATYNYIGNVLDTKIRGWLKA

SEQ ID NO: 22855 - protein, 201 aa, Arabidopsis thaliana
  peptide (1)..(201): Ceres Seq. ID no. 13487398
  misc_feature (1)..(191): Pfam Name: GDSL-like Lipase/Acylhydrolase Pfam Description: GDSL-like Lipase/Acylhydrolase
  misc_feature (1)..(201): Homolog of NCBI NO: 18402700 NR Description: GDSL-motif lipase/hydrolase protein [Arabidopsis
  misc_feature (1)..(201): Homolog of NCBI NO: 25336273 NR Description: probable GDSL-motif lipase/hydrolase
  misc_feature (1)..(200): Homolog of NCBI NO: 15227723 NR Description: GDSL-motif lipase/hydrolase protein [Arabidopsis
  misc_feature (1)..(201): Homolog of NCBI NO: 15227734 NR Description: GDSL-motif lipase/hydrolase protein [Arabidopsis
  misc_feature (1)..(142): Homolog of NCBI NO: 15224162 NR Description: GDSL-motif lipase/hydrolase protein [Arabidopsis
  misc_feature (1)..(201): Homolog of NCBI NO: 21537117 NR Description: putative GDSL-motif lipase/hydrolase [Arabidopsis
  misc_feature (1)..(201): Homolog of NCBI NO: 15225096 NR Description: GDSL-motif lipase/hydrolase protein [Arabidopsis
  misc_feature (1)..(201): Homolog of NCBI NO: 21592974 NR Description: proline-rich protein, putative [Arabidopsis
  misc_feature (1)..(201): Homolog of NCBI NO: 15217963 NR Description: GDSL-motif lipase/hydrolase protein [Arabidopsis
  misc_feature (1)..(201): Homolog of NCBI NO: 25336283 NR Description: hypothetical protein RXF26 [imported] -
MKIINNALVVVSAGPNDFILNYYEVPSWRRMYPSISDYQDFVLSRLNNFVKELYSLGCRKILVGGLPPMGCLPIQMTAQFRNVLRFCLEQENRDSVLYNQKLQKLLPQTQASLTGSKILYSDVYDPMMEMLQNPSKYGFKETTRGCCGTGFLETNFMCNAYSSMCQNRSEFLFFDSIHPSEATYNYIGNVLDTKIRGWLKA

SEQ ID NO: 22856 - DNA, 1342 bp, Arabidopsis thaliana
  misc_feature (1)..(1342): Ceres Seq. ID no. 12334696
  misc_feature: MA Experiment ID: 108595 Result: Down-regulated in Transcription
  misc_feature: MA Experiment 108595 PARAMETER Experiment Name: At_Ler-pi_Ovule_cDNA_P Parameter: Plant Line Value: null
aaaaatccagctgataaataaatcatttttctcttgtcgtcatactaaaaaaaaaaaagattatctgtatttcaagtttcatgagcgtttgccaccacaacattgtcttttcggggttttagtcatatttaatggcttccaattcggagaaaaatcctcttctttcagatgagaaacccaaatcgacggaggagaataagagttctaagccggaatcagcttctgggagttcaacttcatcagctatgcctggcttgaatttcaatgcttttgatttctctaatatggctagtattctcaacgatcctagcatcagagaaatggctgagcaaatagctaaagatcctgcctttaaccaattggctgagcagcttcagagatctattcctaacgctggccaggaaggtggtttccctaactttgatcctcaacagtatgtcaacacaatgcaacaggttatgcataaccctgagtttaagacaatggccgagaaacttggtaccgccttagttcaggatccacaaatgtctccttttttggatgctttctcgaatcctgaaacagcagaacactttactgagcgtatggcgcggatgaaagaagatccagagttgaaacctatactagatgagattgatgctggtggtccttctgccatgatgaagtactggaatgatccagaagtgctgaaaaagctgggtgaagcaatgggtatgcctgttgctggcttaccagaccagactgtttcagctgaacctgaggtagcagaagaaggtgaagaagaagagtctattgttcaccaaactgccagtcttggtgatgttgagggtttgaaagctgccttggcatctggtggtaacaaagatgaagaagattctgaggaaggacagcattgcattttgcttgtggatacggcgagttgaaatgtgctcaagttcttatcgatgctggagcaagtgttaatgcggttgacaaaaacaagaacacacctctgcattatgctgctggttacgggaggaaagagtgtgtaagccttctcctggagaatggtgctgcagtcactctgcaaaacctagacgagaagacgccaattgatgtagcgaagctcaacagccagctggaggtggtgaagctgcttgagaaggatgctttcctttgagctctgctggttaaaggaaagctctaagctcatattgtctttgaggcatttgtcttgtgtgtgtcctgaaccagtttcacaggctttttgtgtacactttttattagttcctctcttctaaatttgtctcttatgttgttttaaaagtcaataaagaaagaaatagcaatcaatgatttaatc

SEQ ID NO: 22857 - protein, 263 aa, Arabidopsis thaliana
  peptide (1)..(263): Ceres Seq. ID no. 12334697
  misc_feature (1)..(254): Homolog of NCBI NO: 27573339 NR Description: unknown protein [Oryza sativa (japonica
  misc_feature (2)..(250): Homolog of NCBI NO: 24637568 NR Description: ankyrin domain protein [Nicotiana tabacum]
  misc_feature (13)..(250): Homolog of NCBI NO: 29826244 NR Description: TGB12K interacting protein 3 [Nicotiana tabacum]
  misc_feature (13)..(250): Homolog of NCBI NO: 29826242 NR Description: TGB12K interacting protein 2 [Nicotiana tabacum]
  misc_feature (2)..(250): Homolog of NCBI NO: 13310811 NR Description: ankyrin-repeat protein HBP1 [Nicotiana tabacum]
  misc_feature (1)..(250): Homolog of NCBI NO: 15227825 NR Description: putative glucanase; protein id: At2g17390.1
  misc_feature (39)..(250): Homolog of NCBI NO: 30690372 NR Description: ankyrin repeat-containing protein 2 [Arabidopsis
  misc_feature (1)..(250): Homolog of NCBI NO: 4205079 NR Description: ankyrin repeat-containing protein 2 [Arabidopsis
  misc_feature (1)..(250): Homolog of NCBI NO: 3478700 NR Description: AFT protein [Arabidopsis thaliana]
  misc_feature (1)..(250): Homolog of NCBI NO: 15237008 NR Description: ankyrin repeat-containing protein 2
MASNSEKNPLLSDEKPKSTEENKSSKPESASGSSTSSAMPGLNFNAFDFSNMASILNDPSIREMAEQIAKDPAFNQLAEQLQRSIPNAGQEGGFPNFDPQQYVNTMQQVMHNPEFKTMAEKLGTALVQDPQMSPFLDAFSNPETAEHFTERMARMKEDPELKPILDEIDAGGPSAMMKYWNDPEVLKKLGEAMGMPVAGLPDQTVSAEPEVAEEGEEEESIVHQTASLGDVEGLKAALASGGNKDEEDSEEGQHCILLVDTAS

SEQ ID NO: 22858 - protein, 225 aa, Arabidopsis thaliana
  peptide (1)..(225): Ceres Seq. ID no. 12334698
  misc_feature (1)..(216): Homolog of NCBI NO: 27573339 NR Description: unknown protein [Oryza sativa (japonica
  misc_feature (1)..(212): Homolog of NCBI NO: 24637568 NR Description: ankyrin domain protein [Nicotiana tabacum]
  misc_feature (1)..(212): Homolog of NCBI NO: 29826244 NR Description: TGB12K interacting protein 3 [Nicotiana tabacum]
  misc_feature (1)..(212): Homolog of NCBI NO: 29826242 NR Description: TGB12K interacting protein 2 [Nicotiana tabacum]
  misc_feature (1)..(212): Homolog of NCBI NO: 13310811 NR Description: ankyrin-repeat protein HBP1 [Nicotiana tabacum]
  misc_feature (1)..(212): Homolog of NCBI NO: 15227825 NR Description: putative glucanase; protein id: At2g17390.1
  misc_feature (1)..(212): Homolog of NCBI NO: 30690372 NR Description: ankyrin repeat-containing protein 2 [Arabidopsis
  misc_feature (1)..(212): Homolog of NCBI NO: 4205079 NR Description: ankyrin repeat-containing protein 2 [Arabidopsis
  misc_feature (1)..(212): Homolog of NCBI NO: 3478700 NR Description: AFT protein [Arabidopsis thaliana]
  misc_feature (1)..(212): Homolog of NCBI NO: 15237008 NR Description: ankyrin repeat-containing protein 2
MPGLNFNAFDFSNMASILNDPSIREMAEQIAKDPAFNQLAEQLQRSIPNAGQEGGFPNFDPQQYVNTMQQVMHNPEFKTMAEKLGTALVQDPQMSPFLDAFSNPETAEHFTERMARMKEDPELKPILDEIDAGGPSAMMKYWNDPEVLKKLGEAMGMPVAGLPDQTVSAEPEVAEEGEEEESIVHQTASLGDVEGLKAALASGGNKDEEDSEEGQHCILLVDTAS

SEQ ID NO: 22859 - protein, 212 aa, Arabidopsis thaliana
  peptide (1)..(212): Ceres Seq. ID no. 12334699
  misc_feature (1)..(199): Homolog of NCBI NO: 24637568 NR Description: ankyrin domain protein [Nicotiana tabacum]
  misc_feature (1)..(199): Homolog of NCBI NO: 29826244 NR Description: TGB12K interacting protein 3 [Nicotiana tabacum]
  misc_feature (1)..(199): Homolog of NCBI NO: 29826242 NR Description: TGB12K interacting protein 2 [Nicotiana tabacum]
  misc_feature (1)..(199): Homolog of NCBI NO: 13310811 NR Description: ankyrin-repeat protein HBP1 [Nicotiana tabacum]
  misc_feature (1)..(199): Homolog of NCBI NO: 15227825 NR Description: putative glucanase; protein id: At2g17390.1
  misc_feature (1)..(199): Homolog of NCBI NO: 30690372 NR Description: ankyrin repeat-containing protein 2 [Arabidopsis
  misc_feature (1)..(199): Homolog of NCBI NO: 4205079 NR Description: ankyrin repeat-containing protein 2 [Arabidopsis
  misc_feature (1)..(199): Homolog of NCBI NO: 3478700 NR Description: AFT protein [Arabidopsis thaliana]
  misc_feature (1)..(199): Homolog of NCBI NO: 15237008 NR Description: ankyrin repeat-containing protein 2
  misc_feature (1)..(203): Homolog of NCBI NO: 27573339 NR Description: unknown protein [Oryza sativa (japonica
MASILNDPSIREMAEQIAKDPAFNQLAEQLQRSIPNAGQEGGFPNFDPQQYVNTMQQVMHNPEFKTMAEKLGTALVQDPQMSPFLDAFSNPETAEHFTERMARMKEDPELKPILDEIDAGGPSAMMKYWNDPEVLKKLGEAMGMPVAGLPDQTVSAEPEVAEEGEEEESIVHQTASLGDVEGLKAALASGGNKDEEDSEEGQHCILLVDTAS

SEQ ID NO: 22860 - DNA, 1197 bp, Arabidopsis thaliana
  misc_feature (1)..(1197): Ceres Seq. ID no. 12334689
  misc_feature: MA Experiment ID: 108434 Result: Up-regulated in Transcription
  misc_feature: MA Experiment 108434 PARAMETER Experiment Name: At_Root_Tips_cDNA_P Parameter: Tissue Value: Root Tips
aaaaccaacaaatggggatgagtcgtcaaagactgcactctctcctcttcctctggctccggcgaaaaaccccttttcgatttcattgataaaacgcaaatcgatctctcgtgtggaagaagaagaagaacacgatgggaacaatgggtaaagcattctacagcgtaggattctggatccgtgaaactggtcaagcacttgatcggctcggttgtcgcctccaagggaaaaatcatttccgagaacagctatcaaggcaccgcacactcatgaatgtttttgacaaaacccctaatgtggataagggggcttttgtggctcctaacgcttctctctctggtgatgtccatgtgggaagaggttcttccatttggtatggatgtgtcttgagaggagatgctaacagcattagtgttggagctgggaccaatattcaggacaacgctcttgtccacgttgctaagaccaacttaagtgggaaggtcttacctactgtcattggagacaatgtcaccattggtcatagtgctgttttacatggctgcactgtcgaggatgaggcctatattggtacaagtgcaactgtcttggatggagctcatgttgaaaaacatgccatggttgcttcaggagctcttgttaggcagaacactagaattccctctggcgaggtttggggaggcaacccagctaaatttctgaggaaggtgacagaagaagaaagagtcttcttctccagttcggctgtggagtactccaacttagctcaagctcacgccacagagaacgcaaagaacttggacgaggctgagttcaagaagcttctaaacaagaagaacgctcgcgatacagaatatgattcagtactcgatgatctcacgctccctgagaatgtaccaaaagcagcttgaggcgtttaacctgtgccgccttgcgaatcttgatttgtttggatttgaaaagtaaaaacaaagaacttgatttcctgcttctccaataaagttttcttgggcgtaaaatccattggccagtgctcactgggaaagttttcggcttaaaggcattcatttctctgttaaagattgtgaggggttttgttctcttgtaacttgagaaagaaaagttgtaaccttttcttcctttttatgtcgtctaataaattgttgatcagacagacatttaggttgacctttgccc

SEQ ID NO: 22861 - protein, 258 aa, Arabidopsis thaliana
  peptide (1)..(258): Ceres Seq. ID no. 12334690
  misc_feature (70)..(87): Pfam Name: Bacterial transferase hexapeptide (three repeats) Pfam Description: Bacterial transferase hexapeptide (three
  misc_feature (53)..(236): Homolog of NCBI NO: 40218049 NR Description: putative gamma carbonic anhydrase [Chlamydomonas
  misc_feature (39)..(255): Homolog of NCBI NO: 8778427 NR Description: F18O14.34 [Arabidopsis thaliana]
  misc_feature (1)..(258): Homolog of NCBI NO: 34904754 NR Description: putative transcription factor APFI
  misc_feature (1)..(258): Homolog of NCBI NO: 34902506 NR Description: P0581F09.11 [Oryza sativa (japonica
  misc_feature (1)..(254): Homolog of NCBI NO: 13507025 NR Description: transcription factor APFI [Arabidopsis thaliana]
  misc_feature (1)..(254): Homolog of NCBI NO: 15220153 NR Description: Unknown protein
  misc_feature (1)..(255): Homolog of NCBI NO: 18394761 NR Description: expressed protein
  misc_feature (1)..(255): Homolog of NCBI NO: 21537242 NR Description: unknown [Arabidopsis thaliana]
  misc_feature (46)..(258): Homolog of NCBI NO: 10177532 NR Description: ferripyochelin-binding protein-like [Arabidopsis
  misc_feature (1)..(258): Homolog of NCBI NO: 18425082 NR Description: ferripyochelin-binding protein-like
MGTMGKAFYSVGFWIRETGQALDRLGCRLQGKNHFREQLSRHRTLMNVFDKTPNVDKGAFVAPNASLSGDVHVGRGSSIWYGCVLRGDANSISVGAGTNIQDNALVHVAKTNLSGKVLPTVIGDNVTIGHSAVLHGCTVEDEAYIGTSATVLDGAHVEKHAMVASGALVRQNTRIPSGEVWGGNPAKFLRKVTEEERVFFSSSAVEYSNLAQAHATENAKNLDEAEFKKLLNKKNARDTEYDSVLDDLTLPENVPKAA

SEQ ID NO: 22862 - protein, 255 aa, Arabidopsis thaliana
  peptide (1)..(255): Ceres Seq. ID no. 12334691
  misc_feature (67)..(84): Pfam Name: Bacterial transferase hexapeptide (three repeats) Pfam Description: Bacterial transferase hexapeptide (three
  misc_feature (50)..(233): Homolog of NCBI NO: 40218049 NR Description: putative gamma carbonic anhydrase [Chlamydomonas
  misc_feature (36)..(252): Homolog of NCBI NO: 8778427 NR Description: F18O14.34 [Arabidopsis thaliana]
  misc_feature (1)..(255): Homolog of NCBI NO: 34904754 NR Description: putative transcription factor APFI
  misc_feature (1)..(255): Homolog of NCBI NO: 34902506 NR Description: P0581F09.11 [Oryza sativa (japonica
  misc_feature (1)..(251): Homolog of NCBI NO: 13507025 NR Description: transcription factor APFI [Arabidopsis thaliana]
  misc_feature (1)..(251): Homolog of NCBI NO: 15220153 NR Description: Unknown protein
  misc_feature (1)..(252): Homolog of NCBI NO: 18394761 NR Description: expressed protein
  misc_feature (1)..(252): Homolog of NCBI NO: 21537242 NR Description: unknown [Arabidopsis thaliana]
  misc_feature (43)..(255): Homolog of NCBI NO: 10177532 NR Description: ferripyochelin-binding protein-like [Arabidopsis
  misc_feature (1)..(255): Homolog of NCBI NO: 18425082 NR Description: ferripyochelin-binding protein-like
MGKAFYSVGFWIRETGQALDRLGCRLQGKNHFREQLSRHRTLMNVFDKTPNVDKGAFVAPNASLSGDVHVGRGSSIWYGCVLRGDANSISVGAGTNIQDNALVHVAKTNLSGKVLPTVIGDNVTIGHSAVLHGCTVEDEAYIGTSATVLDGAHVEKHAMVASGALVRQNTRIPSGEVWGGNPAKFLRKVTEEERVFFSSSAVEYSNLAQAHATENAKNLDEAEFKKLLNKKNARDTEYDSVLDDLTLPENVPKAA

SEQ ID NO: 22863 - protein, 213 aa, Arabidopsis thaliana
  peptide (1)..(213): Ceres Seq. ID no. 12334692
  misc_feature (25)..(42): Pfam Name: Bacterial transferase hexapeptide (three repeats) Pfam Description: Bacterial transferase hexapeptide (three
  misc_feature (8)..(191): Homolog of NCBI NO: 40218049 NR Description: putative gamma carbonic anhydrase [Chlamydomonas
  misc_feature (1)..(210): Homolog of NCBI NO: 8778427 NR Description: F18O14.34 [Arabidopsis thaliana]
  misc_feature (1)..(213): Homolog of NCBI NO: 34904754 NR Description: putative transcription factor APFI
  misc_feature (1)..(213): Homolog of NCBI NO: 34902506 NR Description: P0581F09.11 [Oryza sativa (japonica
  misc_feature (1)..(209): Homolog of NCBI NO: 13507025 NR Description: transcription factor APFI [Arabidopsis thaliana]
  misc_feature (1)..(209): Homolog of NCBI NO: 15220153 NR Description: Unknown protein
  misc_feature (1)..(210): Homolog of NCBI NO: 18394761 NR Description: expressed protein
  misc_feature (1)..(210): Homolog of NCBI NO: 21537242 NR Description: unknown [Arabidopsis thaliana]
  misc_feature (1)..(213): Homolog of NCBI NO: 10177532 NR Description: ferripyochelin-binding protein-like [Arabidopsis
  misc_feature (1)..(213): Homolog of NCBI NO: 18425082 NR Description: ferripyochelin-binding protein-like
MNVFDKTPNVDKGAFVAPNASLSGDVHVGRGSSIWYGCVLRGDANSISVGAGTNIQDNALVHVAKTNLSGKVLPTVIGDNVTIGHSAVLHGCTVEDEAYIGTSATVLDGAHVEKHAMVASGALVRQNTRIPSGEVWGGNPAKFLRKVTEEERVFFSSSAVEYSNLAQAHATENAKNLDEAEFKKLLNKKNARDTEYDSVLDDLTLPENVPKAA

SEQ ID NO: 22864 - DNA, 797 bp, Arabidopsis thaliana
  misc_feature (1)..(797): Ceres Seq. ID no. 12322374
  misc_feature: MA Experiment ID: 108435 Result: Up-regulated in Transcription
  misc_feature: MA Experiment 108435 PARAMETER Experiment Name: At_stm_Mutants_cDNA_P Parameter: Plant Line Value: wt Landsburg vs stm
  misc_feature: MA Experiment 108435 PARAMETER Experiment Name: At_stm_Mutants_cDNA_P Parameter: Tissue Value: Shoot Apical Meristem Region
  misc_feature: MA Experiment ID: 20000069 Result: Down-regulated in Transcription
  misc_feature: MA Experiment 20000069 PARAMETER Experiment Name: At_100uM_ABA_Mutants_cDNA_P Parameter: Plant Line Value: CS23
  misc_feature: MA Experiment 20000069 PARAMETER Experiment Name: At_100uM_ABA_Mutants_cDNA_P Parameter: Timepoint (hr) Value: 6
  misc_feature: MA Experiment 20000069 PARAMETER Experiment Name: At_100uM_ABA_Mutants_cDNA_P Parameter: Tissue Value: Aerial
  misc_feature: MA Experiment 20000069 PARAMETER Experiment Name: At_100uM_ABA_Mutants_cDNA_P Parameter: Treatment Value: 100uM ABA vs. No Treatment
  misc_feature: MA Experiment ID: 20000071 Result: Down-regulated in Transcription
  misc_feature: MA Experiment 20000071 PARAMETER Experiment Name: At_100uM_ABA_Mutants_cDNA_P Parameter: Plant Line Value: CS8104
  misc_feature: MA Experiment 20000071 PARAMETER Experiment Name: At_100uM_ABA_Mutants_cDNA_P Parameter: Timepoint (hr) Value: 6
  misc_feature: MA Experiment 20000071 PARAMETER Experiment Name: At_100uM_ABA_Mutants_cDNA_P Parameter: Tissue Value: Aerial
  misc_feature: MA Experiment 20000071 PARAMETER Experiment Name: At_100uM_ABA_Mutants_cDNA_P Parameter: Treatment Value: 100uM ABA vs. No Treatment
  misc_feature: MA Experiment ID: 20000117 Result: Down-regulated in Transcription
  misc_feature: MA Experiment 20000117 PARAMETER Experiment Name: At_100uM_ABA_Mutants_cDNA_P Parameter: Plant Line Value: Columbia
  misc_feature: MA Experiment 20000117 PARAMETER Experiment Name: At_100uM_ABA_Mutants_cDNA_P Parameter: Timepoint (hr) Value: 6
  misc_feature: MA Experiment 20000117 PARAMETER Experiment Name: At_100uM_ABA_Mutants_cDNA_P Parameter: Tissue Value: Aerial
  misc_feature: MA Experiment 20000117 PARAMETER Experiment Name: At_100uM_ABA_Mutants_cDNA_P Parameter: Treatment Value: 100uM ABA vs. No Treatment
  misc_feature: MA Experiment ID: 20000437 Result: Down-regulated in Transcription
  misc_feature: MA Experiment 20000437 PARAMETER Experiment Name: At_Drought_P Parameter: Age (day) Value: 8
  misc_feature: MA Experiment 20000437 PARAMETER Experiment Name: At_Drought_P Parameter: Organism Value: A. thaliana
  misc_feature: MA Experiment 20000437 PARAMETER Experiment Name: At_Drought_P Parameter: Plant Line Value: WS
  misc_feature: MA Experiment 20000437 PARAMETER Experiment Name: At_Drought_P Parameter: Timepoint (hr) Value: 24
  misc_feature: MA Experiment 20000437 PARAMETER Experiment Name: At_Drought_P Parameter: Tissue Value: Whole Plant
  misc_feature: MA Experiment 20000437 PARAMETER Experiment Name: At_Drought_P Parameter: Treatment Value: Drought vs. No Drought
  misc_feature: MA Experiment ID: 20000439 Result: Down-regulated in Transcription
  misc_feature: MA Experiment 20000439 PARAMETER Experiment Name: At_Roots__P Parameter: Age (day) Value: 14 vs. 21
  misc_feature: MA Experiment 20000439 PARAMETER Experiment Name: At_Roots__P Parameter: Organism Value: A. thaliana
  misc_feature: MA Experiment 20000439 PARAMETER Experiment Name: At_Roots__P Parameter: Tissue Value: Roots vs. Whole Plant
  misc_feature: MA Experiment ID: 20000451 Result: Up-regulated in Transcription
  misc_feature: MA Experiment 20000451 PARAMETER Experiment Name: At_CS6879_Shoots-Roots_P Parameter: Age (day) Value: 14
  misc_feature: MA Experiment 20000451 PARAMETER Experiment Name: At_CS6879_Shoots-Roots_P Parameter: Organism Value: A. thaliana
  misc_feature: MA Experiment 20000451 PARAMETER Experiment Name: At_CS6879_Shoots-Roots_P Parameter: Plant Line Value: CS6879 vs. WS
  misc_feature: MA Experiment 20000451 PARAMETER Experiment Name: At_CS6879_Shoots-Roots_P Parameter: Tissue Value: Roots
  misc_feature: MA Experiment ID: 20001248 Result: Down-regulated in Transcription
  misc_feature: MA Experiment 20001248 PARAMETER Experiment Name: At_Far-red-induction_P Parameter: Age (day) Value: 7
  misc_feature: MA Experiment 20001248 PARAMETER Experiment Name: At_Far-red-induction_P Parameter: Light Value: Far-red vs. White
  misc_feature: MA Experiment 20001248 PARAMETER Experiment Name: At_Far-red-induction_P Parameter: Organism Value: A. thaliana
  misc_feature: MA Experiment 20001248 PARAMETER Experiment Name: At_Far-red-induction_P Parameter: Plant Line Value: Columbia
  misc_feature: MA Experiment 20001248 PARAMETER Experiment Name: At_Far-red-induction_P Parameter: Timepoint (hr) Value: 4
  misc_feature: MA Experiment 20001248 PARAMETER Experiment Name: At_Far-red-induction_P Parameter: Tissue Value: Whole Plant
acgatagcctctcatcttcttttttcctctccatcatcttcaccataaccgaaaaaccaaacaaaaaatccttagataatcagatcttgatattatggatcatatcatcggctttatgggcacaacaaacatgtcacataacacaaaccttatgatcgctgccgcagccactaccactacgacctcttcgtcttcctcttcttcctccggaggctcggggactaaccagctaagcaggtacgagaatcagaagagaagagattggaacactttcggacagtatctacgcaatcaccgtccaccactttctctctcccgttgcagtggtgctcatgttcttgaattcctcaggtacctcgaccaattcggcaagactaaggttcacacacacctatgtccgttcttcggacacccaaacccaccagcaccatgtgcctgtccactccgacaagcgtggggtagtctggacgcactcattggccgtcttagagctgcttttgaagagaacggtggttcaccagagacgaacccttttggtgcacgagccgttcgactctacctaagggaagtacgtgactcgcaggctaaagcacgtgggatcagctatgaaaaaaagaagcgcaagcgacctcctccgccactaccaccggctcagccggcgatttcaagtagccctaattaacattaagtcatgagtaagatgtttcaatgaactacgtttgtttacaaatttttatcaatgacgaacatgcacgagttcttttaaagtcacatgccctttcctaaacttttatttg

SEQ ID NO: 22865 - protein, 195 aa, Arabidopsis thaliana
  peptide (1)..(195): Ceres Seq. ID no. 12322375
  misc_feature (30)..(162): Pfam Name: Protein of unknown function (DUF640) Pfam Description: Protein of unknown function (DUF640)
  misc_feature (46)..(183): Homolog of NCBI NO: 18412120 NR Description: Expressed protein
  misc_feature (33)..(193): Homolog of NCBI NO: 18406012 NR Description: expressed protein
  misc_feature (34)..(179): Homolog of NCBI NO: 15237680 NR Description: putative protein; protein id: At5g58500.1
  misc_feature (8)..(194): Homolog of NCBI NO: 15229310 NR Description: unknown protein; protein id: At3g04510.1
  misc_feature (47)..(190): Homolog of NCBI NO: 15241821 NR Description: putative protein; protein id: At5g28490.1
  misc_feature (47)..(180): Homolog of NCBI NO: 18390725 NR Description: expressed protein
  misc_feature (45)..(193): Homolog of NCBI NO: 34907938 NR Description: B1088C09.17 [Oryza sativa (japonica
  misc_feature (30)..(182): Homolog of NCBI NO: 37535384 NR Description: hypothetical protein [Oryza sativa (japonica
  misc_feature (30)..(179): Homolog of NCBI NO: 38344650 NR Description: OSJNBb0072M01.12 [Oryza sativa (japonica
  misc_feature (1)..(193): Homolog of NCBI NO: 18402578 NR Description: expressed protein
MDHIIGFMGTTNMSHNTNLMIAAAATTTTTSSSSSSSSGGSGTNQLSRYENQKRRDWNTFGQYLRNHRPPLSLSRCSGAHVLEFLRYLDQFGKTKVHTHLCPFFGHPNPPAPCACPLRQAWGSLDALIGRLRAAFEENGGSPETNPFGARAVRLYLREVRDSQAKARGISYEKKKRKRPPPPLPPAQPAISSSPN

SEQ ID NO: 22866 - protein, 188 aa, Arabidopsis thaliana
  peptide (1)..(188): Ceres Seq. ID no. 12322376
  misc_feature (23)..(155): Pfam Name: Protein of unknown function (DUF640) Pfam Description: Protein of unknown function (DUF640)
  misc_feature (39)..(176): Homolog of NCBI NO: 18412120 NR Description: Expressed protein
  misc_feature (26)..(186): Homolog of NCBI NO: 18406012 NR Description: expressed protein
  misc_feature (27)..(172): Homolog of NCBI NO: 15237680 NR Description: putative protein; protein id: At5g58500.1
  misc_feature (1)..(187): Homolog of NCBI NO: 15229310 NR Description: unknown protein; protein id: At3g04510.1
  misc_feature (40)..(183): Homolog of NCBI NO: 15241821 NR Description: putative protein; protein id: At5g28490.1
  misc_feature (40)..(173): Homolog of NCBI NO: 18390725 NR Description: expressed protein
  misc_feature (38)..(186): Homolog of NCBI NO: 34907938 NR Description: B1088C09.17 [Oryza sativa (japonica
  misc_feature (23)..(175): Homolog of NCBI NO: 37535384 NR Description: hypothetical protein [Oryza sativa (japonica
  misc_feature (23)..(172): Homolog of NCBI NO: 38344650 NR Description: OSJNBb0072M01.12 [Oryza sativa (japonica
  misc_feature (1)..(186): Homolog of NCBI NO: 18402578 NR Description: expressed protein
MGTTNMSHNTNLMIAAAATTTTTSSSSSSSSGGSGTNQLSRYENQKRRDWNTFGQYLRNHRPPLSLSRCSGAHVLEFLRYLDQFGKTKVHTHLCPFFGHPNPPAPCACPLRQAWGSLDALIGRLRAAFEENGGSPETNPFGARAVRLYLREVRDSQAKARGISYEKKKRKRPPPPLPPAQPAISSSPN

SEQ ID NO: 22867 - protein, 183 aa, Arabidopsis thaliana
  peptide (1)..(183): Ceres Seq. ID no. 12322377
  misc_feature (18)..(150): Pfam Name: Protein of unknown function (DUF640) Pfam Description: Protein of unknown function (DUF640)
  misc_feature (34)..(171): Homolog of NCBI NO: 18412120 NR Description: Expressed protein
  misc_feature (21)..(181): Homolog of NCBI NO: 18406012 NR Description: expressed protein
  misc_feature (22)..(167): Homolog of NCBI NO: 15237680 NR Description: putative protein; protein id: At5g58500.1
  misc_feature (1)..(182): Homolog of NCBI NO: 15229310 NR Description: unknown protein; protein id: At3g04510.1
  misc_feature (35)..(178): Homolog of NCBI NO: 15241821 NR Description: putative protein; protein id: At5g28490.1
  misc_feature (35)..(168): Homolog of NCBI NO: 18390725 NR Description: expressed protein
  misc_feature (33)..(181): Homolog of NCBI NO: 34907938 NR Description: B1088C09.17 [Oryza sativa (japonica
  misc_feature (18)..(170): Homolog of NCBI NO: 37535384 NR Description: hypothetical protein [Oryza sativa (japonica
  misc_feature (18)..(167): Homolog of NCBI NO: 38344650 NR Description: OSJNBb0072M01.12 [Oryza sativa (japonica
  misc_feature (1)..(181): Homolog of NCBI NO: 18402578 NR Description: expressed protein
MSHNTNLMIAAAATTTTTSSSSSSSSGGSGTNQLSRYENQKRRDWNTFGQYLRNHRPPLSLSRCSGAHVLEFLRYLDQFGKTKVHTHLCPFFGHPNPPAPCACPLRQAWGSLDALIGRLRAAFEENGGSPETNPFGARAVRLYLREVRDSQAKARGISYEKKKRKRPPPPLPPAQPAISSSPN

SEQ ID NO: 22868 - DNA, 1627 bp, Arabidopsis thaliana
  misc_feature (1)..(1627): Ceres Seq. ID no. 12326340
  misc_feature: MA Experiment ID: 108434 Result: Down-regulated in Transcription
  misc_feature: MA Experiment 108434 PARAMETER Experiment Name: At_Root_Tips_cDNA_P Parameter: Tissue Value: Root Tips
  misc_feature: MA Experiment ID: 108489 Result: Up-regulated in Transcription
  misc_feature: MA Experiment ID: 108569 Result: Up-regulated in Transcription
  misc_feature: MA Experiment 108569 PARAMETER Experiment Name: At_0.001%_MeJA__cDNA_P Parameter: Timepoint (hr) Value: 6
  misc_feature: MA Experiment 108569 PARAMETER Experiment Name: At_0.001%_MeJA__cDNA_P Parameter: Tissue Value: Aerial
  misc_feature: MA Experiment 108569 PARAMETER Experiment Name: At_0.001%_MeJA__cDNA_P Parameter: Treatment Value: 0.001% MeJA vs. No Treatment
  misc_feature: MA Experiment ID: 108585 Result: Up-regulated in Transcription
  misc_feature: MA Experiment 108585 PARAMETER Experiment Name: At_5mM_NaNP_cDNA_P Parameter: Timepoint (hr) Value: 6
  misc_feature: MA Experiment 108585 PARAMETER Experiment Name: At_5mM_NaNP_cDNA_P Parameter: Tissue Value: Aerial
  misc_feature: MA Experiment 108585 PARAMETER Experiment Name: At_5mM_NaNP_cDNA_P Parameter: Treatment Value: null
  misc_feature: MA Experiment ID: 108595 Result: Down-regulated in Transcription
  misc_feature: MA Experiment 108595 PARAMETER Experiment Name: At_Ler-pi_Ovule_cDNA_P Parameter: Plant Line Value: null
  misc_feature: MA Experiment ID: 20000069 Result: Up-regulated in Transcription
  misc_feature: MA Experiment 20000069 PARAMETER Experiment Name: At_100uM_ABA_Mutants_cDNA_P Parameter: Plant Line Value: CS23
  misc_feature: MA Experiment 20000069 PARAMETER Experiment Name: At_100uM_ABA_Mutants_cDNA_P Parameter: Timepoint (hr) Value: 6
  misc_feature: MA Experiment 20000069 PARAMETER Experiment Name: At_100uM_ABA_Mutants_cDNA_P Parameter: Tissue Value: Aerial
  misc_feature: MA Experiment 20000069 PARAMETER Experiment Name: At_100uM_ABA_Mutants_cDNA_P Parameter: Treatment Value: 100uM ABA vs. No Treatment
  misc_feature: MA Experiment ID: 20000070 Result: Up-regulated in Transcription
  misc_feature: MA Experiment 20000070 PARAMETER Experiment Name: At_100uM_ABA_Mutants_cDNA_P Parameter: Plant Line Value: CS24
  misc_feature: MA Experiment 20000070 PARAMETER Experiment Name: At_100uM_ABA_Mutants_cDNA_P Parameter: Timepoint (hr) Value: 6
  misc_feature: MA Experiment 20000070 PARAMETER Experiment Name: At_100uM_ABA_Mutants_cDNA_P Parameter: Tissue Value: Aerial
  misc_feature: MA Experiment 20000070 PARAMETER Experiment Name: At_100uM_ABA_Mutants_cDNA_P Parameter: Treatment Value: 100uM ABA vs. No Treatment
  misc_feature: MA Experiment ID: 20000071 Result: Up-regulated in Transcription
  misc_feature: MA Experiment 20000071 PARAMETER Experiment Name: At_100uM_ABA_Mutants_cDNA_P Parameter: Plant Line Value: CS8104
  misc_feature: MA Experiment 20000071 PARAMETER Experiment Name: At_100uM_ABA_Mutants_cDNA_P Parameter: Timepoint (hr) Value: 6
  misc_feature: MA Experiment 20000071 PARAMETER Experiment Name: At_100uM_ABA_Mutants_cDNA_P Parameter: Tissue Value: Aerial
  misc_feature: MA Experiment 20000071 PARAMETER Experiment Name: At_100uM_ABA_Mutants_cDNA_P Parameter: Treatment Value: 100uM ABA vs. No Treatment
  misc_feature: MA Experiment ID: 20000072 Result: Up-regulated in Transcription
  misc_feature: MA Experiment 20000072 PARAMETER Experiment Name: At_100uM_ABA_Mutants_cDNA_P Parameter: Plant Line Value: CS8105
  misc_feature: MA Experiment 20000072 PARAMETER Experiment Name: At_100uM_ABA_Mutants_cDNA_P Parameter: Timepoint (hr) Value: 6
  misc_feature: MA Experiment 20000072 PARAMETER Experiment Name: At_100uM_ABA_Mutants_cDNA_P Parameter: Tissue Value: Aerial
  misc_feature: MA Experiment 20000072 PARAMETER Experiment Name: At_100uM_ABA_Mutants_cDNA_P Parameter: Treatment Value: 100uM ABA vs. No Treatment
  misc_feature: MA Experiment ID: 20000088 Result: Up-regulated in Transcription
  misc_feature: MA Experiment 20000088 PARAMETER Experiment Name: At_100uM_ABA_Mutants_cDNA_P Parameter: Plant Line Value: Landsberg
  misc_feature: MA Experiment 20000088 PARAMETER Experiment Name: At_100uM_ABA_Mutants_cDNA_P Parameter: Timepoint (hr) Value: 6
  misc_feature: MA Experiment 20000088 PARAMETER Experiment Name: At_100uM_ABA_Mutants_cDNA_P Parameter: Tissue Value: Aerial
  misc_feature: MA Experiment 20000088 PARAMETER Experiment Name: At_100uM_ABA_Mutants_cDNA_P Parameter: Treatment Value: 100uM ABA vs. No Treatment
  misc_feature: MA Experiment ID: 20000089 Result: Up-regulated in Transcription
  misc_feature: MA Experiment ID: 20000090 Result: Up-regulated in Transcription
  misc_feature: MA Experiment ID: 20000117 Result: Up-regulated in Transcription
  misc_feature: MA Experiment 20000117 PARAMETER Experiment Name: At_100uM_ABA_Mutants_cDNA_P Parameter: Plant Line Value: Columbia
  misc_feature: MA Experiment 20000117 PARAMETER Experiment Name: At_100uM_ABA_Mutants_cDNA_P Parameter: Timepoint (hr) Value: 6
  misc_feature: MA Experiment 20000117 PARAMETER Experiment Name: At_100uM_ABA_Mutants_cDNA_P Parameter: Tissue Value: Aerial
  misc_feature: MA Experiment 20000117 PARAMETER Experiment Name: At_100uM_ABA_Mutants_cDNA_P Parameter: Treatment Value: 100uM ABA vs. No Treatment
  misc_feature: MA Experiment ID: 20000234 Result: Down-regulated in Transcription
  misc_feature: MA Experiment 20000234 PARAMETER Experiment Name: At_Siliques_P Parameter: Age (day) Value: 21
  misc_feature: MA Experiment 20000234 PARAMETER Experiment Name: At_Siliques_P Parameter: Organism Value: A. thaliana
  misc_feature: MA Experiment 20000234 PARAMETER Experiment Name: At_Siliques_P Parameter: Plant Line Value: WS
  misc_feature: MA Experiment 20000234 PARAMETER Experiment Name: At_Siliques_P Parameter: Tissue Value: Less Than 5mm Siliques vs. Whole Plant
  misc_feature: MA Experiment ID: 20000235 Result: Down-regulated in Transcription
  misc_feature: MA Experiment 20000235 PARAMETER Experiment Name: At_Siliques_P Parameter: Age (day) Value: 21
  misc_feature: MA Experiment 20000235 PARAMETER Experiment Name: At_Siliques_P Parameter: Organism Value: A. thaliana
  misc_feature: MA Experiment 20000235 PARAMETER Experiment Name: At_Siliques_P Parameter: Plant Line Value: WS
  misc_feature: MA Experiment 20000235 PARAMETER Experiment Name: At_Siliques_P Parameter: Tissue Value: 5-10mm Siliques vs. Whole Plant
  misc_feature: MA Experiment ID: 20000438 Result: Down-regulated in Transcription
  misc_feature: MA Experiment 20000438 PARAMETER Experiment Name: At_Shoots__P Parameter: Age (day) Value: 14
  misc_feature: MA Experiment 20000438 PARAMETER Experiment Name: At_Shoots__P Parameter: Tissue Value: Shoots vs. Whole Plant
  misc_feature: MA Experiment ID: 20001757 Result: Up-regulated in Transcription
  misc_feature: MA Experiment 20001757 PARAMETER Experiment Name: At_50mM_NH4NO3_L-to-H_P Parameter: Timepoint (hr) Value: 6
  misc_feature: MA Experiment 20001757 PARAMETER Experiment Name: At_50mM_NH4NO3_L-to-H_P Parameter: Tissue Value: Leaf
  misc_feature: MA Experiment 20001757 PARAMETER Experiment Name: At_50mM_NH4NO3_L-to-H_P Parameter: Treatment Value: 50mM NH4NO3 vs 100mM Mannitol
attttcaaggagaagaatatatttgactcagagagagattcattcagtaatggcagcctcaggcacctctgctactttcagagcctccgtttcttcagctccttcctcttcttcccaattgacccatttgaaatcacccttcaaagctgtcaaatatacgcctctgccatcgtctcgctccaagtcatcatccttctccgtctcctgcaccatcgccaaggacccgcctgttctcatggccgccggatctgacccggccctgtggcaacgacccgattcgttcggtcggtttgggaagtttggtgggaagtatgtacctgaaacccttatgcacgctctatctgagcttgaatccgctttctatgctcttgccaccgacgatgatttccagagagagttggctggaatcttgaaggactatgtgggtagagaaagtcctctgtattttgcagagaggcttacggagcattacaggcgcgagaatggcgaagggcctcttatatacttgaagagagaagacttgaatcacacaggagctcacaagattaacaacgctgtggctcaggctcttcttgctaagcggttggggaagaagaggattattgctgagacaggagcgggtcaacatggtgtggctacagctactgtgtgtgcccgttttggtttggagtgtattatctatatgggtgctcaagatatggagagacaagcactcaatgtgttcagaatgcgacttcttggtgccgaggtgagaggagtccactctggaacagcgacattgaaggatgcgacatctgaagcgataagagattgggtgacaaatgtggagactacccattacatattgggatctgtggcgggtcctcatccttaccccatgatggtcagagactttcacgctgtgattggtaaagaaacaaggaaacaagcgttggagaaatggggcgggaagccggatgtcttggtggcttgtgtcggtggtggttcaaacgctatgggactcttccatgaatttgtgaatgacacagaggtccggatgatcggtgtggaagcagcgggattcggattggacagtggcaaacacgctgctacattgacaaagggagatgttggtgtcctccatggagctatgagttacttgctgcaagatgatgatggacaaatcattgaaccacactccatcagtgcaggattggactaccctggagtcggacccgagcacagtttctttaaagacatgggacgggctgaatactatagcataaccgacgaagaagcgttggaagcgttcaagagagtgtcgcggttagagggaatcattccagcactggagacctcacacgcactagcttacctcgagaagctatgtcccacattatcagacgggacgagagtggtcttgaacttcagcggaagaggagataaagatgttcagacagtggctaaatatcttgatgtttgaagagagaaacacttatgtttgtttttcagttattcagacagaatgaaatcctttttgtacttgtaatctgtttgtactttacttctctctggtcagtacgtttccaacaaaattggaaatagaaaaagattacgaagagaacgaaatttgaataaatgtattatc

SEQ ID NO: 22869 - protein, 486 aa, Arabidopsis thaliana
  peptide (1)..(486): Ceres Seq. ID no. 12326341
  misc_feature (138)..(472): Pfam Name: Pyridoxal-phosphate dependent enzyme Pfam Description: Pyridoxal-phosphate dependent enzyme
  misc_feature (83)..(484): Homolog of NCBI NO: 17231286 NR Description: tryptophan synthase beta subunit [Nostoc sp. PCC
  misc_feature (98)..(486): Homolog of NCBI NO: 1174778 NR Description: Tryptophan synthase beta chain 1 (Orange pericarp
  misc_feature (90)..(486): Homolog of NCBI NO: 38636821 NR Description: putative tryptophan synthase beta-subunit
  misc_feature (59)..(486): Homolog of NCBI NO: 1174780 NR Description: Tryptophan synthase beta chain 2, chloroplast
  misc_feature (20)..(486): Homolog of NCBI NO: 18481702 NR Description: tryptophan synthase beta-subunit [Sorghum bicolor]
  misc_feature (22)..(486): Homolog of NCBI NO: 3915165 NR Description: Tryptophan synthase beta chain 2, chloroplast
  misc_feature (12)..(486): Homolog of NCBI NO: 7437014 NR Description: probable tryptophan synthase (EC 4.2.1.20) beta
  misc_feature (17)..(486): Homolog of NCBI NO: 15236977 NR Description: tryptophan synthase beta-subunit (TSB2)
  misc_feature (17)..(486): Homolog of NCBI NO: 81661 NR Description: tryptophan synthase (EC 4.2.1.20) beta-2 chain
  misc_feature (17)..(486): Homolog of NCBI NO: 15239755 NR Description: tryptophan synthase beta chain 1 precursor
FSRRRIYLTQREIHSVMAASGTSATFRASVSSAPSSSSQLTHLKSPFKAVKYTPLPSSRSKSSSFSVSCTIAKDPPVLMAAGSDPALWQRPDSFGRFGKFGGKYVPETLMHALSELESAFYALATDDDFQRELAGILKDYVGRESPLYFAERLTEHYRRENGEGPLIYLKREDLNHTGAHKINNAVAQALLAKRLGKKRIIAETGAGQHGVATATVCARFGLECIIYMGAQDMERQALNVFRMRLLGAEVRGVHSGTATLKDATSEAIRDWVTNVETTHYILGSVAGPHPYPMMVRDFHAVIGKETRKQALEKWGGKPDVLVACVGGGSNAMGLFHEFVNDTEVRMIGVEAAGFGLDSGKHAATLTKGDVGVLHGAMSYLLQDDDGQIIEPHSISAGLDYPGVGPEHSFFKDMGRAEYYSITDEEALEAFKRVSRLEGIIPALETSHALAYLEKLCPTLSDGTRVVLNFSGRGDKDVQTVAKYLDV

SEQ ID NO: 22870 - protein, 470 aa, Arabidopsis thaliana
  peptide (1)..(470): Ceres Seq. ID no. 12326342
  misc_feature (122)..(456): Pfam Name: Pyridoxal-phosphate dependent enzyme Pfam Description: Pyridoxal-phosphate dependent enzyme
  misc_feature (67)..(468): Homolog of NCBI NO: 17231286 NR Description: tryptophan synthase beta subunit [Nostoc sp. PCC
  misc_feature (82)..(470): Homolog of NCBI NO: 1174778 NR Description: Tryptophan synthase beta chain 1 (Orange pericarp
  misc_feature (74)..(470): Homolog of NCBI NO: 38636821 NR Description: putative tryptophan synthase beta-subunit
  misc_feature (43)..(470): Homolog of NCBI NO: 1174780 NR Description: Tryptophan synthase beta chain 2, chloroplast
  misc_feature (4)..(470): Homolog of NCBI NO: 18481702 NR Description: tryptophan synthase beta-subunit [Sorghum bicolor]
  misc_feature (6)..(470): Homolog of NCBI NO: 3915165 NR Description: Tryptophan synthase beta chain 2, chloroplast
  misc_feature (1)..(470): Homolog of NCBI NO: 7437014 NR Description: probable tryptophan synthase (EC 4.2.1.20) beta
  misc_feature (1)..(470): Homolog of NCBI NO: 15236977 NR Description: tryptophan synthase beta-subunit (TSB2)
  misc_feature (1)..(470): Homolog of NCBI NO: 81661 NR Description: tryptophan synthase (EC 4.2.1.20) beta-2 chain
  misc_feature (1)..(470): Homolog of NCBI NO: 15239755 NR Description: tryptophan synthase beta chain 1 precursor
MAASGTSATFRASVSSAPSSSSQLTHLKSPFKAVKYTPLPSSRSKSSSFSVSCTIAKDPPVLMAAGSDPALWQRPDSFGRFGKFGGKYVPETLMHALSELESAFYALATDDDFQRELAGILKDYVGRESPLYFAERLTEHYRRENGEGPLIYLKREDLNHTGAHKINNAVAQALLAKRLGKKRIIAETGAGQHGVATATVCARFGLECIIYMGAQDMERQALNVFRMRLLGAEVRGVHSGTATLKDATSEAIRDWVTNVETTHYILGSVAGPHPYPMMVRDFHAVIGKETRKQALEKWGGKPDVLVACVGGGSNAMGLFHEFVNDTEVRMIGVEAAGFGLDSGKHAATLTKGDVGVLHGAMSYLLQDDDGQIIEPHSISAGLDYPGVGPEHSFFKDMGRAEYYSITDEEALEAFKRVSRLEGIIPALETSHALAYLEKLCPTLSDGTRVVLNFSGRGDKDVQTVAKYLDV

SEQ ID NO: 22871 - protein, 408 aa, Arabidopsis thaliana
  peptide (1)..(408): Ceres Seq. ID no. 12326343
  misc_feature (60)..(394): Pfam Name: Pyridoxal-phosphate dependent enzyme Pfam Description: Pyridoxal-phosphate dependent enzyme
  misc_feature (5)..(406): Homolog of NCBI NO: 17231286 NR Description: tryptophan synthase beta subunit [Nostoc sp. PCC
  misc_feature (20)..(408): Homolog of NCBI NO: 1174778 NR Description: Tryptophan synthase beta chain 1 (Orange pericarp
  misc_feature (12)..(408): Homolog of NCBI NO: 38636821 NR Description: putative tryptophan synthase beta-subunit
  misc_feature (1)..(408): Homolog of NCBI NO: 1174780 NR Description: Tryptophan synthase beta chain 2, chloroplast
  misc_feature (1)..(408): Homolog of NCBI NO: 18481702 NR Description: tryptophan synthase beta-subunit [Sorghum bicolor]
  misc_feature (1)..(408): Homolog of NCBI NO: 3915165 NR Description: Tryptophan synthase beta chain 2, chloroplast
  misc_feature (1)..(408): Homolog of NCBI NO: 7437014 NR Description: probable tryptophan synthase (EC 4.2.1.20) beta
  misc_feature (1)..(408): Homolog of NCBI NO: 15236977 NR Description: tryptophan synthase beta-subunit (TSB2)
  misc_feature (1)..(408): Homolog of NCBI NO: 81661 NR Description: tryptophan synthase (EC 4.2.1.20) beta-2 chain
  misc_feature (1)..(408): Homolog of NCBI NO: 15239755 NR Description: tryptophan synthase beta chain 1 precursor
MAAGSDPALWQRPDSFGRFGKFGGKYVPETLMHALSELESAFYALATDDDFQRELAGILKDYVGRESPLYFAERLTEHYRRENGEGPLIYLKREDLNHTGAHKINNAVAQALLAKRLGKKRIIAETGAGQHGVATATVCARFGLECIIYMGAQDMERQALNVFRMRLLGAEVRGVHSGTATLKDATSEAIRDWVTNVETTHYILGSVAGPHPYPMMVRDFHAVIGKETRKQALEKWGGKPDVLVACVGGGSNAMGLFHEFVNDTEVRMIGVEAAGFGLDSGKHAATLTKGDVGVLHGAMSYLLQDDDGQIIEPHSISAGLDYPGVGPEHSFFKDMGRAEYYSITDEEALEAFKRVSRLEGIIPALETSHALAYLEKLCPTLSDGTRVVLNFSGRGDKDVQTVAKYLDV

SEQ ID NO: 22872 - DNA, 1741 bp, Arabidopsis thaliana
  misc_feature (1)..(1741): Ceres Seq. ID no. 12377573
  misc_feature: MA Experiment ID: 20000112 Result: Up-regulated in Transcription
  misc_feature: MA Experiment 20000112 PARAMETER Experiment Name: At_42deg_Heat_cDNA_P Parameter: Temperature (deg C) Value: 42 vs. 22
  misc_feature: MA Experiment 20000112 PARAMETER Experiment Name: At_42deg_Heat_cDNA_P Parameter: Timepoint (hr) Value: 2
  misc_feature: MA Experiment 20000112 PARAMETER Experiment Name: At_42deg_Heat_cDNA_P Parameter: Tissue Value: Aerial
  misc_feature: MA Experiment ID: 20000180 Result: Up-regulated in Transcription
  misc_feature: MA Experiment 20000180 PARAMETER Experiment Name: At_Germinating_Seeds_P Parameter: Age (hr) Value: 24 vs. 0
  misc_feature: MA Experiment 20000180 PARAMETER Experiment Name: At_Germinating_Seeds_P Parameter: Tissue Value: Germinating Seeds
  misc_feature: MA Experiment ID: 20000182 Result: Down-regulated in Transcription
  misc_feature: MA Experiment 20000182 PARAMETER Experiment Name: At_2mM_SA_P Parameter: Age (day) Value: 14
  misc_feature: MA Experiment 20000182 PARAMETER Experiment Name: At_2mM_SA_P Parameter: Organism Value: A. thaliana
  misc_feature: MA Experiment 20000182 PARAMETER Experiment Name: At_2mM_SA_P Parameter: Plant Line Value: WS
  misc_feature: MA Experiment 20000182 PARAMETER Experiment Name: At_2mM_SA_P Parameter: Timepoint (hr) Value: 6
  misc_feature: MA Experiment 20000182 PARAMETER Experiment Name: At_2mM_SA_P Parameter: Tissue Value: Aerial
  misc_feature: MA Experiment 20000182 PARAMETER Experiment Name: At_2mM_SA_P Parameter: Treatment Value: 2mM SA vs. No Treatment
  misc_feature: MA Experiment ID: 20000184 Result: Up-regulated in Transcription
  misc_feature: MA Experiment 20000184 PARAMETER Experiment Name: At_Shoots__P Parameter: Age (day) Value: 7
  misc_feature: MA Experiment 20000184 PARAMETER Experiment Name: At_Shoots__P Parameter: Tissue Value: Shoots vs. Whole Plant
  misc_feature: MA Experiment ID: 20000185 Result: Down-regulated in Transcription
  misc_feature: MA Experiment 20000185 PARAMETER Experiment Name: At_Roots__P Parameter: Age (day) Value: 7 vs. 21
  misc_feature: MA Experiment 20000185 PARAMETER Experiment Name: At_Roots__P Parameter: Organism Value: A. thaliana
  misc_feature: MA Experiment 20000185 PARAMETER Experiment Name: At_Roots__P Parameter: Tissue Value: Roots vs. Whole Plant
  misc_feature: MA Experiment ID: 20000234 Result: Up-regulated in Transcription
  misc_feature: MA Experiment 20000234 PARAMETER Experiment Name: At_Siliques_P Parameter: Age (day) Value: 21
  misc_feature: MA Experiment 20000234 PARAMETER Experiment Name: At_Siliques_P Parameter: Organism Value: A. thaliana
  misc_feature: MA Experiment 20000234 PARAMETER Experiment Name: At_Siliques_P Parameter: Plant Line Value: WS
  misc_feature: MA Experiment 20000234 PARAMETER Experiment Name: At_Siliques_P Parameter: Tissue Value: Less Than 5mm Siliques vs. Whole Plant
  misc_feature: MA Experiment ID: 20000437 Result: Down-regulated in Transcription
  misc_feature: MA Experiment 20000437 PARAMETER Experiment Name: At_Drought_P Parameter: Age (day) Value: 8
  misc_feature: MA Experiment 20000437 PARAMETER Experiment Name: At_Drought_P Parameter: Organism Value: A. thaliana
  misc_feature: MA Experiment 20000437 PARAMETER Experiment Name: At_Drought_P Parameter: Plant Line Value: WS
  misc_feature: MA Experiment 20000437 PARAMETER Experiment Name: At_Drought_P Parameter: Timepoint (hr) Value: 24
  misc_feature: MA Experiment 20000437 PARAMETER Experiment Name: At_Drought_P Parameter: Tissue Value: Whole Plant
  misc_feature: MA Experiment 20000437 PARAMETER Experiment Name: At_Drought_P Parameter: Treatment Value: Drought vs. No Drought
  misc_feature: MA Experiment ID: 20000438 Result: Up-regulated in Transcription
  misc_feature: MA Experiment 20000438 PARAMETER Experiment Name: At_Shoots__P Parameter: Age (day) Value: 14
  misc_feature: MA Experiment 20000438 PARAMETER Experiment Name: At_Shoots__P Parameter: Tissue Value: Shoots vs. Whole Plant
  misc_feature: MA Experiment ID: 20000439 Result: Down-regulated in Transcription
  misc_feature: MA Experiment 20000439 PARAMETER Experiment Name: At_Roots__P Parameter: Age (day) Value: 14 vs. 21
  misc_feature: MA Experiment 20000439 PARAMETER Experiment Name: At_Roots__P Parameter: Organism Value: A. thaliana
  misc_feature: MA Experiment 20000439 PARAMETER Experiment Name: At_Roots__P Parameter: Tissue Value: Roots vs. Whole Plant
  misc_feature: MA Experiment ID: 20000495 Result: Down-regulated in Transcription
  misc_feature: MA Experiment 20000495 PARAMETER Experiment Name: At_Guard_Cells_P Parameter: Harvest Date Value: 8/2/2002
  misc_feature: MA Experiment 20000495 PARAMETER Experiment Name: At_Guard_Cells_P Parameter: Organism Value: A. thaliana
  misc_feature: MA Experiment 20000495 PARAMETER Experiment Name: At_Guard_Cells_P Parameter: Tissue Value: Guard Cells vs. Leaves
  misc_feature: MA Experiment ID: 20001248 Result: Down-regulated in Transcription
  misc_feature: MA Experiment 20001248 PARAMETER Experiment Name: At_Far-red-induction_P Parameter: Age (day) Value: 7
  misc_feature: MA Experiment 20001248 PARAMETER Experiment Name: At_Far-red-induction_P Parameter: Light Value: Far-red vs. White
  misc_feature: MA Experiment 20001248 PARAMETER Experiment Name: At_Far-red-induction_P Parameter: Organism Value: A. thaliana
  misc_feature: MA Experiment 20001248 PARAMETER Experiment Name: At_Far-red-induction_P Parameter: Plant Line Value: Columbia
  misc_feature: MA Experiment 20001248 PARAMETER Experiment Name: At_Far-red-induction_P Parameter: Timepoint (hr) Value: 4
  misc_feature: MA Experiment 20001248 PARAMETER Experiment Name: At_Far-red-induction_P Parameter: Tissue Value: Whole Plant
  misc_feature: MA Experiment ID: 20001450 Result: Down-regulated in Transcription
  misc_feature: MA Experiment 20001450 PARAMETER Experiment Name: At_Far-red-induction_P Parameter: Age (day) Value: 7
  misc_feature: MA Experiment 20001450 PARAMETER Experiment Name: At_Far-red-induction_P Parameter: Light Value: Far-red vs. White
  misc_feature: MA Experiment 20001450 PARAMETER Experiment Name: At_Far-red-induction_P Parameter: Organism Value: A. thaliana
  misc_feature: MA Experiment 20001450 PARAMETER Experiment Name: At_Far-red-induction_P Parameter: Plant Line Value: Columbia
  misc_feature: MA Experiment 20001450 PARAMETER Experiment Name: At_Far-red-induction_P Parameter: Timepoint (hr) Value: 8
  misc_feature: MA Experiment 20001450 PARAMETER Experiment Name: At_Far-red-induction_P Parameter: Tissue Value: Whole Plant
  misc_feature: MA Experiment ID: 20001451 Result: Down-regulated in Transcription
  misc_feature: MA Experiment 20001451 PARAMETER Experiment Name: At_Far-red-induction_P Parameter: Age (day) Value: 7
  misc_feature: MA Experiment 20001451 PARAMETER Experiment Name: At_Far-red-induction_P Parameter: Light Value: Far-red vs. White
  misc_feature: MA Experiment 20001451 PARAMETER Experiment Name: At_Far-red-induction_P Parameter: Organism Value: A. thaliana
  misc_feature: MA Experiment 20001451 PARAMETER Experiment Name: At_Far-red-induction_P Parameter: Plant Line Value: Columbia
  misc_feature: MA Experiment 20001451 PARAMETER Experiment Name: At_Far-red-induction_P Parameter: Timepoint (hr) Value: 24
  misc_feature: MA Experiment 20001451 PARAMETER Experiment Name: At_Far-red-induction_P Parameter: Tissue Value: Whole Plant
  misc_feature: MA Experiment ID: 20001911 Result: Down-regulated in Transcription
  misc_feature: MA Experiment 20001911 PARAMETER Experiment Name: At_Drought_Reproduction_P Parameter: Age (day) Value: 40
  misc_feature: MA Experiment 20001911 PARAMETER Experiment Name: At_Drought_Reproduction_P Parameter: Organism Value: A. thaliana
  misc_feature: MA Experiment 20001911 PARAMETER Experiment Name: At_Drought_Reproduction_P Parameter: Plant Line Value: WS
  misc_feature: MA Experiment 20001911 PARAMETER Experiment Name: At_Drought_Reproduction_P Parameter: Timepoint (day) Value: 10
  misc_feature: MA Experiment 20001911 PARAMETER Experiment Name: At_Drought_Reproduction_P Parameter: Tissue Value: Flowers
  misc_feature: MA Experiment 20001911 PARAMETER Experiment Name: At_Drought_Reproduction_P Parameter: Treatment Value: Drought vs. No Drought
cttatcaattcatctcacactcttcttcactctcttctctctacacacacacacacacacacacacaaaatggattcttcgaatgttgaagaaaacctaaacccagaaacaaaatccgcagaagaacaaaacccacttgccattttccattcttctctaccaatcgcatctctttctctgaccttgttcccatcctcgactcaatttctcaaattgtttgctcatcatccaaacaaggttaagatccctacgcaggcttcttctctcactcatctctctctttcttctgtctctccttttccttcttccagaatctctttcaaatccaccatcgctgctaaccctcttcaatcccctctctccatcgtccctcgtcgtcccgttgatccttcctccgccgccgctctccgccgtgctgctgtcgtctggttccgcaatgacctccgtgtccacgacaacgagtgtctcaactccgccaacgacgagtgcgtctccgttttgcccgtttactgcttcgaccctagagattacggcaagtcctcttccggcttcgacaaaacggggccttttcgtgcccagtttctgattgagtccgtttcggagctccggaagaatctccaagccagagggtcgaatctagttgtccgtgtcgggaaacctgaagctgttttggtggaattggctaaggagattggagctgacgcggtttatgctcacagagaagtgtctcacgacgaggttaaagcggaagggaagatagagaccgcgatgaaggaggaaggcgttgaagtcaagtatttctggggaagcactctctatcatttggatgatttgcccttcaaaattgaagacttgccgtcaaattacggagctttcaaggataaagtccagaaattggagattaggaagactatcgcagcgcttgatcaattgaaaagcttgccctctcgaggagacgttgagcttggcgatattccttctctcctggatcttggcattagccccactcctaggactagccaggaggggaaaccgacaatggttggaggagagacagaggcgttgactagactaaagagctttgccgcggattgtcaggctcggttgagcaagggaaaccagaaaggaggcaacaacagtgtctttggtgcaaacttctcttgcaagatatcaccttggttagccatgggaagcatctctcctcgttccatgttcgatgagctgaagaaaacaatctccgcatcaaccacctccacaactccaaggaacggaccgggagatacaggactcaactggttaatgtatgagttgctatggagggatttcttcaggtttataaccaagaaatacagctcagcgaagacgcaggtcgaggctggtccggctacagcctgtaccggtgcctttgcttaaacatttgaaaactttcaggtgaccggaaaagttagaagcgacctgtttctttgccctactctggtgtatggtggattaatttgctatccggacaggactttactgctctcttttgaaacttgagtgtcaggagaataaaatctaagcttctttttttggctcaatcaagttgtccgttccctgttctaaacatttcggatactcattccataaaaagtctctacaatttgagacgctctcctttgtggttaagacttgagaatgtatcttagaaaataaccgaagtagttgtgtctatgaatattaaattcaggaatattaagatgtc

SEQ ID NO: 22873 - protein, 470 aa, Arabidopsis thaliana
  peptide (1)..(470): Ceres Seq. ID no. 12377574
  misc_feature (138)..(315): Pfam Name: DNA photolyase Pfam Description: DNA photolyase
  misc_feature (138)..(315): Pfam Name: DNA photolyase Pfam Description: DNA photolyase
  misc_feature (128)..(443): Homolog of NCBI NO: 18400841 NR Description: 6-4 photolyase (UVR3)
  misc_feature (169)..(452): Homolog of NCBI NO: 16330358 NR Description: DNA photolyase [Synechocystis sp. PCC 6803]
  misc_feature (138)..(450): Homolog of NCBI NO: 23135973 NR Description: hypothetical protein [Cytophaga hutchinsonii]
  misc_feature (141)..(452): Homolog of NCBI NO: 28374085 NR Description: Chain A, Crystal Structure Analysis Of
  misc_feature (130)..(461): Homolog of NCBI NO: 28971609 NR Description: cryptochrome dash [Arabidopsis thaliana]
  misc_feature (128)..(443): Homolog of NCBI NO: 18400841 NR Description: 6-4 photolyase (UVR3)
  misc_feature (138)..(450): Homolog of NCBI NO: 23135973 NR Description: hypothetical protein [Cytophaga hutchinsonii]
  misc_feature (130)..(461): Homolog of NCBI NO: 28971609 NR Description: cryptochrome dash [Arabidopsis thaliana]
  misc_feature (24)..(470): Homolog of NCBI NO: 15226633 NR Description: photolyase/blue-light receptor (PHR2)
  misc_feature (24)..(470): Homolog of NCBI NO: 21592984 NR Description: photolyase/blue-light receptor PHR2 [Arabidopsis
  misc_feature (141)..(452): Homolog of NCBI NO: 23040111 NR Description: hypothetical protein [Trichodesmium erythraeum
  misc_feature (138)..(450): Homolog of NCBI NO: 37520404 NR Description: probable bacterial cryptochrome [Gloeobacter
  misc_feature (130)..(461): Homolog of NCBI NO: 22327046 NR Description: DNA photolyase - like protein
  misc_feature (141)..(452): Homolog of NCBI NO: 28374085 NR Description: Chain A, Crystal Structure Analysis Of
  misc_feature (169)..(452): Homolog of NCBI NO: 16330358 NR Description: DNA photolyase [Synechocystis sp. PCC 6803]
  misc_feature (130)..(461): Homolog of NCBI NO: 22327046 NR Description: DNA photolyase - like protein
  misc_feature (138)..(450): Homolog of NCBI NO: 37520404 NR Description: probable bacterial cryptochrome [Gloeobacter
  misc_feature (141)..(452): Homolog of NCBI NO: 23040111 NR Description: hypothetical protein [Trichodesmium erythraeum
  misc_feature (24)..(470): Homolog of NCBI NO: 21592984 NR Description: photolyase/blue-light receptor PHR2 [Arabidopsis
  misc_feature (24)..(470): Homolog of NCBI NO: 15226633 NR Description: photolyase/blue-light receptor (PHR2)
LINSSHTLLHSLLSTHTHTHTHKMDSSNVEENLNPETKSAEEQNPLAIFHSSLPIASLSLTLFPSSTQFLKLFAHHPNKVKIPTQASSLTHLSLSSVSPFPSSRISFKSTIAANPLQSPLSIVPRRPVDPSSAAALRRAAVVWFRNDLRVHDNECLNSANDECVSVLPVYCFDPRDYGKSSSGFDKTGPFRAQFLIESVSELRKNLQARGSNLVVRVGKPEAVLVELAKEIGADAVYAHREVSHDEVKAEGKIETAMKEEGVEVKYFWGSTLYHLDDLPFKIEDLPSNYGAFKDKVQKLEIRKTIAALDQLKSLPSRGDVELGDIPSLLDLGISPTPRTSQEGKPTMVGGETEALTRLKSFAADCQARLSKGNQKGGNNSVFGANFSCKISPWLAMGSISPRSMFDELKKTISASTTSTTPRNGPGDTGLNWLMYELLWRDFFRFITKKYSSAKTQVEAGPATACTGAFA

SEQ ID NO: 22874 - protein, 447 aa, Arabidopsis thaliana
  peptide (1)..(447): Ceres Seq. ID no. 12377575
  misc_feature (115)..(292): Pfam Name: DNA photolyase Pfam Description: DNA photolyase
  misc_feature (115)..(292): Pfam Name: DNA photolyase Pfam Description: DNA photolyase
  misc_feature (105)..(420): Homolog of NCBI NO: 18400841 NR Description: 6-4 photolyase (UVR3)
  misc_feature (146)..(429): Homolog of NCBI NO: 16330358 NR Description: DNA photolyase [Synechocystis sp. PCC 6803]
  misc_feature (115)..(427): Homolog of NCBI NO: 23135973 NR Description: hypothetical protein [Cytophaga hutchinsonii]
  misc_feature (118)..(429): Homolog of NCBI NO: 28374085 NR Description: Chain A, Crystal Structure Analysis Of
  misc_feature (107)..(438): Homolog of NCBI NO: 28971609 NR Description: cryptochrome dash [Arabidopsis thaliana]
  misc_feature (105)..(420): Homolog of NCBI NO: 18400841 NR Description: 6-4 photolyase (UVR3)
  misc_feature (115)..(427): Homolog of NCBI NO: 23135973 NR Description: hypothetical protein [Cytophaga hutchinsonii]
  misc_feature (107)..(438): Homolog of NCBI NO: 28971609 NR Description: cryptochrome dash [Arabidopsis thaliana]
  misc_feature (1)..(447): Homolog of NCBI NO: 15226633 NR Description: photolyase/blue-light receptor (PHR2)
  misc_feature (1)..(447): Homolog of NCBI NO: 21592984 NR Description: photolyase/blue-light receptor PHR2 [Arabidopsis
  misc_feature (118)..(429): Homolog of NCBI NO: 23040111 NR Description: hypothetical protein [Trichodesmium erythraeum
  misc_feature (115)..(427): Homolog of NCBI NO: 37520404 NR Description: probable bacterial cryptochrome [Gloeobacter
  misc_feature (107)..(438): Homolog of NCBI NO: 22327046 NR Description: DNA photolyase - like protein
  misc_feature (118)..(429): Homolog of NCBI NO: 28374085 NR Description: Chain A, Crystal Structure Analysis Of
  misc_feature (146)..(429): Homolog of NCBI NO: 16330358 NR Description: DNA photolyase [Synechocystis sp. PCC 6803]
  misc_feature (107)..(438): Homolog of NCBI NO: 22327046 NR Description: DNA photolyase - like protein
  misc_feature (115)..(427): Homolog of NCBI NO: 37520404 NR Description: probable bacterial cryptochrome [Gloeobacter
  misc_feature (118)..(429): Homolog of NCBI NO: 23040111 NR Description: hypothetical protein [Trichodesmium erythraeum
  misc_feature (1)..(447): Homolog of NCBI NO: 21592984 NR Description: photolyase/blue-light receptor PHR2 [Arabidopsis
  misc_feature (1)..(447): Homolog of NCBI NO: 15226633 NR Description: photolyase/blue-light receptor (PHR2)
MDSSNVEENLNPETKSAEEQNPLAIFHSSLPIASLSLTLFPSSTQFLKLFAHHPNKVKIPTQASSLTHLSLSSVSPFPSSRISFKSTIAANPLQSPLSIVPRRPVDPSSAAALRRAAVVWFRNDLRVHDNECLNSANDECVSVLPVYCFDPRDYGKSSSGFDKTGPFRAQFLIESVSELRKNLQARGSNLVVRVGKPEAVLVELAKEIGADAVYAHREVSHDEVKAEGKIETAMKEEGVEVKYFWGSTLYHLDDLPFKIEDLPSNYGAFKDKVQKLEIRKTIAALDQLKSLPSRGDVELGDIPSLLDLGISPTPRTSQEGKPTMVGGETEALTRLKSFAADCQARLSKGNQKGGNNSVFGANFSCKISPWLAMGSISPRSMFDELKKTISASTTSTTPRNGPGDTGLNWLMYELLWRDFFRFITKKYSSAKTQVEAGPATACTGAFA

SEQ ID NO: 22875 - DNA, 1154 bp, Arabidopsis thaliana
  misc_feature (1)..(1154): Ceres Seq. ID no. 12327110
  misc_feature: MA Experiment ID: 108434 Result: Up-regulated in Transcription
  misc_feature: MA Experiment 108434 PARAMETER Experiment Name: At_Root_Tips_cDNA_P Parameter: Tissue Value: Root Tips
  misc_feature: MA Experiment ID: 108595 Result: Down-regulated in Transcription
  misc_feature: MA Experiment 108595 PARAMETER Experiment Name: At_Ler-pi_Ovule_cDNA_P Parameter: Plant Line Value: null
  misc_feature: MA Experiment ID: 20000179 Result: Up-regulated in Transcription
  misc_feature: MA Experiment 20000179 PARAMETER Experiment Name: At_Germinating_Seeds_P Parameter: Age (hr) Value: 6 vs. 0
  misc_feature: MA Experiment 20000179 PARAMETER Experiment Name: At_Germinating_Seeds_P Parameter: Tissue Value: Germinating Seeds
  misc_feature: MA Experiment ID: 20000180 Result: Up-regulated in Transcription
  misc_feature: MA Experiment 20000180 PARAMETER Experiment Name: At_Germinating_Seeds_P Parameter: Age (hr) Value: 24 vs. 0
  misc_feature: MA Experiment 20000180 PARAMETER Experiment Name: At_Germinating_Seeds_P Parameter: Tissue Value: Germinating Seeds
  misc_feature: MA Experiment ID: 20000437 Result: Down-regulated in Transcription
  misc_feature: MA Experiment 20000437 PARAMETER Experiment Name: At_Drought_P Parameter: Age (day) Value: 8
  misc_feature: MA Experiment 20000437 PARAMETER Experiment Name: At_Drought_P Parameter: Organism Value: A. thaliana
  misc_feature: MA Experiment 20000437 PARAMETER Experiment Name: At_Drought_P Parameter: Plant Line Value: WS
  misc_feature: MA Experiment 20000437 PARAMETER Experiment Name: At_Drought_P Parameter: Timepoint (hr) Value: 24
  misc_feature: MA Experiment 20000437 PARAMETER Experiment Name: At_Drought_P Parameter: Tissue Value: Whole Plant
  misc_feature: MA Experiment 20000437 PARAMETER Experiment Name: At_Drought_P Parameter: Treatment Value: Drought vs. No Drought
  misc_feature: MA Experiment ID: 20000794 Result: Down-regulated in Transcription
  misc_feature: MA Experiment 20000794 PARAMETER Experiment Name: At_Petals_P Parameter: Age (day) Value: 23-25 days
  misc_feature: MA Experiment 20000794 PARAMETER Experiment Name: At_Petals_P Parameter: Plant Line Value: WS
  misc_feature: MA Experiment 20000794 PARAMETER Experiment Name: At_Petals_P Parameter: Tissue Value: Petals vs. Whole plant
accaaccaacaaacactcttctcagtggctttttttttaattgatcggatcctccaagcagcagccgaagacgaccgccggcgatttccggttggcaattgttctcatctgatctgctttctcgcgctccaagtttaatggaagcattaactacttcaagggttgtgccagttcaggtcccctgtagaaagctctcttcactttttgctaatttttcttgccttgagttaaggagatatccttgtagaggtcttgtctccattatgaaccatcccaaattgcttcgtccagtgactgcttctgtgcagcctcacgagttgtcgactttggggcatgaaggcaacattgttccttctaaagaaattcttgatctttggagaagtgttgaagcggtatgtttcgatgtggacagcacggtttgtgtggatgaaggtattgatgaacttgctgagttttgtggagctggaaaggctgttgctgaatggactgccagagctatgggtggatctgttccatttgaagaagctctagctgcaagactttctttattcaagccttctctttcaaaagtagaggaatatctcgacaagagacccccaaggctatctcctggcattgaagagttggtcaagaaactcagagccaataacattgatgtctatttgatatctggaggttttcgacagatgatcaatcctgtagcatcgattcttggcatccctcgggagaatatctttgccaacaatcttctatttggaaactccggcgagtttctgggatttgatgagaacgaacctacgtcaagaagtggaggcaaagccaaggcagtgcaacaaatacgaaagggtcgtctctacaagactatggccatgattggagatggtgctactgatctcgaagcacgtaaacctggtggcgcagatttgttcatatgctacgctggagttcagcttcgtgaagccgttgcagcaaatgcagactggcttatctttaagtttgaatctctcataaactcattggactaaaagcctctatagtgattattctcgtttagctaaactcattattcatatctccaaatttgtacccttttatgaatttgtatcaaataccaattgaatcaacaaatgtttttgccaaaaaccctgacgtag

SEQ ID NO: 22876 - protein, 295 aa, Arabidopsis thaliana
  peptide (1)..(295): Ceres Seq. ID no. 12327111
  misc_feature (83)..(269): Pfam Name: haloacid dehalogenase-like hydrolase Pfam Description: haloacid dehalogenase-like hydrolase
  misc_feature (51)..(295): Homolog of NCBI NO: 17543878 NR Description: Haloacid dehalogenase-like hydrolase
  misc_feature (51)..(295): Homolog of NCBI NO: 17543876 NR Description: Haloacid dehalogenase-like hydrolase
  misc_feature (70)..(295): Homolog of NCBI NO: 29726390 NR Description: Chain A, Molecular Basis For The Local
  misc_feature (70)..(295): Homolog of NCBI NO: 34872053 NR Description: similar to expressed sequence AI480570 [Rattus
  misc_feature (70)..(295): Homolog of NCBI NO: 4758972 NR Description: phosphoserine phosphatase
  misc_feature (70)..(295): Homolog of NCBI NO: 31873380 NR Description: hypothetical protein [Homo sapiens]
  misc_feature (70)..(295): Homolog of NCBI NO: 19527116 NR Description: expressed sequence AI480570 [Mus musculus]
  misc_feature (77)..(294): Homolog of NCBI NO: 4680206 NR Description: hypothetical protein [Sorghum bicolor]
  misc_feature (1)..(295): Homolog of NCBI NO: 11358621 NR Description: phosphoserine phosphatase (EC 3.1.3.3) precursor,
  misc_feature (1)..(295): Homolog of NCBI NO: 15221827 NR Description: 3-phosphoserine phosphatase
MEALTTSRVVPVQVPCRKLSSLFANFSCLELRRYPCRGLVSIMNHPKLLRPVTASVQPHELSTLGHEGNIVPSKEILDLWRSVEAVCFDVDSTVCVDEGIDELAEFCGAGKAVAEWTARAMGGSVPFEEALAARLSLFKPSLSKVEEYLDKRPPRLSPGIEELVKKLRANNIDVYLISGGFRQMINPVASILGIPRENIFANNLLFGNSGEFLGFDENEPTSRSGGKAKAVQQIRKGRLYKTMAMIGDGATDLEARKPGGADLFICYAGVQLREAVAANADWLIFKFESLINSLD

SEQ ID NO: 22877 - protein, 253 aa, Arabidopsis thaliana
  peptide (1)..(253): Ceres Seq. ID no. 12327112
  misc_feature (41)..(227): Pfam Name: haloacid dehalogenase-like hydrolase Pfam Description: haloacid dehalogenase-like hydrolase
  misc_feature (9)..(253): Homolog of NCBI NO: 17543878 NR Description: Haloacid dehalogenase-like hydrolase
  misc_feature (9)..(253): Homolog of NCBI NO: 17543876 NR Description: Haloacid dehalogenase-like hydrolase
  misc_feature (28)..(253): Homolog of NCBI NO: 29726390 NR Description: Chain A, Molecular Basis For The Local
  misc_feature (28)..(253): Homolog of NCBI NO: 34872053 NR Description: similar to expressed sequence AI480570 [Rattus
  misc_feature (28)..(253): Homolog of NCBI NO: 4758972 NR Description: phosphoserine phosphatase
  misc_feature (28)..(253): Homolog of NCBI NO: 31873380 NR Description: hypothetical protein [Homo sapiens]
  misc_feature (28)..(253): Homolog of NCBI NO: 19527116 NR Description: expressed sequence AI480570 [Mus musculus]
  misc_feature (35)..(252): Homolog of NCBI NO: 4680206 NR Description: hypothetical protein [Sorghum bicolor]
  misc_feature (1)..(253): Homolog of NCBI NO: 11358621 NR Description: phosphoserine phosphatase (EC 3.1.3.3) precursor,
  misc_feature (1)..(253): Homolog of NCBI NO: 15221827 NR Description: 3-phosphoserine phosphatase
MNHPKLLRPVTASVQPHELSTLGHEGNIVPSKEILDLWRSVEAVCFDVDSTVCVDEGIDELAEFCGAGKAVAEWTARAMGGSVPFEEALAARLSLFKPSLSKVEEYLDKRPPRLSPGIEELVKKLRANNIDVYLISGGFRQMINPVASILGIPRENIFANNLLFGNSGEFLGFDENEPTSRSGGKAKAVQQIRKGRLYKTMAMIGDGATDLEARKPGGADLFICYAGVQLREAVAANADWLIFKFESLINSLD

SEQ ID NO: 22878 - protein, 175 aa, Arabidopsis thaliana
  peptide (1)..(175): Ceres Seq. ID no. 12327113
  misc_feature (1)..(149): Pfam Name: haloacid dehalogenase-like hydrolase Pfam Description: haloacid dehalogenase-like hydrolase
  misc_feature (1)..(175): Homolog of NCBI NO: 17543878 NR Description: Haloacid dehalogenase-like hydrolase
  misc_feature (1)..(175): Homolog of NCBI NO: 17543876 NR Description: Haloacid dehalogenase-like hydrolase
  misc_feature (1)..(175): Homolog of NCBI NO: 29726390 NR Description: Chain A, Molecular Basis For The Local
  misc_feature (1)..(175): Homolog of NCBI NO: 34872053 NR Description: similar to expressed sequence AI480570 [Rattus
  misc_feature (1)..(175): Homolog of NCBI NO: 4758972 NR Description: phosphoserine phosphatase
  misc_feature (1)..(175): Homolog of NCBI NO: 31873380 NR Description: hypothetical protein [Homo sapiens]
  misc_feature (1)..(175): Homolog of NCBI NO: 19527116 NR Description: expressed sequence AI480570 [Mus musculus]
  misc_feature (1)..(174): Homolog of NCBI NO: 4680206 NR Description: hypothetical protein [Sorghum bicolor]
  misc_feature (1)..(175): Homolog of NCBI NO: 11358621 NR Description: phosphoserine phosphatase (EC 3.1.3.3) precursor,
  misc_feature (1)..(175): Homolog of NCBI NO: 15221827 NR Description: 3-phosphoserine phosphatase
MGGSVPFEEALAARLSLFKPSLSKVEEYLDKRPPRLSPGIEELVKKLRANNIDVYLISGGFRQMINPVASILGIPRENIFANNLLFGNSGEFLGFDENEPTSRSGGKAKAVQQIRKGRLYKTMAMIGDGATDLEARKPGGADLFICYAGVQLREAVAANADWLIFKFESLINSLD

SEQ ID NO: 22879 - DNA, 1125 bp, Arabidopsis thaliana
  misc_feature (1)..(1125): Ceres Seq. ID no. 12343421
  misc_feature: MA Experiment ID: 108434 Result: Down-regulated in Transcription
  misc_feature: MA Experiment 108434 PARAMETER Experiment Name: At_Root_Tips_cDNA_P Parameter: Tissue Value: Root Tips
  misc_feature: MA Experiment ID: 108577 Result: Down-regulated in Transcription
  misc_feature: MA Experiment 108577 PARAMETER Experiment Name: At_42deg_Heat_cDNA_P Parameter: Temperature (deg C) Value: 42 vs. 22
  misc_feature: MA Experiment 108577 PARAMETER Experiment Name: At_42deg_Heat_cDNA_P Parameter: Timepoint (hr) Value: 6
  misc_feature: MA Experiment 108577 PARAMETER Experiment Name: At_42deg_Heat_cDNA_P Parameter: Tissue Value: Aerial
  misc_feature: MA Experiment ID: 108594 Result: Down-regulated in Transcription
  misc_feature: MA Experiment 108594 PARAMETER Experiment Name: At_Ler-rhl_Root_cDNA_P Parameter: Plant Line Value: null
  misc_feature: MA Experiment ID: 20000314 Result: Up-regulated in Transcription
  misc_feature: MA Experiment 20000314 PARAMETER Experiment Name: At_14day_Shoots-Roots_Sub_P Parameter: Age (day) Value: 14
  misc_feature: MA Experiment 20000314 PARAMETER Experiment Name: At_14day_Shoots-Roots_Sub_P Parameter: Organism Value: A. thaliana
  misc_feature: MA Experiment 20000314 PARAMETER Experiment Name: At_14day_Shoots-Roots_Sub_P Parameter: Plant Line Value: WS
  misc_feature: MA Experiment 20000314 PARAMETER Experiment Name: At_14day_Shoots-Roots_Sub_P Parameter: Tissue Value: Roots vs. Whole Plant
  misc_feature: MA Experiment ID: 20000315 Result: Down-regulated in Transcription
  misc_feature: MA Experiment 20000315 PARAMETER Experiment Name: At_14day_Shoots-Roots_Sub_P Parameter: Age (day) Value: 14
  misc_feature: MA Experiment 20000315 PARAMETER Experiment Name: At_14day_Shoots-Roots_Sub_P Parameter: Organism Value: A. thaliana
  misc_feature: MA Experiment 20000315 PARAMETER Experiment Name: At_14day_Shoots-Roots_Sub_P Parameter: Plant Line Value: WS
  misc_feature: MA Experiment 20000315 PARAMETER Experiment Name: At_14day_Shoots-Roots_Sub_P Parameter: Tissue Value: Shoots vs. Whole Plant
atcagaaacacaattccttcttcttcttcttcttcttcttgtctccgatgtcagccatggatgttatgattcactcttcaagctttctcctcccttgcgacgaaactagtacagggacgagatacgctctcgttgttctgaaccagagtttgccacgattcactcctcttctctgggaacatgagcagcaaaacttcgtctctgtgctgatggaggcgctaatcgcatctacgacgaattgcctctcttcttccctaatgaagacgctttggccattcgaaacaggtataagccggatgttatcaaaggagatatggattctatacgtcgtgacgtcctcgacttttatataaacttgggaactaaggttatagatgaatctcatgatcaagacaccacagatcttgataaatgcattttgtatatccgtcactctactttgaatcaagagacttccggactccagattcttgccactggagcacttggaggaagatttgatcaagccggtaatctcaacgtcttatatcgatatccagatacaaggatagtccttttatctgacgattgcctcatccaactccttccaaagactcatcgacatgaaatacatattcagtcttctctagaagggcctcactgtggactcatacccattggaactccatctgctaaaaccacaacctcagggcttcaatgggatctcagcaacactgagatgagatttggtgggttgataagtacatccaacttggttaaagaagagaaaatcacagtcgaatcggattcggatcttctctggactatatccatcaagaaaacaggactttccatacaagaccatacaccttaggcccggtaacaaaacacactttagtatattatacgctactatgatgttcctgatgcaacgaactagttcaacattattgtgttgatttgttgttcactgtactagctaataatacttgtaccattactgtcgttatacattaagatgcttttttctttggttctgtcattgtttatgtggggctttgttgatttgtcgtactcaaaattgtgactggatgttggttagatattggaatctacttgtgcggtatatgagaaaagacaaaattc

SEQ ID NO: 22880 - protein, 179 aa, Arabidopsis thaliana
  peptide (1)..(179): Ceres Seq. ID no. 12343422
  misc_feature (1)..(84): Pfam Name: Thiamin pyrophosphokinase, catalytic domain Pfam Description: Thiamin pyrophosphokinase, catalytic domain
  misc_feature (1)..(179): Homolog of NCBI NO: 7488367 NR Description: probable thiamin pyrophosphokinase At2g44750
  misc_feature (1)..(179): Homolog of NCBI NO: 30689827 NR Description: thiamin pyrophosphokinase -related [Arabidopsis
  misc_feature (1)..(168): Homolog of NCBI NO: 26324388 NR Description: unnamed protein product [Mus musculus]
  misc_feature (1)..(168): Homolog of NCBI NO: 34907130 NR Description: putative thiamine pyrophosphokinase
  misc_feature (1)..(179): Homolog of NCBI NO: 30678410 NR Description: thiamin pyrophosphokinase -related [Arabidopsis
  misc_feature (1)..(179): Homolog of NCBI NO: 18406621 NR Description: putative thiamin pyrophosphokinase
  misc_feature (16)..(168): Homolog of NCBI NO: 34915046 NR Description: putative thiamin pyrophosphokinase
  misc_feature (1)..(168): Homolog of NCBI NO: 7305589 NR Description: thiamin pyrophosphokinase [Mus musculus]
  misc_feature (1)..(179): Homolog of NCBI NO: 18379026 NR Description: thiamin pyrophosphokinase, putative
  misc_feature (1)..(179): Homolog of NCBI NO: 30678415 NR Description: thiamin pyrophosphokinase -related [Arabidopsis
MDSIRRDVLDFYINLGTKVIDESHDQDTTDLDKCILYIRHSTLNQETSGLQILATGALGGRFDQAGNLNVLYRYPDTRIVLLSDDCLIQLLPKTHRHEIHIQSSLEGPHCGLIPIGTPSAKTTTSGLQWDLSNTEMRFGGLISTSNLVKEEKITVESDSDLLWTISIKKTGLSIQDHTP

SEQ ID NO: 22881 - protein, 116 aa, Arabidopsis thaliana
  peptide (1)..(116): Ceres Seq. ID no. 12343423
  misc_feature (22)..(59): Homolog of NCBI NO: 34907130 NR Description: putative thiamine pyrophosphokinase
  misc_feature (19)..(60): Homolog of NCBI NO: 34915046 NR Description: putative thiamin pyrophosphokinase
  misc_feature (16)..(60): Homolog of NCBI NO: 18406621 NR Description: putative thiamin pyrophosphokinase
  misc_feature (19)..(60): Homolog of NCBI NO: 7488367 NR Description: probable thiamin pyrophosphokinase At2g44750
  misc_feature (16)..(60): Homolog of NCBI NO: 30689827 NR Description: thiamin pyrophosphokinase -related [Arabidopsis
  misc_feature (19)..(60): Homolog of NCBI NO: 18379026 NR Description: thiamin pyrophosphokinase, putative
  misc_feature (16)..(60): Homolog of NCBI NO: 30678415 NR Description: thiamin pyrophosphokinase -related [Arabidopsis
QKHNSFFFFFFFLSPMSAMDVMIHSSSFLLPCDETSTGTRYALVVLNQSLPRFTPLLWEHEQQNFVSVLMEALIASTTNCLSSSLMKTLWPFETGISRMLSKEIWILYVVTSSTFI

SEQ ID NO: 22882 - protein, 101 aa, Arabidopsis thaliana
  peptide (1)..(101): Ceres Seq. ID no. 12343424
  misc_feature (7)..(44): Homolog of NCBI NO: 34907130 NR Description: putative thiamine pyrophosphokinase
  misc_feature (4)..(45): Homolog of NCBI NO: 34915046 NR Description: putative thiamin pyrophosphokinase
  misc_feature (1)..(45): Homolog of NCBI NO: 18406621 NR Description: putative thiamin pyrophosphokinase
  misc_feature (4)..(45): Homolog of NCBI NO: 7488367 NR Description: probable thiamin pyrophosphokinase At2g44750
  misc_feature (1)..(45): Homolog of NCBI NO: 30689827 NR Description: thiamin pyrophosphokinase -related [Arabidopsis
  misc_feature (4)..(45): Homolog of NCBI NO: 18379026 NR Description: thiamin pyrophosphokinase, putative
  misc_feature (1)..(45): Homolog of NCBI NO: 30678415 NR Description: thiamin pyrophosphokinase -related [Arabidopsis
MSAMDVMIHSSSFLLPCDETSTGTRYALVVLNQSLPRFTPLLWEHEQQNFVSVLMEALIASTTNCLSSSLMKTLWPFETGISRMLSKEIWILYVVTSSTFI

SEQ ID NO: 22883 - DNA, 1178 bp, Arabidopsis thaliana
  misc_feature (1)..(1178): Ceres Seq. ID no. 12325264
  misc_feature: MA Experiment ID: 108434 Result: Down-regulated in Transcription
  misc_feature: MA Experiment 108434 PARAMETER Experiment Name: At_Root_Tips_cDNA_P Parameter: Tissue Value: Root Tips
  misc_feature: MA Experiment ID: 108461 Result: Down-regulated in Transcription
  misc_feature: MA Experiment 108461 PARAMETER Experiment Name: At_Germinating_Seeds_cDNA_P Parameter: Age (day) Value: 1 vs. 0
  misc_feature: MA Experiment 108461 PARAMETER Experiment Name: At_Germinating_Seeds_cDNA_P Parameter: Tissue Value: Germinating Seeds
  misc_feature: MA Experiment ID: 108501 Result: Up-regulated in Transcription
  misc_feature: MA Experiment 108501 PARAMETER Experiment Name: At_ap2_floral_buds_cDNA_P Parameter: Plant Line Value: ap2 (Ler.)
  misc_feature: MA Experiment 108501 PARAMETER Experiment Name: At_ap2_floral_buds_cDNA_P Parameter: Tissue Value: Closed Flower
  misc_feature: MA Experiment ID: 20000087 Result: Down-regulated in Transcription
  misc_feature: MA Experiment 20000087 PARAMETER Experiment Name: At_100uM_ABA_Mutants_cDNA_P Parameter: Plant Line Value: WS
  misc_feature: MA Experiment 20000087 PARAMETER Experiment Name: At_100uM_ABA_Mutants_cDNA_P Parameter: Timepoint (hr) Value: 6
  misc_feature: MA Experiment 20000087 PARAMETER Experiment Name: At_100uM_ABA_Mutants_cDNA_P Parameter: Tissue Value: Aerial
  misc_feature: MA Experiment 20000087 PARAMETER Experiment Name: At_100uM_ABA_Mutants_cDNA_P Parameter: Treatment Value: 100uM ABA vs. No Treatment
  misc_feature: MA Experiment ID: 20000185 Result: Up-regulated in Transcription
  misc_feature: MA Experiment 20000185 PARAMETER Experiment Name: At_Roots__P Parameter: Age (day) Value: 7 vs. 21
  misc_feature: MA Experiment 20000185 PARAMETER Experiment Name: At_Roots__P Parameter: Organism Value: A. thaliana
  misc_feature: MA Experiment 20000185 PARAMETER Experiment Name: At_Roots__P Parameter: Tissue Value: Roots vs. Whole Plant
  misc_feature: MA Experiment ID: 20000227 Result: Down-regulated in Transcription
  misc_feature: MA Experiment 20000227 PARAMETER Experiment Name: At_Root-Tips-vs-Tops_P Parameter: Tissue Value: Root Tips vs. Root Tops
  misc_feature: MA Experiment ID: 20000439 Result: Up-regulated in Transcription
  misc_feature: MA Experiment 20000439 PARAMETER Experiment Name: At_Roots__P Parameter: Age (day) Value: 14 vs. 21
  misc_feature: MA Experiment 20000439 PARAMETER Experiment Name: At_Roots__P Parameter: Organism Value: A. thaliana
  misc_feature: MA Experiment 20000439 PARAMETER Experiment Name: At_Roots__P Parameter: Tissue Value: Roots vs. Whole Plant
  misc_feature: MA Experiment ID: 20001904 Result: Up-regulated in Transcription
  misc_feature: MA Experiment 20001904 PARAMETER Experiment Name: At_Drought_Reproduction_P Parameter: Age (day) Value: 37
  misc_feature: MA Experiment 20001904 PARAMETER Experiment Name: At_Drought_Reproduction_P Parameter: Organism Value: A. thaliana
  misc_feature: MA Experiment 20001904 PARAMETER Experiment Name: At_Drought_Reproduction_P Parameter: Plant Line Value: WS
  misc_feature: MA Experiment 20001904 PARAMETER Experiment Name: At_Drought_Reproduction_P Parameter: Timepoint (day) Value: 7
  misc_feature: MA Experiment 20001904 PARAMETER Experiment Name: At_Drought_Reproduction_P Parameter: Tissue Value: Rosettes
  misc_feature: MA Experiment 20001904 PARAMETER Experiment Name: At_Drought_Reproduction_P Parameter: Treatment Value: Drought vs. No Drought
ataaaatccatggctgaagcttgcagagttaggaggatgaagctaggaagccaaggccttgaggtatctgcgcaaggccttggctgcatggccctctccgctcgatacggtgctcccaagccggaaactgacgccatcgctctcctccaccatgctattaactccggtgttactttctttgacacctctgacatgtatggtcctgaaaccaacgagttgctcctcggaaaggctctgaaagatggggtgaaggagaaagtggagcttgcgaccaaatttggattctttatagtagagggggaaatttctgaggtaagaggagatcctgagtatgtaagggcagcgtgtgaggctagtttaaagaggctagatattgcctgcattgatctttattatcagcatcgaatcgatactcgtgtccctatcgaaatcactatgagagaactgaagaagctagttgaagagggtaagataaagtgtattggtctgtcagaagcttcagcttcaactatcagaagagcacatgctgttcacccgataactgcggtgcaaatagaatggtccttatggtcgagagacgcggaagaagatatcattcctatctgcagggaacttgggattggaatcgtagcttatagccctctaggaagaggcttcttagcagcaggacccaaacttgctgagaatctggaaaacgatgacttcagaaagactctaccaagattccaacaagaaaacgtagaccacaacaagattctctttgagaaagtttctgcaatggctgagaagaaagggtgcactccagcacaactagccttagcatgggttcatcaccagggagatgatgtttgccccattccaggaaccactaagattgaaaacctcaaccagaacattagagctttgtcagtaaaactcactcctgaagaaatatctgagctcgagtcccttgccaaaccagagtctgtgaaaggagaaagatacatggcctcaatgtccaccttcaagaactccaacactccaccgttgtcttcctggaaagccacttaaaaccgcatgagagtttctctagctaaacctactaaaattaatatgctaagggcttgtgtaagcccacaaaaataatatgtaagagtttgtgttgatgttcagagtgttcaatgtataattttctatgc

SEQ ID NO: 22884 - protein, 349 aa, Arabidopsis thaliana
  peptide (1)..(349): Ceres Seq. ID no. 12325265
  misc_feature (10)..(348): Homolog of NCBI NO: 38344997 NR Description: OSJNBa0008A08.11 [Oryza sativa (japonica
  misc_feature (4)..(346): Homolog of NCBI NO: 15220214 NR Description: putative auxin-induced protein
  misc_feature (239)..(348): Homolog of NCBI NO: 15219805 NR Description: auxin-induced protein, putative; protein id:
  misc_feature (6)..(233): Homolog of NCBI NO: 15219805 NR Description: auxin-induced protein, putative; protein id:
  misc_feature (4)..(348): Homolog of NCBI NO: 6562980 NR Description: auxin-induced atb2 [Arabidopsis thaliana]
  misc_feature (4)..(348): Homolog of NCBI NO: 25316216 NR Description: hypothetical protein F8A5.24 [imported] -
  misc_feature (4)..(348): Homolog of NCBI NO: 18406861 NR Description: auxin-induced protein, putative
  misc_feature (4)..(348): Homolog of NCBI NO: 15219786 NR Description: auxin-induced protein, putative; protein id:
  misc_feature (4)..(349): Homolog of NCBI NO: 30696451 NR Description: aldo/keto reductase family [Arabidopsis thaliana]
  misc_feature (4)..(349): Homolog of NCBI NO: 30102704 NR Description: At1g60680 [Arabidopsis thaliana]
IKSMAEACRVRRMKLGSQGLEVSAQGLGCMALSARYGAPKPETDAIALLHHAINSGVTFFDTSDMYGPETNELLLGKALKDGVKEKVELATKFGFFIVEGEISEVRGDPEYVRAACEASLKRLDIACIDLYYQHRIDTRVPIEITMRELKKLVEEGKIKCIGLSEASASTIRRAHAVHPITAVQIEWSLWSRDAEEDIIPICRELGIGIVAYSPLGRGFLAAGPKLAENLENDDFRKTLPRFQQENVDHNKILFEKVSAMAEKKGCTPAQLALAWVHHQGDDVCPIPGTTKIENLNQNIRALSVKLTPEEISELESLAKPESVKGERYMASMSTFKNSNTPPLSSWKAT

SEQ ID NO: 22885 - protein, 346 aa, Arabidopsis thaliana
  peptide (1)..(346): Ceres Seq. ID no. 12325266
  misc_feature (7)..(345): Homolog of NCBI NO: 38344997 NR Description: OSJNBa0008A08.11 [Oryza sativa (japonica
  misc_feature (1)..(343): Homolog of NCBI NO: 15220214 NR Description: putative auxin-induced protein
  misc_feature (236)..(345): Homolog of NCBI NO: 15219805 NR Description: auxin-induced protein, putative; protein id:
  misc_feature (3)..(230): Homolog of NCBI NO: 15219805 NR Description: auxin-induced protein, putative; protein id:
  misc_feature (1)..(345): Homolog of NCBI NO: 6562980 NR Description: auxin-induced atb2 [Arabidopsis thaliana]
  misc_feature (1)..(345): Homolog of NCBI NO: 25316216 NR Description: hypothetical protein F8A5.24 [imported] -
  misc_feature (1)..(345): Homolog of NCBI NO: 18406861 NR Description: auxin-induced protein, putative
  misc_feature (1)..(345): Homolog of NCBI NO: 15219786 NR Description: auxin-induced protein, putative; protein id:
  misc_feature (1)..(346): Homolog of NCBI NO: 30696451 NR Description: aldo/keto reductase family [Arabidopsis thaliana]
  misc_feature (1)..(346): Homolog of NCBI NO: 30102704 NR Description: At1g60680 [Arabidopsis thaliana]
MAEACRVRRMKLGSQGLEVSAQGLGCMALSARYGAPKPETDAIALLHHAINSGVTFFDTSDMYGPETNELLLGKALKDGVKEKVELATKFGFFIVEGEISEVRGDPEYVRAACEASLKRLDIACIDLYYQHRIDTRVPIEITMRELKKLVEEGKIKCIGLSEASASTIRRAHAVHPITAVQIEWSLWSRDAEEDIIPICRELGIGIVAYSPLGRGFLAAGPKLAENLENDDFRKTLPRFQQENVDHNKILFEKVSAMAEKKGCTPAQLALAWVHHQGDDVCPIPGTTKIENLNQNIRALSVKLTPEEISELESLAKPESVKGERYMASMSTFKNSNTPPLSSWKAT

SEQ ID NO: 22886 - protein, 337 aa, Arabidopsis thaliana
  peptide (1)..(337): Ceres Seq. ID no. 12325267
  misc_feature (1)..(336): Homolog of NCBI NO: 38344997 NR Description: OSJNBa0008A08.11 [Oryza sativa (japonica
  misc_feature (1)..(334): Homolog of NCBI NO: 15220214 NR Description: putative auxin-induced protein
  misc_feature (227)..(336): Homolog of NCBI NO: 15219805 NR Description: auxin-induced protein, putative; protein id:
  misc_feature (1)..(221): Homolog of NCBI NO: 15219805 NR Description: auxin-induced protein, putative; protein id:
  misc_feature (1)..(336): Homolog of NCBI NO: 6562980 NR Description: auxin-induced atb2 [Arabidopsis thaliana]
  misc_feature (1)..(336): Homolog of NCBI NO: 25316216 NR Description: hypothetical protein F8A5.24 [imported] -
  misc_feature (1)..(336): Homolog of NCBI NO: 18406861 NR Description: auxin-induced protein, putative
  misc_feature (1)..(336): Homolog of NCBI NO: 15219786 NR Description: auxin-induced protein, putative; protein id:
  misc_feature (1)..(337): Homolog of NCBI NO: 30696451 NR Description: aldo/keto reductase family [Arabidopsis thaliana]
  misc_feature (1)..(337): Homolog of NCBI NO: 30102704 NR Description: At1g60680 [Arabidopsis thaliana]
MKLGSQGLEVSAQGLGCMALSARYGAPKPETDAIALLHHAINSGVTFFDTSDMYGPETNELLLGKALKDGVKEKVELATKFGFFIVEGEISEVRGDPEYVRAACEASLKRLDIACIDLYYQHRIDTRVPIEITMRELKKLVEEGKIKCIGLSEASASTIRRAHAVHPITAVQIEWSLWSRDAEEDIIPICRELGIGIVAYSPLGRGFLAAGPKLAENLENDDFRKTLPRFQQENVDHNKILFEKVSAMAEKKGCTPAQLALAWVHHQGDDVCPIPGTTKIENLNQNIRALSVKLTPEEISELESLAKPESVKGERYMASMSTFKNSNTPPLSSWKAT

SEQ ID NO: 22887 - DNA, 1210 bp, Arabidopsis thaliana
  misc_feature (1)..(1210): Ceres Seq. ID no. 12482646
  misc_feature: MA Experiment ID: 20000069 Result: Up-regulated in Transcription
  misc_feature: MA Experiment 20000069 PARAMETER Experiment Name: At_100uM_ABA_Mutants_cDNA_P Parameter: Plant Line Value: CS23
  misc_feature: MA Experiment 20000069 PARAMETER Experiment Name: At_100uM_ABA_Mutants_cDNA_P Parameter: Timepoint (hr) Value: 6
  misc_feature: MA Experiment 20000069 PARAMETER Experiment Name: At_100uM_ABA_Mutants_cDNA_P Parameter: Tissue Value: Aerial
  misc_feature: MA Experiment 20000069 PARAMETER Experiment Name: At_100uM_ABA_Mutants_cDNA_P Parameter: Treatment Value: 100uM ABA vs. No Treatment
  misc_feature: MA Experiment ID: 20000072 Result: Up-regulated in Transcription
  misc_feature: MA Experiment 20000072 PARAMETER Experiment Name: At_100uM_ABA_Mutants_cDNA_P Parameter: Plant Line Value: CS8105
  misc_feature: MA Experiment 20000072 PARAMETER Experiment Name: At_100uM_ABA_Mutants_cDNA_P Parameter: Timepoint (hr) Value: 6
  misc_feature: MA Experiment 20000072 PARAMETER Experiment Name: At_100uM_ABA_Mutants_cDNA_P Parameter: Tissue Value: Aerial
  misc_feature: MA Experiment 20000072 PARAMETER Experiment Name: At_100uM_ABA_Mutants_cDNA_P Parameter: Treatment Value: 100uM ABA vs. No Treatment
  misc_feature: MA Experiment ID: 20000113 Result: Up-regulated in Transcription
  misc_feature: MA Experiment 20000113 PARAMETER Experiment Name: At_42deg_Heat_cDNA_P Parameter: Temperature (deg C) Value: 42 vs. 22
  misc_feature: MA Experiment 20000113 PARAMETER Experiment Name: At_42deg_Heat_cDNA_P Parameter: Timepoint (hr) Value: 8
  misc_feature: MA Experiment 20000113 PARAMETER Experiment Name: At_42deg_Heat_cDNA_P Parameter: Tissue Value: Aerial
  misc_feature: MA Experiment ID: 20000213 Result: Up-regulated in Transcription
  misc_feature: MA Experiment 20000213 PARAMETER Experiment Name: At_4deg_Cold_P Parameter: Timepoint (hr) Value: 2
  misc_feature: MA Experiment ID: 20000264 Result: Up-regulated in Transcription
  misc_feature: MA Experiment 20000264 PARAMETER Experiment Name: At_Open_Flower_P Parameter: Age (day) Value: 21
  misc_feature: MA Experiment 20000264 PARAMETER Experiment Name: At_Open_Flower_P Parameter: Plant Line Value: WS
  misc_feature: MA Experiment 20000264 PARAMETER Experiment Name: At_Open_Flower_P Parameter: Tissue Value: Open Flower vs. Whole Plant
  misc_feature: MA Experiment ID: 20000441 Result: Up-regulated in Transcription
  misc_feature: MA Experiment 20000441 PARAMETER Experiment Name: At_1uM_BR-BRZ__P Parameter: Tissue Value: Shoot Apices
  misc_feature: MA Experiment 20000441 PARAMETER Experiment Name: At_1uM_BR-BRZ__P Parameter: Treatment Value: 1uM BR vs. No Treatment
  misc_feature: MA Experiment ID: 20000453 Result: Up-regulated in Transcription
  misc_feature: MA Experiment 20000453 PARAMETER Experiment Name: At_100uM_ABA_P Parameter: Age (day) Value: 15
  misc_feature: MA Experiment 20000453 PARAMETER Experiment Name: At_100uM_ABA_P Parameter: Organism Value: A. thaliana
  misc_feature: MA Experiment 20000453 PARAMETER Experiment Name: At_100uM_ABA_P Parameter: Plant Line Value: WS
  misc_feature: MA Experiment 20000453 PARAMETER Experiment Name: At_100uM_ABA_P Parameter: Timepoint (hr) Value: 24
  misc_feature: MA Experiment 20000453 PARAMETER Experiment Name: At_100uM_ABA_P Parameter: Tissue Value: Aerial
  misc_feature: MA Experiment 20000453 PARAMETER Experiment Name: At_100uM_ABA_P Parameter: Treatment Value: 100uM ABA vs. No Treatment
  misc_feature: MA Experiment ID: 20000794 Result: Up-regulated in Transcription
  misc_feature: MA Experiment 20000794 PARAMETER Experiment Name: At_Petals_P Parameter: Age (day) Value: 23-25 days
  misc_feature: MA Experiment 20000794 PARAMETER Experiment Name: At_Petals_P Parameter: Plant Line Value: WS
  misc_feature: MA Experiment 20000794 PARAMETER Experiment Name: At_Petals_P Parameter: Tissue Value: Petals vs. Whole plant
  misc_feature: MA Experiment ID: 20001247 Result: Down-regulated in Transcription
  misc_feature: MA Experiment 20001247 PARAMETER Experiment Name: At_Far-red-induction_P Parameter: Age (day) Value: 7
  misc_feature: MA Experiment 20001247 PARAMETER Experiment Name: At_Far-red-induction_P Parameter: Light Value: Far-red vs. White
  misc_feature: MA Experiment 20001247 PARAMETER Experiment Name: At_Far-red-induction_P Parameter: Organism Value: A. thaliana
  misc_feature: MA Experiment 20001247 PARAMETER Experiment Name: At_Far-red-induction_P Parameter: Plant Line Value: Columbia
  misc_feature: MA Experiment 20001247 PARAMETER Experiment Name: At_Far-red-induction_P Parameter: Timepoint (hr) Value: 1
  misc_feature: MA Experiment 20001247 PARAMETER Experiment Name: At_Far-red-induction_P Parameter: Tissue Value: Whole Plant
aaagagaaaacgtatgagttgcttaaaccataaacctcaagctcaaaattttatcaaccttataaagtttcgttttctcgagattttgaatcttttcagctaaaaaagatcacagctttttgcgttttctggatgagtttgagataagagaagatgaagattcagtgtaacgtttgtgaggcggcggaagcgacggttctatgttgcgccgacgaggctgctctttgttgggcttgcgatgagaaaattcacgccgctaataaactcgccggaaaacatcagagagtccctctctctgcctctgcctcttccatacccaaatgtgacatttgtcaggaagcatctggattcttcttttgtctgcaagatagagctttgctatgtaggaaatgtgatgttgcaatccacactgtgaatcctcatgtttcagctcaccagagattnnttctcactggaatcaaagttggtcttgaatctatagacactggtccttctactaaatcctcacctaccaatgatgataaaaccatggagaccaaaccttttgttcaatctatacctgagcctcaaaagatggccttcgatcatcatcatcaccagcagcagcaggaacagcaggaaggagttataccgggaactaaagtcaatgatcagacatcgacaaagcttcctctcgtaagtagcggatcaactactggaagcattcctcagtggcaaatagaggagattttcgggctaaccgactttgatcagagctatgaatacatggagaataatggatcatctaaggcggatactagtagacgaggagattcagacagttcttcgatgatgagatctgcagaagaagatggagaagataacaataactgcttgggaggtgagacatcatgggcggttccacagattcagtctccacctacagcgtctggtctaaactggcctaagcattttcaccaccactctgtgtttgttccggacataacttcttcaactccttataccggttcatccccgaatcaaagggttgggaaacggcggcgacggttctagcatttgtaattatcttttagccgcttgagaaaagagattggcagctttctcagtagatgtaagatcacataaatgatttggaaacttgtaatgtagtgatctgtgagagtcggtgttctttgttagctgaaaaaacaaaaagatgtttatttggtcg

SEQ ID NO: 22888 - protein, 299 aa, Arabidopsis thaliana
  peptide (1)..(299): Ceres Seq. ID no. 12482647
  misc_feature (1)..(47): Pfam Name: B-box zinc finger Pfam Description: B-box zinc finger
  misc_feature (1)..(108): Homolog of NCBI NO: 30679541 NR Description: salt-tolerance protein [Arabidopsis thaliana]
  misc_feature (1)..(108): Homolog of NCBI NO: 15221367 NR Description: salt-tolerance protein
  misc_feature (1)..(150): Homolog of NCBI NO: 3618314 NR Description: zinc finger protein [Oryza sativa (japonica
  misc_feature (178)..(298): Homolog of NCBI NO: 34903708 NR Description: putative zinc-finger protein
  misc_feature (1)..(140): Homolog of NCBI NO: 34903708 NR Description: putative zinc-finger protein
  misc_feature (1)..(113): Homolog of NCBI NO: 7489603 NR Description: zinc-finger protein R2931 [imported] - rice
  misc_feature (172)..(299): Homolog of NCBI NO: 7489603 NR Description: zinc-finger protein R2931 [imported] - rice
  misc_feature (193)..(299): Homolog of NCBI NO: 17433085 NR Description: Zinc finger protein constans-like 7
  misc_feature (1)..(212): Homolog of NCBI NO: 17433085 NR Description: Zinc finger protein constans-like 7
  misc_feature (1)..(299): Homolog of NCBI NO: 18412037 NR Description: CONSTANS B-box zinc finger family protein
  misc_feature (97)..(97): Xaa is any aa, unknown or other
  misc_feature (98)..(98): Xaa is any aa, unknown or other
MKIQCNVCEAAEATVLCCADEAALCWACDEKIHAANKLAGKHQRVPLSASASSIPKCDICQEASGFFFCLQDRALLCRKCDVAIHTVNPHVSAHQRXXLTGIKVGLESIDTGPSTKSSPTNDDKTMETKPFVQSIPEPQKMAFDHHHHQQQQEQQEGVIPGTKVNDQTSTKLPLVSSGSTTGSIPQWQIEEIFGLTDFDQSYEYMENNGSSKADTSRRGDSDSSSMMRSAEEDGEDNNNCLGGETSWAVPQIQSPPTASGLNWPKHFHHHSVFVPDITSSTPYTGSSPNQRVGKRRRRF

SEQ ID NO: 22889 - protein, 174 aa, Arabidopsis thaliana
  peptide (1)..(174): Ceres Seq. ID no. 12482648
  misc_feature (1)..(133): Homolog of NCBI NO: 15222289 NR Description: CONSTANS B-box zinc finger family protein
  misc_feature (1)..(13): Homolog of NCBI NO: 25408150 NR Description: hypothetical protein At2g31380 [imported] -
  misc_feature (1)..(13): Homolog of NCBI NO: 18402646 NR Description: salt tolerance-like protein
  misc_feature (1)..(25): Homolog of NCBI NO: 3618314 NR Description: zinc finger protein [Oryza sativa (japonica
  misc_feature (53)..(173): Homolog of NCBI NO: 34903708 NR Description: putative zinc-finger protein
  misc_feature (1)..(15): Homolog of NCBI NO: 34903708 NR Description: putative zinc-finger protein
  misc_feature (47)..(174): Homolog of NCBI NO: 7489603 NR Description: zinc-finger protein R2931 [imported] - rice
  misc_feature (68)..(174): Homolog of NCBI NO: 17433085 NR Description: Zinc finger protein constans-like 7
  misc_feature (1)..(87): Homolog of NCBI NO: 17433085 NR Description: Zinc finger protein constans-like 7
  misc_feature (1)..(174): Homolog of NCBI NO: 18412037 NR Description: CONSTANS B-box zinc finger family protein
METKPFVQSIPEPQKMAFDHHHHQQQQEQQEGVIPGTKVNDQTSTKLPLVSSGSTTGSIPQWQIEEIFGLTDFDQSYEYMENNGSSKADTSRRGDSDSSSMMRSAEEDGEDNNNCLGGETSWAVPQIQSPPTASGLNWPKHFHHHSVFVPDITSSTPYTGSSPNQRVGKRRRRF

SEQ ID NO: 22890 - protein, 159 aa, Arabidopsis thaliana
  peptide (1)..(159): Ceres Seq. ID no. 12482649
  misc_feature (38)..(158): Homolog of NCBI NO: 34903708 NR Description: putative zinc-finger protein
  misc_feature (32)..(159): Homolog of NCBI NO: 7489603 NR Description: zinc-finger protein R2931 [imported] - rice
  misc_feature (53)..(159): Homolog of NCBI NO: 17433085 NR Description: Zinc finger protein constans-like 7
  misc_feature (1)..(72): Homolog of NCBI NO: 17433085 NR Description: Zinc finger protein constans-like 7
  misc_feature (1)..(159): Homolog of NCBI NO: 18412037 NR Description: CONSTANS B-box zinc finger family protein
  misc_feature (1)..(18): Homolog of NCBI NO: 22854952 NR Description: COL1 protein [Brassica nigra]
  misc_feature (1)..(118): Homolog of NCBI NO: 15222289 NR Description: CONSTANS B-box zinc finger family protein
MAFDHHHHQQQQEQQEGVIPGTKVNDQTSTKLPLVSSGSTTGSIPQWQIEEIFGLTDFDQSYEYMENNGSSKADTSRRGDSDSSSMMRSAEEDGEDNNNCLGGETSWAVPQIQSPPTASGLNWPKHFHHHSVFVPDITSSTPYTGSSPNQRVGKRRRRF

SEQ ID NO: 22891 - DNA, 2017 bp, Arabidopsis thaliana
  misc_feature (1)..(2017): Ceres Seq. ID no. 13497447
  misc_feature: MA Experiment ID: 108463 Result: Up-regulated in Transcription
  misc_feature: MA Experiment 108463 PARAMETER Experiment Name: At_Germinating_Seeds_cDNA_P Parameter: Age (day) Value: 3 vs. 0
  misc_feature: MA Experiment 108463 PARAMETER Experiment Name: At_Germinating_Seeds_cDNA_P Parameter: Tissue Value: Germinating Seeds
  misc_feature: MA Experiment ID: 108464 Result: Up-regulated in Transcription
  misc_feature: MA Experiment 108464 PARAMETER Experiment Name: At_Germinating_Seeds_cDNA_P Parameter: Age (day) Value: 4 vs. 0
  misc_feature: MA Experiment 108464 PARAMETER Experiment Name: At_Germinating_Seeds_cDNA_P Parameter: Tissue Value: Germinating Seeds
  misc_feature: MA Experiment ID: 20000286 Result: Up-regulated in Transcription
  misc_feature: MA Experiment 20000286 PARAMETER Experiment Name: At_Open_Flower_P Parameter: Age (day) Value: 21
  misc_feature: MA Experiment 20000286 PARAMETER Experiment Name: At_Open_Flower_P Parameter: Plant Line Value: WS
  misc_feature: MA Experiment 20000286 PARAMETER Experiment Name: At_Open_Flower_P Parameter: Tissue Value: Half Open vs. Whole Plant
  misc_feature: MA Experiment ID: 20000573 Result: Down-regulated in Transcription
  misc_feature: MA Experiment 20000573 PARAMETER Experiment Name: At_100uM_ABA_Mutants__P Parameter: Organism Value: A. thaliana
  misc_feature: MA Experiment 20000573 PARAMETER Experiment Name: At_100uM_ABA_Mutants__P Parameter: Plant Line Value: CS22 vs. Ler wt
  misc_feature: MA Experiment 20000573 PARAMETER Experiment Name: At_100uM_ABA_Mutants__P Parameter: Timepoint (hr) Value: N/A
  misc_feature: MA Experiment 20000573 PARAMETER Experiment Name: At_100uM_ABA_Mutants__P Parameter: Tissue Value: Whole Plant
  misc_feature: MA Experiment 20000573 PARAMETER Experiment Name: At_100uM_ABA_Mutants__P Parameter: Treatment Value: None
  misc_feature: MA Experiment ID: 20000574 Result: Down-regulated in Transcription
  misc_feature: MA Experiment 20000574 PARAMETER Experiment Name: At_100uM_ABA_Mutants__P Parameter: Organism Value: A. thaliana
  misc_feature: MA Experiment 20000574 PARAMETER Experiment Name: At_100uM_ABA_Mutants__P Parameter: Plant Line Value: CS23 vs. Ler wt
  misc_feature: MA Experiment 20000574 PARAMETER Experiment Name: At_100uM_ABA_Mutants__P Parameter: Timepoint (hr) Value: N/A
  misc_feature: MA Experiment 20000574 PARAMETER Experiment Name: At_100uM_ABA_Mutants__P Parameter: Tissue Value: Whole Plant
  misc_feature: MA Experiment 20000574 PARAMETER Experiment Name: At_100uM_ABA_Mutants__P Parameter: Treatment Value: None
atatatccaaacaaatgaatgtgttaaaccttcactcttctctccacacaaaattcaaaaacctcacatttcacttctctcttctcgcttcttctagatctcaccggtttatctagctccggtttgattcatctccggttatggggagagaatgaggagttaccgttttagtgattatctacacatgtctgtttcattctctaacgatatggatttgttttgtggagaagactccggtgtgttttccggtgagtcaacggttgatttctcgtcttccgaggttgattcatggcctggtgattctatcgcttgttttatcgaagacgagcgtcacttcgttcctggacatgattatctctctagatttcaaactcgatctctcgatgcttccgctagagaagattccgtcgcatggattctcaaggtacaagcgtattataactttcagcctttaacggcgtacctcgccgttaactatatggatcggtttctttacgctcgtcgattaccggaaacgagtggttggccaatgcaacttttagcagtggcatgcttgtctttagctgcaaagatggaggaaattctcgttccttctctttttgattttcaggttgcaggagtgaagtatttatttgaagcaaaaactataaaaagaatggaacttcttgttctaagtgtgttagattggagactaagatcggttacaccgtttgatttcattagcttctttgcttacaagatcgatccttcgggtacctttctcgggttctttatctcccatgctacagagattatactctccaacataaaagaagcgagctttcttgagtactggccatcgagtatagctgcagccgcgattctctgtgtagcgaacgagttaccttctctatcctctgttgtcaatccccacgagagccctgagacttggtgtgacggattgagcaaagagaagatagtgagatgctatagactgatgaaagcgatggccatcgagaataaccggttaaatacaccaaaagtgatagcaaagcttcgagtgagtgtaagggcatcatcgacgttaacaaggccaagtgatgaatcctctttctcatcctcttctccttgtaaaaggagaaaattaagtggctattcatgggtaggtgatgaaacatctacctctaattaaaatttggggagtgaaagtagaggaccaaggaaacaaaacctagaagaaaaaaaaccctcttctgtttaagtagagtatattttttaacaagtacatagtaataagggagtgatgaagaaaagtaaaagtgtttattggctgagttaaagtaattaagagttttccaaccaaggggaaggaataagagttttggttacaatttcttttatggaaagggtaaaaattgggttttggggttggttggttggttgggagagacgaagctcatcattaatggctttgcagattcccaagaaagcaaaatgagtaagtgagtgtaacacacacgtgttagagaaaagatatgatcatgtgagtgtgtgtgtgtgagagagagagagaagagtatttgcattagagtcctcatcacacaggtactgatggataagacaggggagcgtttgcaaaagatttgtgagtggagatttttctgagctctttgtcttaatggatcgcagcagttcatgggacccttcctcagcttcatcatcaaacaaaaaaaaaatcaagttgcgaagtatatataatttgtttttttgtttggatttttaagatttttgattccttgtgtgtgacttcacgtgacggaggcgtgtgtctcacgtgtttgttttctcttcaaatcttttattttggcgggaaattttgtgtttttgatttctacgtattcgtggactccaaatgagttttgtcacggtgcgttttagtagcgtttgcatgcgtgtaaggtgtcacgtatgtgtatatatatgatttttttttggtttcttgaaaggttgaattttataaataaaacgtttctattat

SEQ ID NO: 22892 - protein, 339 aa, Arabidopsis thaliana
  peptide (1)..(339): Ceres Seq. ID no. 13497448
  misc_feature (50)..(182): Pfam Name: Cyclin, N-terminal domain Pfam Description: Cyclin, N-terminal domain
  misc_feature (50)..(320): Homolog of NCBI NO: 7484663 NR Description: cyclin D-like protein - red goosefoot
  misc_feature (43)..(120): Homolog of NCBI NO: 34904924 NR Description: putative cyclin delta-1 [Oryza sativa (japonica
  misc_feature (129)..(325): Homolog of NCBI NO: 34904924 NR Description: putative cyclin delta-1 [Oryza sativa (japonica
  misc_feature (18)..(313): Homolog of NCBI NO: 25809160 NR Description: cyclin D protein [Physcomitrella patens]
  misc_feature (1)..(120): Homolog of NCBI NO: 17154787 NR Description: cyclin D1 [Arabidopsis thaliana]
  misc_feature (12)..(339): Homolog of NCBI NO: 6448480 NR Description: cyclin D1 [Antirrhinum majus]
  misc_feature (12)..(334): Homolog of NCBI NO: 25989347 NR Description: cyclin D1 [Helianthus tuberosus]
  misc_feature (1)..(339): Homolog of NCBI NO: 1076311 NR Description: cyclin delta-1 - Arabidopsis thaliana
  misc_feature (1)..(339): Homolog of NCBI NO: 3915635 NR Description: Cyclin delta-1
  misc_feature (1)..(339): Homolog of NCBI NO: 15223075 NR Description: cyclin delta-1 (CYCD1) [Arabidopsis thaliana]
MRSYRFSDYLHMSVSFSNDMDLFCGEDSGVFSGESTVDFSSSEVDSWPGDSIACFIEDERHFVPGHDYLSRFQTRSLDASAREDSVAWILKVQAYYNFQPLTAYLAVNYMDRFLYARRLPETSGWPMQLLAVACLSLAAKMEEILVPSLFDFQVAGVKYLFEAKTIKRMELLVLSVLDWRLRSVTPFDFISFFAYKIDPSGTFLGFFISHATEIILSNIKEASFLEYWPSSIAAAAILCVANELPSLSSVVNPHESPETWCDGLSKEKIVRCYRLMKAMAIENNRLNTPKVIAKLRVSVRASSTLTRPSDESSFSSSSPCKRRKLSGYSWVGDETSTSN

SEQ ID NO: 22893 - protein, 328 aa, Arabidopsis thaliana
  peptide (1)..(328): Ceres Seq. ID no. 13497449
  misc_feature (39)..(171): Pfam Name: Cyclin, N-terminal domain Pfam Description: Cyclin, N-terminal domain
  misc_feature (39)..(309): Homolog of NCBI NO: 7484663 NR Description: cyclin D-like protein - red goosefoot
  misc_feature (32)..(109): Homolog of NCBI NO: 34904924 NR Description: putative cyclin delta-1 [Oryza sativa (japonica
  misc_feature (118)..(314): Homolog of NCBI NO: 34904924 NR Description: putative cyclin delta-1 [Oryza sativa (japonica
  misc_feature (7)..(302): Homolog of NCBI NO: 25809160 NR Description: cyclin D protein [Physcomitrella patens]
  misc_feature (1)..(109): Homolog of NCBI NO: 17154787 NR Description: cyclin D1 [Arabidopsis thaliana]
  misc_feature (1)..(328): Homolog of NCBI NO: 6448480 NR Description: cyclin D1 [Antirrhinum majus]
  misc_feature (1)..(323): Homolog of NCBI NO: 25989347 NR Description: cyclin D1 [Helianthus tuberosus]
  misc_feature (1)..(328): Homolog of NCBI NO: 1076311 NR Description: cyclin delta-1 - Arabidopsis thaliana
  misc_feature (1)..(328): Homolog of NCBI NO: 3915635 NR Description: Cyclin delta-1
  misc_feature (1)..(328): Homolog of NCBI NO: 15223075 NR Description: cyclin delta-1 (CYCD1) [Arabidopsis thaliana]
MSVSFSNDMDLFCGEDSGVFSGESTVDFSSSEVDSWPGDSIACFIEDERHFVPGHDYLSRFQTRSLDASAREDSVAWILKVQAYYNFQPLTAYLAVNYMDRFLYARRLPETSGWPMQLLAVACLSLAAKMEEILVPSLFDFQVAGVKYLFEAKTIKRMELLVLSVLDWRLRSVTPFDFISFFAYKIDPSGTFLGFFISHATEIILSNIKEASFLEYWPSSIAAAAILCVANELPSLSSVVNPHESPETWCDGLSKEKIVRCYRLMKAMAIENNRLNTPKVIAKLRVSVRASSTLTRPSDESSFSSSSPCKRRKLSGYSWVGDETSTSN

SEQ ID NO: 22894 - protein, 320 aa, Arabidopsis thaliana
  peptide (1)..(320): Ceres Seq. ID no. 13497450
  misc_feature (31)..(163): Pfam Name: Cyclin, N-terminal domain Pfam Description: Cyclin, N-terminal domain
  misc_feature (31)..(301): Homolog of NCBI NO: 7484663 NR Description: cyclin D-like protein - red goosefoot
  misc_feature (24)..(101): Homolog of NCBI NO: 34904924 NR Description: putative cyclin delta-1 [Oryza sativa (japonica
  misc_feature (110)..(306): Homolog of NCBI NO: 34904924 NR Description: putative cyclin delta-1 [Oryza sativa (japonica
  misc_feature (1)..(294): Homolog of NCBI NO: 25809160 NR Description: cyclin D protein [Physcomitrella patens]
  misc_feature (1)..(101): Homolog of NCBI NO: 17154787 NR Description: cyclin D1 [Arabidopsis thaliana]
  misc_feature (1)..(320): Homolog of NCBI NO: 6448480 NR Description: cyclin D1 [Antirrhinum majus]
  misc_feature (1)..(315): Homolog of NCBI NO: 25989347 NR Description: cyclin D1 [Helianthus tuberosus]
  misc_feature (1)..(320): Homolog of NCBI NO: 1076311 NR Description: cyclin delta-1 - Arabidopsis thaliana
  misc_feature (1)..(320): Homolog of NCBI NO: 3915635 NR Description: Cyclin delta-1
  misc_feature (1)..(320): Homolog of NCBI NO: 15223075 NR Description: cyclin delta-1 (CYCD1) [Arabidopsis thaliana]
MDLFCGEDSGVFSGESTVDFSSSEVDSWPGDSIACFIEDERHFVPGHDYLSRFQTRSLDASAREDSVAWILKVQAYYNFQPLTAYLAVNYMDRFLYARRLPETSGWPMQLLAVACLSLAAKMEEILVPSLFDFQVAGVKYLFEAKTIKRMELLVLSVLDWRLRSVTPFDFISFFAYKIDPSGTFLGFFISHATEIILSNIKEASFLEYWPSSIAAAAILCVANELPSLSSVVNPHESPETWCDGLSKEKIVRCYRLMKAMAIENNRLNTPKVIAKLRVSVRASSTLTRPSDESSFSSSSPCKRRKLSGYSWVGDETSTSN

SEQ ID NO: 22895 - DNA, 1298 bp, Arabidopsis thaliana
  misc_feature (1)..(1298): Ceres Seq. ID no. 12339159
  misc_feature: MA Experiment ID: 20000171 Result: Down-regulated in Transcription
  misc_feature: MA Experiment 20000171 PARAMETER Experiment Name: At_42deg_Heat_P Parameter: Age (day) Value: 14
  misc_feature: MA Experiment 20000171 PARAMETER Experiment Name: At_42deg_Heat_P Parameter: Organism Value: A. thaliana
  misc_feature: MA Experiment 20000171 PARAMETER Experiment Name: At_42deg_Heat_P Parameter: Plant Line Value: WS
  misc_feature: MA Experiment 20000171 PARAMETER Experiment Name: At_42deg_Heat_P Parameter: Temperature (deg C) Value: 42 vs. 22
  misc_feature: MA Experiment 20000171 PARAMETER Experiment Name: At_42deg_Heat_P Parameter: Timepoint (hr) Value: 1
  misc_feature: MA Experiment 20000171 PARAMETER Experiment Name: At_42deg_Heat_P Parameter: Tissue Value: Aerial
  misc_feature: MA Experiment ID: 20000173 Result: Down-regulated in Transcription
  misc_feature: MA Experiment 20000173 PARAMETER Experiment Name: At_42deg_Heat_P Parameter: Age (day) Value: 14
  misc_feature: MA Experiment 20000173 PARAMETER Experiment Name: At_42deg_Heat_P Parameter: Organism Value: A. thaliana
  misc_feature: MA Experiment 20000173 PARAMETER Experiment Name: At_42deg_Heat_P Parameter: Plant Line Value: WS
  misc_feature: MA Experiment 20000173 PARAMETER Experiment Name: At_42deg_Heat_P Parameter: Temperature (deg C) Value: 42 vs. 22
  misc_feature: MA Experiment 20000173 PARAMETER Experiment Name: At_42deg_Heat_P Parameter: Timepoint (hr) Value: 6
  misc_feature: MA Experiment 20000173 PARAMETER Experiment Name: At_42deg_Heat_P Parameter: Tissue Value: Aerial
  misc_feature: MA Experiment ID: 20000184 Result: Up-regulated in Transcription
  misc_feature: MA Experiment 20000184 PARAMETER Experiment Name: At_Shoots__P Parameter: Age (day) Value: 7
  misc_feature: MA Experiment 20000184 PARAMETER Experiment Name: At_Shoots__P Parameter: Tissue Value: Shoots vs. Whole Plant
  misc_feature: MA Experiment ID: 20000185 Result: Down-regulated in Transcription
  misc_feature: MA Experiment 20000185 PARAMETER Experiment Name: At_Roots__P Parameter: Age (day) Value: 7 vs. 21
  misc_feature: MA Experiment 20000185 PARAMETER Experiment Name: At_Roots__P Parameter: Organism Value: A. thaliana
  misc_feature: MA Experiment 20000185 PARAMETER Experiment Name: At_Roots__P Parameter: Tissue Value: Roots vs. Whole Plant
  misc_feature: MA Experiment ID: 20000227 Result: Up-regulated in Transcription
  misc_feature: MA Experiment 20000227 PARAMETER Experiment Name: At_Root-Tips-vs-Tops_P Parameter: Tissue Value: Root Tips vs. Root Tops
  misc_feature: MA Experiment ID: 20000437 Result: Down-regulated in Transcription
  misc_feature: MA Experiment 20000437 PARAMETER Experiment Name: At_Drought_P Parameter: Age (day) Value: 8
  misc_feature: MA Experiment 20000437 PARAMETER Experiment Name: At_Drought_P Parameter: Organism Value: A. thaliana
  misc_feature: MA Experiment 20000437 PARAMETER Experiment Name: At_Drought_P Parameter: Plant Line Value: WS
  misc_feature: MA Experiment 20000437 PARAMETER Experiment Name: At_Drought_P Parameter: Timepoint (hr) Value: 24
  misc_feature: MA Experiment 20000437 PARAMETER Experiment Name: At_Drought_P Parameter: Tissue Value: Whole Plant
  misc_feature: MA Experiment 20000437 PARAMETER Experiment Name: At_Drought_P Parameter: Treatment Value: Drought vs. No Drought
  misc_feature: MA Experiment ID: 20000439 Result: Down-regulated in Transcription
  misc_feature: MA Experiment 20000439 PARAMETER Experiment Name: At_Roots__P Parameter: Age (day) Value: 14 vs. 21
  misc_feature: MA Experiment 20000439 PARAMETER Experiment Name: At_Roots__P Parameter: Organism Value: A. thaliana
  misc_feature: MA Experiment 20000439 PARAMETER Experiment Name: At_Roots__P Parameter: Tissue Value: Roots vs. Whole Plant
  misc_feature: MA Experiment ID: 20000452 Result: Down-regulated in Transcription
  misc_feature: MA Experiment 20000452 PARAMETER Experiment Name: At_CS6879_Shoots-Roots_P Parameter: Age (day) Value: 14
  misc_feature: MA Experiment 20000452 PARAMETER Experiment Name: At_CS6879_Shoots-Roots_P Parameter: Organism Value: A. thaliana
  misc_feature: MA Experiment 20000452 PARAMETER Experiment Name: At_CS6879_Shoots-Roots_P Parameter: Plant Line Value: CS6879 vs. WS
  misc_feature: MA Experiment 20000452 PARAMETER Experiment Name: At_CS6879_Shoots-Roots_P Parameter: Tissue Value: Shoots
  misc_feature: MA Experiment ID: 20000794 Result: Down-regulated in Transcription
  misc_feature: MA Experiment 20000794 PARAMETER Experiment Name: At_Petals_P Parameter: Age (day) Value: 23-25 days
  misc_feature: MA Experiment 20000794 PARAMETER Experiment Name: At_Petals_P Parameter: Plant Line Value: WS
  misc_feature: MA Experiment 20000794 PARAMETER Experiment Name: At_Petals_P Parameter: Tissue Value: Petals vs. Whole plant
  misc_feature: MA Experiment ID: 20001247 Result: Up-regulated in Transcription
  misc_feature: MA Experiment 20001247 PARAMETER Experiment Name: At_Far-red-induction_P Parameter: Age (day) Value: 7
  misc_feature: MA Experiment 20001247 PARAMETER Experiment Name: At_Far-red-induction_P Parameter: Light Value: Far-red vs. White
  misc_feature: MA Experiment 20001247 PARAMETER Experiment Name: At_Far-red-induction_P Parameter: Organism Value: A. thaliana
  misc_feature: MA Experiment 20001247 PARAMETER Experiment Name: At_Far-red-induction_P Parameter: Plant Line Value: Columbia
  misc_feature: MA Experiment 20001247 PARAMETER Experiment Name: At_Far-red-induction_P Parameter: Timepoint (hr) Value: 1
  misc_feature: MA Experiment 20001247 PARAMETER Experiment Name: At_Far-red-induction_P Parameter: Tissue Value: Whole Plant
  misc_feature: MA Experiment ID: 20001450 Result: Up-regulated in Transcription
  misc_feature: MA Experiment 20001450 PARAMETER Experiment Name: At_Far-red-induction_P Parameter: Age (day) Value: 7
  misc_feature: MA Experiment 20001450 PARAMETER Experiment Name: At_Far-red-induction_P Parameter: Light Value: Far-red vs. White
  misc_feature: MA Experiment 20001450 PARAMETER Experiment Name: At_Far-red-induction_P Parameter: Organism Value: A. thaliana
  misc_feature: MA Experiment 20001450 PARAMETER Experiment Name: At_Far-red-induction_P Parameter: Plant Line Value: Columbia
  misc_feature: MA Experiment 20001450 PARAMETER Experiment Name: At_Far-red-induction_P Parameter: Timepoint (hr) Value: 8
  misc_feature: MA Experiment 20001450 PARAMETER Experiment Name: At_Far-red-induction_P Parameter: Tissue Value: Whole Plant
  misc_feature: MA Experiment ID: 20001451 Result: Up-regulated in Transcription
  misc_feature: MA Experiment 20001451 PARAMETER Experiment Name: At_Far-red-induction_P Parameter: Age (day) Value: 7
  misc_feature: MA Experiment 20001451 PARAMETER Experiment Name: At_Far-red-induction_P Parameter: Light Value: Far-red vs. White
  misc_feature: MA Experiment 20001451 PARAMETER Experiment Name: At_Far-red-induction_P Parameter: Organism Value: A. thaliana
  misc_feature: MA Experiment 20001451 PARAMETER Experiment Name: At_Far-red-induction_P Parameter: Plant Line Value: Columbia
  misc_feature: MA Experiment 20001451 PARAMETER Experiment Name: At_Far-red-induction_P Parameter: Timepoint (hr) Value: 24
  misc_feature: MA Experiment 20001451 PARAMETER Experiment Name: At_Far-red-induction_P Parameter: Tissue Value: Whole Plant
  misc_feature: MA Experiment ID: 20001554 Result: Down-regulated in Transcription
  misc_feature: MA Experiment 20001554 PARAMETER Experiment Name: At_Drought_Soil_Dry_P Parameter: Age (day) Value: 21
  misc_feature: MA Experiment 20001554 PARAMETER Experiment Name: At_Drought_Soil_Dry_P Parameter: Organism Value: A. thaliana
  misc_feature: MA Experiment 20001554 PARAMETER Experiment Name: At_Drought_Soil_Dry_P Parameter: Plant Line Value: WS
  misc_feature: MA Experiment 20001554 PARAMETER Experiment Name: At_Drought_Soil_Dry_P Parameter: Post Timepoint (hr) Value: None
  misc_feature: MA Experiment 20001554 PARAMETER Experiment Name: At_Drought_Soil_Dry_P Parameter: Post-Treatment Value: None
  misc_feature: MA Experiment 20001554 PARAMETER Experiment Name: At_Drought_Soil_Dry_P Parameter: Timepoint (day) Value: 7
  misc_feature: MA Experiment 20001554 PARAMETER Experiment Name: At_Drought_Soil_Dry_P Parameter: Treatment Value: Drought vs. No Drought
  misc_feature: MA Experiment ID: 20001555 Result: Down-regulated in Transcription
  misc_feature: MA Experiment 20001555 PARAMETER Experiment Name: At_Drought_Soil_Dry_P Parameter: Age (day) Value: 24
  misc_feature: MA Experiment 20001555 PARAMETER Experiment Name: At_Drought_Soil_Dry_P Parameter: Organism Value: A. thaliana
  misc_feature: MA Experiment 20001555 PARAMETER Experiment Name: At_Drought_Soil_Dry_P Parameter: Plant Line Value: WS
  misc_feature: MA Experiment 20001555 PARAMETER Experiment Name: At_Drought_Soil_Dry_P Parameter: Post Timepoint (hr) Value: None
  misc_feature: MA Experiment 20001555 PARAMETER Experiment Name: At_Drought_Soil_Dry_P Parameter: Post-Treatment Value: None
  misc_feature: MA Experiment 20001555 PARAMETER Experiment Name: At_Drought_Soil_Dry_P Parameter: Timepoint (day) Value: 10
  misc_feature: MA Experiment 20001555 PARAMETER Experiment Name: At_Drought_Soil_Dry_P Parameter: Treatment Value: Drought vs. No Drought
  misc_feature: MA Experiment ID: 20001556 Result: Down-regulated in Transcription
  misc_feature: MA Experiment 20001556 PARAMETER Experiment Name: At_Drought_Soil_Dry_P Parameter: Age (day) Value: 26
  misc_feature: MA Experiment 20001556 PARAMETER Experiment Name: At_Drought_Soil_Dry_P Parameter: Organism Value: A. thaliana
  misc_feature: MA Experiment 20001556 PARAMETER Experiment Name: At_Drought_Soil_Dry_P Parameter: Plant Line Value: WS
  misc_feature: MA Experiment 20001556 PARAMETER Experiment Name: At_Drought_Soil_Dry_P Parameter: Post Timepoint (hr) Value: None
  misc_feature: MA Experiment 20001556 PARAMETER Experiment Name: At_Drought_Soil_Dry_P Parameter: Post-Treatment Value: None
  misc_feature: MA Experiment 20001556 PARAMETER Experiment Name: At_Drought_Soil_Dry_P Parameter: Timepoint (day) Value: 12
  misc_feature: MA Experiment 20001556 PARAMETER Experiment Name: At_Drought_Soil_Dry_P Parameter: Treatment Value: Drought vs. No Drought
  misc_feature: MA Experiment ID: 20001557 Result: Up-regulated in Transcription
  misc_feature: MA Experiment 20001557 PARAMETER Experiment Name: At_Drought_Soil_Dry_P Parameter: Age (day) Value: 27
  misc_feature: MA Experiment 20001557 PARAMETER Experiment Name: At_Drought_Soil_Dry_P Parameter: Organism Value: A. thaliana
  misc_feature: MA Experiment 20001557 PARAMETER Experiment Name: At_Drought_Soil_Dry_P Parameter: Plant Line Value: WS
  misc_feature: MA Experiment 20001557 PARAMETER Experiment Name: At_Drought_Soil_Dry_P Parameter: Post Timepoint (hr) Value: 3
  misc_feature: MA Experiment 20001557 PARAMETER Experiment Name: At_Drought_Soil_Dry_P Parameter: Post-Treatment Value: Re-Water vs. No Drought
  misc_feature: MA Experiment 20001557 PARAMETER Experiment Name: At_Drought_Soil_Dry_P Parameter: Timepoint (day) Value: 13
  misc_feature: MA Experiment 20001557 PARAMETER Experiment Name: At_Drought_Soil_Dry_P Parameter: Treatment Value: Drought vs. No Drought
  misc_feature: MA Experiment ID: 20001558 Result: Up-regulated in Transcription
  misc_feature: MA Experiment 20001558 PARAMETER Experiment Name: At_Drought_Soil_Dry_P Parameter: Age (day) Value: 27
  misc_feature: MA Experiment 20001558 PARAMETER Experiment Name: At_Drought_Soil_Dry_P Parameter: Organism Value: A. thaliana
  misc_feature: MA Experiment 20001558 PARAMETER Experiment Name: At_Drought_Soil_Dry_P Parameter: Plant Line Value: WS
  misc_feature: MA Experiment 20001558 PARAMETER Experiment Name: At_Drought_Soil_Dry_P Parameter: Post Timepoint (hr) Value: 6
  misc_feature: MA Experiment 20001558 PARAMETER Experiment Name: At_Drought_Soil_Dry_P Parameter: Post-Treatment Value: Re-Water vs. No Drought
  misc_feature: MA Experiment 20001558 PARAMETER Experiment Name: At_Drought_Soil_Dry_P Parameter: Timepoint (day) Value: 13
  misc_feature: MA Experiment 20001558 PARAMETER Experiment Name: At_Drought_Soil_Dry_P Parameter: Treatment Value: Drought vs. No Drought
  misc_feature: MA Experiment ID: 20001560 Result: Up-regulated in Transcription
  misc_feature: MA Experiment 20001560 PARAMETER Experiment Name: At_Drought_Soil_Dry_P Parameter: Age (day) Value: 28
  misc_feature: MA Experiment 20001560 PARAMETER Experiment Name: At_Drought_Soil_Dry_P Parameter: Organism Value: A. thaliana
  misc_feature: MA Experiment 20001560 PARAMETER Experiment Name: At_Drought_Soil_Dry_P Parameter: Plant Line Value: WS
  misc_feature: MA Experiment 20001560 PARAMETER Experiment Name: At_Drought_Soil_Dry_P Parameter: Post Timepoint (hr) Value: None
  misc_feature: MA Experiment 20001560 PARAMETER Experiment Name: At_Drought_Soil_Dry_P Parameter: Post-Treatment Value: None
  misc_feature: MA Experiment 20001560 PARAMETER Experiment Name: At_Drought_Soil_Dry_P Parameter: Timepoint (day) Value: 14
  misc_feature: MA Experiment 20001560 PARAMETER Experiment Name: At_Drought_Soil_Dry_P Parameter: Treatment Value: Drought vs. No Drought
  misc_feature: MA Experiment ID: 20001757 Result: Up-regulated in Transcription
  misc_feature: MA Experiment 20001757 PARAMETER Experiment Name: At_50mM_NH4NO3_L-to-H_P Parameter: Timepoint (hr) Value: 6
  misc_feature: MA Experiment 20001757 PARAMETER Experiment Name: At_50mM_NH4NO3_L-to-H_P Parameter: Tissue Value: Leaf
  misc_feature: MA Experiment 20001757 PARAMETER Experiment Name: At_50mM_NH4NO3_L-to-H_P Parameter: Treatment Value: 50mM NH4NO3 vs 100mM Mannitol
  misc_feature: MA Experiment ID: 20001904 Result: Down-regulated in Transcription
  misc_feature: MA Experiment 20001904 PARAMETER Experiment Name: At_Drought_Reproduction_P Parameter: Age (day) Value: 37
  misc_feature: MA Experiment 20001904 PARAMETER Experiment Name: At_Drought_Reproduction_P Parameter: Organism Value: A. thaliana
  misc_feature: MA Experiment 20001904 PARAMETER Experiment Name: At_Drought_Reproduction_P Parameter: Plant Line Value: WS
  misc_feature: MA Experiment 20001904 PARAMETER Experiment Name: At_Drought_Reproduction_P Parameter: Timepoint (day) Value: 7
  misc_feature: MA Experiment 20001904 PARAMETER Experiment Name: At_Drought_Reproduction_P Parameter: Tissue Value: Rosettes
  misc_feature: MA Experiment 20001904 PARAMETER Experiment Name: At_Drought_Reproduction_P Parameter: Treatment Value: Drought vs. No Drought
  misc_feature: MA Experiment ID: 20001905 Result: Down-regulated in Transcription
  misc_feature: MA Experiment 20001905 PARAMETER Experiment Name: At_Drought_Reproduction_P Parameter: Age (day) Value: 40
  misc_feature: MA Experiment 20001905 PARAMETER Experiment Name: At_Drought_Reproduction_P Parameter: Organism Value: A. thaliana
  misc_feature: MA Experiment 20001905 PARAMETER Experiment Name: At_Drought_Reproduction_P Parameter: Plant Line Value: WS
  misc_feature: MA Experiment 20001905 PARAMETER Experiment Name: At_Drought_Reproduction_P Parameter: Timepoint (day) Value: 10
  misc_feature: MA Experiment 20001905 PARAMETER Experiment Name: At_Drought_Reproduction_P Parameter: Tissue Value: Rosettes
  misc_feature: MA Experiment 20001905 PARAMETER Experiment Name: At_Drought_Reproduction_P Parameter: Treatment Value: Drought vs. No Drought
  misc_feature: MA Experiment ID: 20001906 Result: Down-regulated in Transcription
  misc_feature: MA Experiment 20001906 PARAMETER Experiment Name: At_Drought_Reproduction_P Parameter: Age (day) Value: 35
  misc_feature: MA Experiment 20001906 PARAMETER Experiment Name: At_Drought_Reproduction_P Parameter: Organism Value: A. thaliana
  misc_feature: MA Experiment 20001906 PARAMETER Experiment Name: At_Drought_Reproduction_P Parameter: Plant Line Value: WS
  misc_feature: MA Experiment 20001906 PARAMETER Experiment Name: At_Drought_Reproduction_P Parameter: Timepoint (day) Value: 5
  misc_feature: MA Experiment 20001906 PARAMETER Experiment Name: At_Drought_Reproduction_P Parameter: Tissue Value: Siliques
  misc_feature: MA Experiment 20001906 PARAMETER Experiment Name: At_Drought_Reproduction_P Parameter: Treatment Value: Drought vs. No Drought
  misc_feature: MA Experiment ID: 20001911 Result: Down-regulated in Transcription
  misc_feature: MA Experiment 20001911 PARAMETER Experiment Name: At_Drought_Reproduction_P Parameter: Age (day) Value: 40
  misc_feature: MA Experiment 20001911 PARAMETER Experiment Name: At_Drought_Reproduction_P Parameter: Organism Value: A. thaliana
  misc_feature: MA Experiment 20001911 PARAMETER Experiment Name: At_Drought_Reproduction_P Parameter: Plant Line Value: WS
  misc_feature: MA Experiment 20001911 PARAMETER Experiment Name: At_Drought_Reproduction_P Parameter: Timepoint (day) Value: 10
  misc_feature: MA Experiment 20001911 PARAMETER Experiment Name: At_Drought_Reproduction_P Parameter: Tissue Value: Flowers
  misc_feature: MA Experiment 20001911 PARAMETER Experiment Name: At_Drought_Reproduction_P Parameter: Treatment Value: Drought vs. No Drought
aaaaaaagagacttaaaactctctctctctctctcttggtcttcctcactcttaacgaaaatggactctttaacactcttcttcaccggtgcactcgtcgccgtcggtatctactggttcctctgcgttctcggtccagcagagcgtaaaggcaaacgagccgtagatctctctggtggctcaatctccgccgagaaagtccaagacaactacaaacagtactggtctttcttccgccgtccaaaagaaatcgaaaccgccgagaaagttccagacttcgtcgacacattctacaatctcgtcaccgacatatacgagtggggatggggacaatccttccacttctcaccatcaatccccggaaaatctcacaaagacgccacgcgcctccacgaagagatggccgtagatctgatccaagtcaaacctggtcaaaagatcctagacgtcggatgcggtgtcggcggtccgatgcgagcgattgcatctcactcgcgagctaacgtagtcgggattacaataacgagtatcaggtgaacagagctcgtctccacaataagaaagctggtctcgacgcgctttgcgaggtcgtgtgtggtaacttcctccagatgccgttcgatgacaacagtttcgacggtgcttattccatcgaagccacgtgtcacgcgccgaagctggaagaagtgtacgcagagatctacagggtgttgaaacccggatctatgtatgtgtcgtacgagtgggttacgacggagaaatttaaggcggaggatgacgaacacgtggaggtaatccaagggattgagagaggcgatgcgttaccagggcttagggcttacgtggatatagctgagacggctaaaaaggttgggtttgagatagtgaaggagaaggatctggcgagtccaccggctgagccgtggtggactaggcttaagatgggtaggcttgcttattggaggaatcacattgtggttcagattttgtcagcggttggagttgctcctaaaggaactgttgatgttcatgagatgttgtttaagactgctgattatttgaccagaggaggtgaaaccggaatattctctccgatgcatatgattctctgcagaaaaccggagtcaccggaggagagttcttgagaaaggtagaaaggaaacatcaccggaaaaagtatggagaattttctcaatttgtttttatttttaagttaaatcaacttggttattgtactatttttgtgttttaatttggtttgtgtttcaagaattattagtttttttttgttttgttgc

SEQ ID NO: 22896 - protein, 178 aa, Arabidopsis thaliana
  peptide (1)..(178): Ceres Seq. ID no. 12339161
  misc_feature (21)..(174): Homolog of NCBI NO: 3560533 NR Description: 24-methylene lophenol C24(1)methyltransferase
  misc_feature (29)..(174): Homolog of NCBI NO: 7443717 NR Description: probable sterol 24-C-methyltransferase (EC
  misc_feature (21)..(174): Homolog of NCBI NO: 7443718 NR Description: probable sterol 24-C-methyltransferase (EC
  misc_feature (21)..(174): Homolog of NCBI NO: 2246456 NR Description: S-adenosyl-methionine-sterol-C-methyltransferase
  misc_feature (21)..(174): Homolog of NCBI NO: 15222955 NR Description: S-adenosyl-methionine-sterol-C-methyltransferase,
  misc_feature (21)..(174): Homolog of NCBI NO: 21555010 NR Description: sterol-C-methyltransferase [Arabidopsis thaliana]
  misc_feature (21)..(174): Homolog of NCBI NO: 1061040 NR Description: sterol-C-methyltransferase [Arabidopsis thaliana]
  misc_feature (21)..(174): Homolog of NCBI NO: 23397216 NR Description: putative sterol-C-methyltransferase [Arabidopsis
  misc_feature (21)..(174): Homolog of NCBI NO: 22136020 NR Description: 24-sterol C-methyltransferase [Arabidopsis
  misc_feature (21)..(174): Homolog of NCBI NO: 15217917 NR Description: sterol-C-methyltransferase
KKRDLKLSLSLSWSSSLLTKMDSLTLFFTGALVAVGIYWFLCVLGPAERKGKRAVDLSGGSISAEKVQDNYKQYWSFFRRPKEIETAEKVPDFVDTFYNLVTDIYEWGWGQSFHFSPSIPGKSHKDATRLHEEMAVDLIQVKPGQKILDVGCGVGGPMRAIASHSRANVVGITITSIR

SEQ ID NO: 22897 - protein, 177 aa, Arabidopsis thaliana
  peptide (1)..(177): Ceres Seq. ID no. 12339162
  misc_feature (1)..(97): Pfam Name: ubiE/COQ5 methyltransferase family Pfam Description: ubiE/COQ5 methyltransferase family
  misc_feature (1)..(170): Homolog of NCBI NO: 3560533 NR Description: 24-methylene lophenol C24(1)methyltransferase
  misc_feature (1)..(171): Homolog of NCBI NO: 7443717 NR Description: probable sterol 24-C-methyltransferase (EC
  misc_feature (1)..(171): Homolog of NCBI NO: 7443718 NR Description: probable sterol 24-C-methyltransferase (EC
  misc_feature (1)..(175): Homolog of NCBI NO: 2246456 NR Description: S-adenosyl-methionine-sterol-C-methyltransferase
  misc_feature (1)..(175): Homolog of NCBI NO: 15222955 NR Description: S-adenosyl-methionine-sterol-C-methyltransferase,
  misc_feature (1)..(177): Homolog of NCBI NO: 21555010 NR Description: sterol-C-methyltransferase [Arabidopsis thaliana]
  misc_feature (1)..(177): Homolog of NCBI NO: 1061040 NR Description: sterol-C-methyltransferase [Arabidopsis thaliana]
  misc_feature (1)..(177): Homolog of NCBI NO: 23397216 NR Description: putative sterol-C-methyltransferase [Arabidopsis
  misc_feature (1)..(177): Homolog of NCBI NO: 22136020 NR Description: 24-sterol C-methyltransferase [Arabidopsis
  misc_feature (1)..(177): Homolog of NCBI NO: 15217917 NR Description: sterol-C-methyltransferase
MPFDDNSFDGAYSIEATCHAPKLEEVYAEIYRVLKPGSMYVSYEWVTTEKFKAEDDEHVEVIQGIERGDALPGLRAYVDIAETAKKVGFEIVKEKDLASPPAEPWWTRLKMGRLAYWRNHIVVQILSAVGVAPKGTVDVHEMLFKTADYLTRGGETGIFSPMHMILCRKPESPEESS

SEQ ID NO: 22898 - protein, 158 aa, Arabidopsis thaliana
  peptide (1)..(158): Ceres Seq. ID no. 12339163
  misc_feature (1)..(154): Homolog of NCBI NO: 3560533 NR Description: 24-methylene lophenol C24(1)methyltransferase
  misc_feature (9)..(154): Homolog of NCBI NO: 7443717 NR Description: probable sterol 24-C-methyltransferase (EC
  misc_feature (1)..(154): Homolog of NCBI NO: 7443718 NR Description: probable sterol 24-C-methyltransferase (EC
  misc_feature (1)..(154): Homolog of NCBI NO: 2246456 NR Description: S-adenosyl-methionine-sterol-C-methyltransferase
  misc_feature (1)..(154): Homolog of NCBI NO: 15222955 NR Description: S-adenosyl-methionine-sterol-C-methyltransferase,
  misc_feature (1)..(154): Homolog of NCBI NO: 21555010 NR Description: sterol-C-methyltransferase [Arabidopsis thaliana]
  misc_feature (1)..(154): Homolog of NCBI NO: 1061040 NR Description: sterol-C-methyltransferase [Arabidopsis thaliana]
  misc_feature (1)..(154): Homolog of NCBI NO: 23397216 NR Description: putative sterol-C-methyltransferase [Arabidopsis
  misc_feature (1)..(154): Homolog of NCBI NO: 22136020 NR Description: 24-sterol C-methyltransferase [Arabidopsis
  misc_feature (1)..(154): Homolog of NCBI NO: 15217917 NR Description: sterol-C-methyltransferase
MDSLTLFFTGALVAVGIYWFLCVLGPAERKGKRAVDLSGGSISAEKVQDNYKQYWSFFRRPKEIETAEKVPDFVDTFYNLVTDIYEWGWGQSFHFSPSIPGKSHKDATRLHEEMAVDLIQVKPGQKILDVGCGVGGPMRAIASHSRANVVGITITSIR

SEQ ID NO: 22899 - DNA, 1111 bp, Arabidopsis thaliana
  misc_feature (1)..(1111): Ceres Seq. ID no. 12327170
  misc_feature: MA Experiment ID: 108433 Result: Up-regulated in Transcription
  misc_feature: MA Experiment 108433 PARAMETER Experiment Name: At_rhl_Mutant2_cDNA_P Parameter: Age (day) Value: 7
  misc_feature: MA Experiment 108433 PARAMETER Experiment Name: At_rhl_Mutant2_cDNA_P Parameter: Organism Value: A. thaliana
  misc_feature: MA Experiment 108433 PARAMETER Experiment Name: At_rhl_Mutant2_cDNA_P Parameter: Plant Line Value: rhl Mutant vs. wt landsburg
  misc_feature: MA Experiment 108433 PARAMETER Experiment Name: At_rhl_Mutant2_cDNA_P Parameter: Tissue Value: Roots
  misc_feature: MA Experiment ID: 20000224 Result: Down-regulated in Transcription
atcagtttgctttcacagtggagtcggtgctctcttttttttcttctctctttcttttcacctctcgccggatcccggcgatcttataggaggcaaatctatcagtatcgttattctaggatctctaacaaacaatgaatcgccaccacgatcccaatcctttcgatgaggacgaagaaatcgtcaatcctttttcgaaaggtggtggaagggttcctgctgcatctaggccagttgaatatggtcaaagccttgatgctactgttgatattccattggataatatgaatgactcttcacagaaacagagaaagcttgctgactgggaagctgagctcaggaagaaagaaatggatataaagcgaagagaggaagctattgctaaatttggtgtgcagatagatgataaaaactggccaccgtttttcccaatcatacaccatgacattgctaaagagataccagttcatgcacaaaagctgcagtatctggctttcgctagttggttaggtatcgttctgtgtctggtattcaatgtcattgcaacgatggtctgctggattaaaggcggaggtgttaaaatctttttcctggccacaatatatgcattgatcggatgtccactctcttatgtactatggtacaggccactctaccgagccatgaggactgacagtgctttgaagtttggttggtttttcttcacctacttgattcacattggcttctgcatcgttgctgccatcgcccctccaatctttttccatggaaaatcattaacgggtgtgcttgcagcaattgatgtcatctcagacagtttattagctgggatcttctactttatcggattcggtctcttctgcttggagtcactgctgagtctatgggttcttcagaaaatttacctctactttaggggaaacaagtgaaaaggagataaagaggaagatgatggtaattttcccttacgatataaggtctgaaatatgtgtatctcctatgaatgtaattaccattttaccgtttgatgcgttgtgttgattgaggtaaattctttagttactatagtagcaagagagagtggttgttcggccatttctttatgtttttt

SEQ ID NO: 22900 - protein, 264 aa, Arabidopsis thaliana
  peptide (1)..(264): Ceres Seq. ID no. 12327171
  misc_feature (90)..(264): Pfam Name: SCAMP family Pfam Description: SCAMP family
  misc_feature (5)..(263): Homolog of NCBI NO: 18379111 NR Description: expressed protein
  misc_feature (28)..(264): Homolog of NCBI NO: 34899754 NR Description: putative secretory carrier membrane protein
  misc_feature (1)..(264): Homolog of NCBI NO: 15220305 NR Description: secretory carrier membrane protein, putative
  misc_feature (4)..(254): Homolog of NCBI NO: 38567965 NR Description: OSJNBa0093F12.6 [Oryza sativa (japonica
  misc_feature (1)..(263): Homolog of NCBI NO: 15219893 NR Description: secretory carrier membrane protein
  misc_feature (1)..(263): Homolog of NCBI NO: 7109232 NR Description: secretory carrier membrane protein [Oryza sativa]
  misc_feature (1)..(263): Homolog of NCBI NO: 15226410 NR Description: putative secretory carrier-associated membrane
  misc_feature (1)..(262): Homolog of NCBI NO: 3941289 NR Description: similarity to SCAMP37 [Pisum sativum]
  misc_feature (4)..(264): Homolog of NCBI NO: 38347080 NR Description: OSJNBa0006A01.21 [Oryza sativa (japonica
  misc_feature (1)..(264): Homolog of NCBI NO: 15222550 NR Description: secretory carrier membrane protein, putative
MNRHHDPNPFDEDEEIVNPFSKGGGRVPAASRPVEYGQSLDATVDIPLDNMNDSSQKQRKLADWEAELRKKEMDIKRREEAIAKFGVQIDDKNWPPFFPIIHHDIAKEIPVHAQKLQYLAFASWLGIVLCLVFNVIATMVCWIKGGGVKIFFLATIYALIGCPLSYVLWYRPLYRAMRTDSALKFGWFFFTYLIHIGFCIVAAIAPPIFFHGKSLTGVLAAIDVISDSLLAGIFYFIGFGLFCLESLLSLWVLQKIYLYFRGNK

SEQ ID NO: 22901 - protein, 214 aa, Arabidopsis thaliana
  peptide (1)..(214): Ceres Seq. ID no. 12327172
  misc_feature (40)..(214): Pfam Name: SCAMP family Pfam Description: SCAMP family
  misc_feature (1)..(213): Homolog of NCBI NO: 18379111 NR Description: expressed protein
  misc_feature (1)..(214): Homolog of NCBI NO: 34899754 NR Description: putative secretory carrier membrane protein
  misc_feature (1)..(214): Homolog of NCBI NO: 15220305 NR Description: secretory carrier membrane protein, putative
  misc_feature (1)..(204): Homolog of NCBI NO: 38567965 NR Description: OSJNBa0093F12.6 [Oryza sativa (japonica
  misc_feature (1)..(213): Homolog of NCBI NO: 15219893 NR Description: secretory carrier membrane protein
  misc_feature (1)..(213): Homolog of NCBI NO: 7109232 NR Description: secretory carrier membrane protein [Oryza sativa]
  misc_feature (1)..(213): Homolog of NCBI NO: 15226410 NR Description: putative secretory carrier-associated membrane
  misc_feature (1)..(212): Homolog of NCBI NO: 3941289 NR Description: similarity to SCAMP37 [Pisum sativum]
  misc_feature (1)..(214): Homolog of NCBI NO: 38347080 NR Description: OSJNBa0006A01.21 [Oryza sativa (japonica
  misc_feature (1)..(214): Homolog of NCBI NO: 15222550 NR Description: secretory carrier membrane protein, putative
MNDSSQKQRKLADWEAELRKKEMDIKRREEAIAKFGVQIDDKNWPPFFPIIHHDIAKEIPVHAQKLQYLAFASWLGIVLCLVFNVIATMVCWIKGGGVKIFFLATIYALIGCPLSYVLWYRPLYRAMRTDSALKFGWFFFTYLIHIGFCIVAAIAPPIFFHGKSLTGVLAAIDVISDSLLAGIFYFIGFGLFCLESLLSLWVLQKIYLYFRGNK

SEQ ID NO: 22902 - protein, 192 aa, Arabidopsis thaliana
  peptide (1)..(192): Ceres Seq. ID no. 12327173
  misc_feature (18)..(192): Pfam Name: SCAMP family Pfam Description: SCAMP family
  misc_feature (1)..(190): Homolog of NCBI NO: 3941289 NR Description: similarity to SCAMP37 [Pisum sativum]
  misc_feature (1)..(192): Homolog of NCBI NO: 38347080 NR Description: OSJNBa0006A01.21 [Oryza sativa (japonica
  misc_feature (1)..(192): Homolog of NCBI NO: 34899754 NR Description: putative secretory carrier membrane protein
  misc_feature (1)..(182): Homolog of NCBI NO: 38567965 NR Description: OSJNBa0093F12.6 [Oryza sativa (japonica
  misc_feature (1)..(191): Homolog of NCBI NO: 7109232 NR Description: secretory carrier membrane protein [Oryza sativa]
  misc_feature (1)..(191): Homolog of NCBI NO: 15226410 NR Description: putative secretory carrier-associated membrane
  misc_feature (1)..(191): Homolog of NCBI NO: 15219893 NR Description: secretory carrier membrane protein
  misc_feature (1)..(192): Homolog of NCBI NO: 15220305 NR Description: secretory carrier membrane protein, putative
  misc_feature (1)..(191): Homolog of NCBI NO: 18379111 NR Description: expressed protein
  misc_feature (1)..(192): Homolog of NCBI NO: 15222550 NR Description: secretory carrier membrane protein, putative
MDIKRREEAIAKFGVQIDDKNWPPFFPIIHHDIAKEIPVHAQKLQYLAFASWLGIVLCLVFNVIATMVCWIKGGGVKIFFLATIYALIGCPLSYVLWYRPLYRAMRTDSALKFGWFFFTYLIHIGFCIVAAIAPPIFFHGKSLTGVLAAIDVISDSLLAGIFYFIGFGLFCLESLLSLWVLQKIYLYFRGNK
